United States Patent Application Publication US 2004/0029129 A1 - sequence listing, part 20

SEQ ID NO: 59575 - protein, 320 aa, Klebsiella pneumoniae
MPVGRDENDNVEVSRWGTPRQFDFEVRDHVTLGEMHGGLDFAAAVKLTGSRFVVMKGQLARLHRALAQFMLDLHTEQHGYSENYVPYLVNQDTLYGTGQLPKFAGDLFHTRPLEEEADSSNYALIPTAEVPLTNLVRDEIIDEDDLPIKMTAHTPCFRSEAGSYGRDTRGLIRMHQFDKVEMVQIVRPEDSMAALEEMTGHAEKVLQLLGLPYRKVALCTGDMGFSACKTYDLEVWVPAQNTYREISSCSNVWDFQARRMQARCRSKSDKKTRLVHTLNGSGLAVGRTLVALMENYQQADGRIEIPEVLRPYMRGLEYIG

SEQ ID NO: 59576 - protein, 310 aa, Klebsiella pneumoniae
MPIVLVDWSDIREQKRLMVLRASVALHGRSVTLYEKAFPLSEQCSKKAHDQFLADLASILPSNTTPLIVSDAGFKVPWYKSVEKLGWYWLSRVRGKVQYADLGAENWKPISHLHDMSSSHSKTLGYKRLTKSNPISCQILLYKSRSKGRKNQRSTRTHCHHPSPKIYSASAKEPWILATNLPVEIRTPKQLVNIYSKRMQIEETFRDLKSPAYGLGLRHSRTSSSERFDIMLLIALMLQLTCWLAGVHAQKQGWDKHFQANTVRNRNVLSTVRLGMEVLRHSGYTITREDSLVAATLLTQNLFTHGYVWG

SEQ ID NO: 59577 - protein, 276 aa, Klebsiella pneumoniae
MSQAALNTRNHEEEASSSRRSNGTRLAGIVFLLAVLFTVLVSGWMVLGWMEDAQRLPLSKMVVTGERHYTRNDDIRQAILALGSPGTFMTQDVNIIQSQIERLPWIKQASVRKQWPDELKIHLVEYVPIARWNDQHMVDAEGNAFSVPADRTSKQNLPMLYGPEGSENEVLQGYRDMGQVLAKDKFTLKVAAMTARRSWQLTLNNDIKLNLGRGDTMKRLQRFMELYPVLQQQAQTDGKRISYVDLRYDSGAAVGWVPAPAEETNQQQNQAQAEQQ

SEQ ID NO: 59578 - protein, 495 aa, Klebsiella pneumoniae
MADRNLRDLLAPWVPNAPERILREMTLDSRVAASGDLFIAVQGHQADGRRYIPQAIAQGVAAIIAEAQGEAKDGEIREMHGVPVIYLSQLNERLSALAGRFYHQPSQQLRLVGVTGTNGKTTTTQLLAQWAKLLGETSAVMGTVGNGLLDKVVPTENTTGSAVDVQHVLSSLVGQGATFGAMEVSSHGLVQHRVAALQFAASVFTNLSRDHLDYHGDMEHYEAAKWLLYSTHHCGQAIVNADDEVGRRWLAKLPDAVAVSMEDHINPNCHGRWLKATAVNYHDSGATIQFDSSWGKGEIESRLMGAFNVSNLLLALATLLALGYPLADLLKTAARLQPVCGRMEVFSAPGKPAVVVDYAHTPDALEKALQAARLHCSGKLWCVFGCGGDRDKGKRPLMGAIAEEFADIVVVTDDNPRTEEPRAIINDILAGMLDAGQAKVMEGRAEAVTNAVMQAKENDVVLVAGKGHEDYQIVGNRRLDYSDRVTVARLLGAVA

SEQ ID NO: 59579 - protein, 491 aa, Klebsiella pneumoniae
MNTQDLAKLRSIVPEMRRVRHIHFVGIGGAGMGGIAEVLANEGYQISGSDLAPNPVTQQLSQLGATIYFNHRPENVRDASVVVVSSAISADNPEIVAAHEARIPVIRRAEMLAELMRFRHGIAIAGTHGKTTTTAMVSSIYAEAGLDPTFVNGGLVKAAGVHARLGHSRYLIAEADESDASFLHLQPMVAIVTNIEADHMDTYHGDFENLKQTFINFLHNLPFYGRAVMCVDDPVIRELLPRVGRQITTYGFSDDADVRVEDYRQVGAQGHFRLVRQDKAILQVTLNAPGRHNALNAAAAVAVATEEGIDDRAILRALESFQGTGRRFDFLGEFPLAEVNGKPGSAMLIDDYGHHPTEVDATIKAARAGWPDKNLVMVFQPHRYTRTRDLYDDFANVLTQVDALLMLDVYPAGEAPIPGADSRSLCRTIRGRGKVDPILVPDSAQAAEMLASVLTGNDLVLVQGAGNIGKIARHLAEIKLIPQKTEEERHG

SEQ ID NO: 59580 - protein, 588 aa, Klebsiella pneumoniae
MKAAPKTPKAKRQEEQANFISWRFALLCGCILLALAFLLGRVAWLQVISPDMLVRQGDMRSLRVQEVSTARGMITDRSGRPLAVSVPVKAIWADPKELHDAGGVTLDTRWKALADALNMPLDQLATRINTNPRMRFIYLARQVNPDMADYIKKLKLPGIHLREESRRYYPSGEVTAHLIGFTNVDSQGIEGVEKSFDKWLTGQPGERIVRKDRYGRVIEDISSTDSQAAHNLALSIDERLQALVYRELNNAVAFNKAESGSAVLVDVNTGEVLAMANSPSYNPNNFSGTAKDTMRNRAITDVFEPGSTVKPMVVMTALQRGIVNENTVLNTVPYRINGHEIKDVARYSELTLTGVLQKSSNVGVSKLALAMPSSALVDTYSRFGLGKATNLGLVGERSGLYPQKQRWSDIERATFSFGYGLMVTPLQLARVYATIGSYGIYRPLSITKVDPPVPGERVFPESLVRTVVHMMESVALPGGGGVKAAIKGYRIAIKTGTAKKVGPDGRYINKYIAYTAGVAPASHPRFALVVVINDPQAGKYYGGAVSAPVFGAIMGGVLRTMNIEPDALATGEKSEFVINQGEGTGGRS

SEQ ID NO: 59581 - protein, 348 aa, Klebsiella pneumoniae
MVMAGGTGGHVFPGLAVAHHLMDQGWQVRWLGTADRMEADLVPKNGIEIDFIRISGLRGKGIKAQLLAPVRIFNAWRQARAIMKRFQPDVVLGMGGYVSGPGGLAAWSLGIPVVLHEQNGIAGLTNKWLAKIAKKVMQAFPGAFPHADVVGNPVRTDVLALPLPGQRLVGRQGPIRVLVVGGSQGARVLNQTMPQVAAKLGATVTIWHQSGKGGQQTVQQAYAAAGQPQHKVTEFIDDMAAAYAWADVVVCRSGALTVSEIAAAGLPALFVPFQHKDRQQYWNALPLEKAGAAKILEQPEFTVEAVASTLASWDRETLLDMAERARGASIPDATERVAEEVSAVALAR

SEQ ID NO: 59582 - protein, 424 aa, Klebsiella pneumoniae
MRFSLPRLRMPQLSLPRLRLPRLPGMFIFAWLFAALKGWVMGSRPKDNDSLVMYDRMLLWLTFGLAAIGFIMVTSASMPVGQRLANDPFLFAKRDGLYIVLAFALAMITLRLPMDFWQRHSTAMLIASIVMLLIVLVVGSSVNGASRWIALGPLRIQPAEFTKLSLFCYIANYLVRKADEVRNNLRGFLKPMGVIFVLAILLLAQPDLGTVVVLFVTTLAMLFLAGAKLWQFIAIIGMGISAVVLLILAEPYRIRRVTSFWNPWEDPFGSGYQLTQSLMAFGRGEMWGQGLGNSVQKLEYLPEAHTDFIFAIIGEELGYIGVVLALLMVFFVAFRAMSIGRKALEIDHRFSGFLACAIGIWFSFQALVNVGAAAGMLPTKGLTLPLISYGGSSLLIMSTAIMLLLRIDYETRLEKAQAFTRGVR

SEQ ID NO: 59583 - protein, 348 aa, Klebsiella pneumoniae
MKRPGINGSRKISTLSSPRPVNCRSACRICPYKMMENYKHTTVLLDEAVNGLNIRPDGIYIDGTFGRGGHSRLILSRLGAEGRLLAIDRDPQAIAVAQTIDDPRFSIVHGPFSQLAEYVGERNLTGKIDGILLDLGVSSPQLDDAERGFSFMRDGPLDMRMDPTRGQSAAEWLQTAEEDDIAWVIKTFGEERFGKRIARAIVERNRIQPMTRTKSLAEVIAAAMPVKDKHNIPATRTFQAVRIWVNSELEEIEQRAKHSSLSAAGPGAARLLDHSFHSLEDRIVKRFMREQRPRSQVPAGIPMTEAQLKKLGGRELRALGKLMPGEEEVAENPRARSSVLRIAERTNA

SEQ ID NO: 59584 - protein, 438 aa, Klebsiella pneumoniae
MADYQGKKVVIIGLGMTGLSCVDFFMARGVTPRVMDTRVAPPGLDKLPESVECHVGGLNDTWLLAADLIVASPGIALAHPSLSAAADAGVEIVGDIELFCREAQAPIIAITGSNGKSTVTTLVGEMAKAAGVNVGVGGNIGLPALMLLDTDRELYVLELSSFQLETTSSLQAVAATILNVTEDHMDRYPLGLQQYRAAKLRIYENAKTCVVNADDALTMPVRGADERCISFGVDVGDYHLNRQQGETWLRVKGEKVLNVKEMPLTGQHNYSNALAALALADAAGLPRASSLKALTTFTGLAHRFQLVLDHNGVRWINDSKATNVGSTEAALNGLQLDGTLYLLLGGDGKSADFTPLKRYLGGDRIRLYCFGRDGAELAELRPEVAVQTETMEQAMRQIAPLVKAGDMVLLSPACASLDQFKNFEQRGEMFARLAKELG

SEQ ID NO: 59585 - protein, 120 aa, Klebsiella pneumoniae
MFRGATLVNLDSKGRLAVPTRYREGLIEDAAGQLVCTIDIHHPCLLLYPLPEWEVIEQKLSRLSSMNPVERRVQRLLLGHASECQMDNAGRLLIAPVLRQHAGLTKEVMLVGQFNKFELW

SEQ ID NO: 59586 - protein, 360 aa, Klebsiella pneumoniae
MLVWLAEHLVKYYSGFNVFSYLTFRAIVSLLTALFISLWMGPRMIARLQKLAFGQVVRNDGPESHFSKRGTPTMGGIMILTAITVSVLLWAYPSNPYVWCVLTVLIGYGIIGFVDDYRKVVRKDTKGLIARWKYFWMSVIALGVAFALYLAGKDTPATELVVPFFKDVMPQLGLFYILLAYFVIVGTGNAVNLTDGLDGLAIMPTVFVAAGFALVAWATGNMNFANYLHIPYLRHAGELVIVCTAIVGAGLGFLWFNTYPAQVFMGDVGSLALGGALGIIAVLLRQEFLLVIMGGVFVVETLSVILQVGSFKLRGQRIFRMAPIHHHYELKGWPEPRVIVRFWIISLMLVLIGLATLKVR

SEQ ID NO: 59587 - protein, 452 aa, Klebsiella pneumoniae
MIRFTLSQLAAIAHGERQGRDVAIDEVTTDTRKVTAGCLFVALKGERFDAHDFAEQAKAAGAGALLVSRPLACDLPQVIVNDTRQAFGELAAWVRQQVPTRVVALTGSSGKTSVKEMTAAILSQCGNTLYTAGNLNNDIGVPMTLLRLTKEHQYAVIELGANHQGEIAWTVSLTRPEAALVNNLAAAHLEGFGSLAGVAKAKGEIYTGLPENGIAILNADNNDWLNWQAVIGDRKVWRFSPNAANSDFTATNVQITSHGTEFTLQTPTGNVDVLLPLPGRHNIANALAATALAMAVGADLAAVKAGLAQLQAVPGRLFPIRLTESQLLLDDSYNANVGSMTAAVQVLSEMPGFRTMVVGDMAELGAESAACHREVGEAAKAAGLDCVLSVGALSADISRASGVGEHFNDKAAVVARLRELLAEHKIMTILVKGSRSAAMEEVVRALQETGTC

SEQ ID NO: 59588 - protein, 390 aa, Klebsiella pneumoniae
ARILALSALTTMMFSASALAKIEEGKLVIWINGDKGYNGLAEVGKKFEKDTGIKVSVEHPDKLEEKFPQVAATGDGPDIIFWAHDRFGGYAQSGLLAEITPDKAFQDKLYPFTWDAVRYNGKLIAYPIAVEALSLIYNKDLVPNPPKTWEEIPALDKELKAKGKSALMFNLQEPYFTWPLIAADGGYAFKFENGKYDVKDVGVDSAGAKAGLTFLVDLIKNKHMNADTDYSIAEAAFNKGETAMTINGPWAWSNIDKSKVNYGVTLLPTFKGKPSKPFVGVLSAGINAASPNKELAKEFLENYLMTDQGLEAVNNDKPLGAVALKSFQEKLEKDPRIAATVANAQKGEIMPNIPQMSAFWYAVRTAVINAASGRQTVDAALKDAQSRITK

SEQ ID NO: 59589 - protein, 122 aa, Klebsiella pneumoniae
MANNTTGLTRIIKAAGYSWKGFRAAWINEAAFRQEGVAAIVAVAVACWLDVDAITRVLLIGSVLLVMIVEILNSAIEAVVDRIGSDFHELSGRAKDMGSAAVLLAIIIALITWGTLLWSHYH

SEQ ID NO: 59590 - protein, 369 aa, Klebsiella pneumoniae
MASVQLRNVTKAWGDVVVSKDINLDIHEGEFVVFVGPSGCGKSTLLRMIAGLETITSGDLFIGDTRMNEIPPAERGVGMVFQSYALYPHLSVAENMSFGLKLAGAKKDLINQRVTQVAEVLQLAHLLERKPKALSGGQRQRVAIGRTLVAEPSVFLLDEPLSNLDAALRVQMRIEISRLHKRLGRTMIYVTHDQVEAMTLADKIVVLDAGRVAQVGKPLELYHYPADRFVAGFIGSPKMNFLPVKVTATAIDQVQVELPNRQQIWLPVDSANVQAGANMSLGIRPEHLLPSDIADVTLEGEVQVVEQLGHETQIHIQIPAIRQNLVYRQNDVVLVEEGATFAIGLPPERCHLFREDGTACRRLHKEPGV

SEQ ID NO: 59591 - protein, 440 aa, Klebsiella pneumoniae
MQRKAMISGDRMMITLRKLPLAVAVAAGVMSAQALAVDFHGYARSGIGWTGSGGEQQCFKATGAQSKYRLGNECETYAELKLGQELWKEGDKSFYFDTNVAYSVNQEDDWESTSPAFREANIQGKNLIDWLPGSTLWAGKRFYQRHDVHMIDFYYWDISGPGAGLENVDLGFGKLSLAATRNSESGGSYTFSSDDTKKYAAKTANDVFDIRLAGLETNPGGVLELGVDYGRANPQDDYRLEDGASKDGWMWTGEHTQSIWGGFNKFVVQYATDAMTSWNSGHSQGTSIDNNGSMIRVLDHGAMDFNDDWGLMYVAMYQDVDLDSKNGSTWYTVGVRPMYKWTPIMSTQLEIGYDNVKSQRTSENNNQYKITLAQQWQAGNSVWSRPAIRIFATYAKWDENWGYSNTSGLQTKDSSGSGAFTSSRGDDSEVTFGAQMEVWW

SEQ ID NO: 59592 - protein, 284 aa, Klebsiella pneumoniae
MVLMIVSGRSGSGKSVALRALEDMGFYCVDNLPVVLLPDLARSLADRNISAAVSIDVRNMPESPEIFEQAMQNLPECFSPQLLFLDADRNTLIRRYSDTRRLHPLSSKNLSLESAIDEESDLLEPLRSRADLIVDTSEMSVHELAEMLRTRLLGKRERELTMVFESFGFKHGIPIDADYVFDVRFLPNPHWDPKLRPMTGLDKPVAAFLDRHTEVHNFIYQTRSYLELWLPMLETNNRSYLTVAIGCTGGKHRSVYIAEQLADYFRSRGKNVQSRHRTLEKRKS

SEQ ID NO: 59593 - protein, 241 aa, Klebsiella pneumoniae
MRLRVAPLALLKRLALRLLLIAAVFWGGGIALFSMLPVPFSAVMLERQVSAWLSGDFHYLAHSDWVAMDKISPWMGLAVIAAEDQKFPEHWGFDVSAIEKALAHNERHETRIRGASTLSQQTAKNLFLWDGRSWLRKGLEAGLTVGIETVWSKKRILTVYLNIAEFGDGIFGVEAAAQRYFHKPASQLTPGEAALLAAVLPNPIRYRADAPSGYVRSRQAWILRQMRQLGGEGFMREHKLY

SEQ ID NO: 59594 - protein, 246 aa, Klebsiella pneumoniae
MTGTISAPLYLLRGLQLIGWRDMQHALDYLFADGALREGTLVAINAEKMLAVEDNPEVRALIEAAEFKYADGISVVRSLRKKYPQAQVSRVAGADLWEALMQRAGAEGTPVFLVGGKPEVLAQTESRLRQRWQVNIVGSQDGYFTPEQRQALFERIRDSGAKIVTVAMGSPRQEIFMRDCRRLYPHALYMGVGGTYDVFTGHVHRAPKFWQDLGLEWFYRLLLQPSRIKRQFRLLRYLRWHYSGKL

SEQ ID NO: 59595 - protein, 376 aa, Klebsiella pneumoniae
MKVLTVFGTRPEAIKMAPLVHALAKDPHFEAKVCVTAQHREMLDQVLKLFSIVPDYDLNIMKPGQGLTEITCRILEGLKPVLESFKPDVVLVHGDTTTTMAASLAAFYQRIPVGHVEAGLRTGDLSSPWPEEGNRTLTGHLATYHFAPTETSRQNLLRENIADSRITVTGNTVIDALFWVRDRVLGDEALRETLLQRYPFISHGKKMILVTGHRRESFGLGFEQICQALAEIAHTHPEVQIVYPVHLNPNVSEPVNRILGHIDNVMLIEPQDYLPFVWLMDRAWLILTDSGGIQEEAPSLGKPVLVMRDMTERPEAVAAGTVCLVGTDSQRIVAEVTRLLEDDAAYQAMSRAHNPYGDGEACRRILSALKNNQVTL

SEQ ID NO: 59596 - protein, 338 aa, Klebsiella pneumoniae
MNVENELDIRGLFRALWAGKGWIVGGAVLFAAIVLVYTFFARQEWSATAITDRPTVNMLGGYYSQQQFLRNLDIKADLASVDQPSAMDEAYKEFIMQLASWDTRRDFWLQTDYYKQRQSGNARADAAMLDDLINNIQFMPGDAAKSINDSVKLTAETGQDANNLLRQYVAFASQRAAGHLNDELKGAWAARTVQMKAQVKRQEEVAEAIFNRRTHSVEQALKVAQQHNISRSETDVPADQLPDSELFLLGRPMLQARLENLQAVGPEYDLDYDQNRAMLSTLNVGPTLDPRFQTYRYLRTPEEPVKRDSPRRVFLMVMWGIVGALIGAGVALSRRRVL

SEQ ID NO: 59597 - protein, 334 aa, Klebsiella pneumoniae
MDKPNYRKRHQGLIPLVGGISVYAGICFTFAIADYYIPHASLYLACAGVLVLVGALDDRFDISVKIRAVIQAAIAVIMMMAGNLHLSSLGFIFGSWELVLGPFGFFLTLFAVWAAINAFNMVDGIDGLLGGLSSVSFAATGIILWFDGQYSLAMWCFAMIAAILPYILLNLGALGRRYKVFMGDAGSTMIGFTIIWILLETTQGKTHPISPVTALWIIAIPLMDMVAIMYRRLRKGMSPFSPDRQHIHHLIMRAGFTSRQAFVLITLAAALLALVGVVAEYTRIVPEWVMLILFLVAFFLYGYCIKRAWKVARLVKRIRRRIRRHSGNNPKLTK

SEQ ID NO: 59598 - protein, 400 aa, Klebsiella pneumoniae
MNLTELKNTPVSELITLGENMGLENLARMRKQDIIFAILKQHSKSGEDILGDGVLEILQDGFGFLRSADSSYLAGPDDIYVSPSQIRRFNLRTGDTISGKIRPPKEGERYFALLKVNEVNYDKPENARNKILFENLTPLHANSRLRMERGNGSTEDLTARVLDLASPIGRGQRGLIVAPPKAGKTMLLQNIAQSIAYNHPDCVLMVLLIDERPEEVTEMQRLVKGEVVASTFDEPASRHVQVAEMVIEKAKRLVEHKKDVIILLDSITRLARAYNTVVPASGKVLTGGVDANALHRPKRFFGAARNVEEGGSLTIIATALIDTGSKMDEVIYEEFKGTGNMELHLSRKIAEKRVFPAIDYNRSGTRKEELLTTQEELQKMWILRKIIHPMGEIDAMEFLI

SEQ ID NO: 59599 - protein, 217 aa, Klebsiella pneumoniae
MSEAMMWLLLRGVWETLAMTFVSGFFGFVLGLPVGVLLYVTRPGQIVANAKLYRTLSALVNIFRSIPFIILLVWMIPFTRVIVGTSIGLQAAIVPLTVGAAPFIARMVENALLEIPTGLIEASRAMGATPLQIVRKVLLPEALPGLVNAATITLITLVGYSAMGGAVGAGGLGQIGYQYGYIGYNATVMNTVLVLLVVLVYLIQFSGDRIVRAVTHK

SEQ ID NO: 59600 - protein, 271 aa, Klebsiella pneumoniae
MAFNFKTFAAVGALIGSLALVGCGQDEKDPNHIKVGVIVGAEQQVAEVAQKVAKEKYGLDVELVTFNDYVLPNEALSKGDIDVNAFQHKPYLDQQIKDRGYKLVAVGNTFVYPIAGYSKKIKSLDELQPGSQIAVPNDPTNLGRSLLLLQQVGLIKLKDGVGLLPTSLDIVENPKNLKIVELEAPQLPRSLDDAQIALAVINTTYASQIGLTPAKDGIFVEGKESPYVNLIVAREDNKDAENVKKFVQAYQSDEVYEAANKIFNGGAVKGW

SEQ ID NO: 59601 - protein, 235 aa, Klebsiella pneumoniae
MSAFQFAQIGVIRSPYKEKFAVPRQPGLVKHGGGELHLVAPYNQADAVRGLESFSHLWILFVFHQTMEGGWRPTVRPPRLGGNARMGVFATRSTFRPNPIGMSLVELKGIRCQKDQVILELGSLDLVDGTPVVDIKPYLPFAEALPDASASYAQQAPLAGMNVSFTPEIDAQLLTLEKRYPHIKAFIREVLAQDPRPAYRKEEQAGKTYAVWLLDFNVRWRVIATGFEVFALEAR

SEQ ID NO: 59602 - protein, 549 aa, Klebsiella pneumoniae
MRTSQYLLSTLKETPADAEVISHQLMLRAGMIRKLASGLYTWLPTGVRVLKKVENIVREEMNNAGAIEVLMPVVQPSELWQESGRWEQYGPELLRIADRGDRPFVLGPTHEEVITDLIRNELNSYKQLPLNFYQIQTKFRDEVRPRFGVMRSREFLMKDAYSFHTSQESLQETYDAMYAAYSKIFSRMGLDFRAVQADTGSIGGSASHEFQVLAQSGEDDVIFSDSSDYAANIEFAEAVAPKEPRAAATQEMTLVDTPNAKTSAELVEQFNLPIEKTVKTLLVKAVEDSASPLVALLVRGDHELNEVKAEKLPQVASPLTFATEEEIRALVNAGPGSLGPVNMPVPVIIDRTVAVMSDFAAGANIDGKHYFGINWDRDVATPEVADIRNVVAGDPSPDGKGTLLIKRGIEVGHIFQLGTKYSEAMKAAVQGEDGRNQILTMGCYGIGVTRVVAAAIEQNFDDRGIVWPDAIAPFQVAILPMNMHKSYRVQELAEKLYAELSAQGIEVLMDDRKERPGVMFADMELIGIPHTIVLGDRNLDNDDIEYKYR

SEQ ID NO: 59603 - protein, 151 aa, Klebsiella pneumoniae
MTTDTHTLHIEEILELLPHRYPFLLVDRVLDFEEGRFLRAVKNVSVNEPFFQGHFPGKPILPGVLILEAMAQATGILAFKSVGKLEPGELYYFAGIDEARFKRPVVPGDQMIMEVTFEKTRRGLTRFKGVALVDGKVVCEATMMCARSREA

SEQ ID NO: 59604 - protein, 280 aa, Klebsiella pneumoniae
MTAHLLRSGLLTFALLLLTACTLDVGRSSPSTSAADDHSSSWAVTLQRQSSIAGSGLREIAESDLRSGDLLFSSSLGVTSLGIRAFSASSVSHVALYVGEGQVAEATGAGVQVISLQQALAHSDKLFALRVPDLTPDQATAMKSFAWQVKDSGYNYRGIIQFIPYMVTKPLCSLNPFSRDFRQQCVSGLAKAQLGDAASGDKKAWFCSEFVSEAFVRAGHPLTLAQAAWISPSDLLHMREGDVATFKPETQLQYVGHLKLGVYLQAGKLAGLNIPKDGAE

SEQ ID NO: 59605 - protein, 437 aa, Klebsiella pneumoniae
MFVDMTADIAHTLHPHRQLLVAFSGGLDSTVLLHQLVLLREQDPSLTLRAVHVHHGLSAHADDWVAHCRQICQQWQVPLVVHHVTLARGGLGVEAHARAARYQAFQDTLNAGEVLVTAQHQDDQCETLLLALKRGSGPTGLSAMAPSSAFAGSRLLRPLLNETRESLRQWALAHQLSWIEDESNQDDTYDRNFLRLRVIPVLRERWPHFSEAVARSASLCAEQEQLLDEMFAAELASLVAEDGSLAIAPLASMSPPRRAALLRRWLAGQQAPMPAREVPERLWHEVALAREDASPCLRLGEFTVRRFQQRLYWVKYLPGQTDSVQRWPDWRQPLRLADGLGELTLRPGGRLRPPSADEPVTVRFRASGHLHIVGRHGGRKLKKLWQELGVAPWRRDTTPLLFYGETPVAAADDLFVTTEGEVKDGEGVRLMWRKTGD

SEQ ID NO: 59606 - protein, 319 aa, Klebsiella pneumoniae
MSLNFLDFEQPIAELEAKIDSLTAVSRQDEKLDINIDEEVHRLREKSVELTRKIFADLGAWQVAQLARHPRRPYTLDYVRLVFDEFDELAGDRAFADDKAIVGGIARLDGRPVMIIGHQKGRETKEKIRRNFGMPAPEGYRKALRLMEMAERFKMPIITFIDTPGAYPGVGAEERGQSEAIARNLREMSRLSVPVICTVIGEGGSGGALAIGVGDKVNMLQYSTYSVISPEGCASILWKSADKAPLAAEAMGIIAPRLKELKLIDSIVPEPLGGAHRNPEAMAASLKAQLLADLADLDLLSEEELLNRRYQRLMSYGYA

SEQ ID NO: 59607 - protein, 1160 aa, Klebsiella pneumoniae
MAEPRFVHLRVHSDYSMIDGLAKTGPLVKKAASLGMPALAITDFTNLCGLVKFYGTGHGAGIKPIVGADFHVQCDLLGDEFTELTVLAANNTGYQNLTLLISRAYQRGYGALGPWIDRDWLVEHQEGLILLSGGRKGDVGVSLIRGNMPLVEQCVAFYEEHFPDRYFLELIRTGRQDEEAYLHAAVALAEARGLPVVATNDVRFLDTSDFDAHEIRVAIHDGFTLDDPKRPRNYSPQQYMRSEEEMCELFADIPEALANSVEIAKRCNVTVRLGEYFLPQFPTGDMTTEDFLVMKSKEGLEERLEFLFPDPAVRAEKRPEYDQRLDIELQVINQMGFPGYFLIVMEFIQWSKDNGVPVGPGRGSGAGSLVAYALKITDLDPLEFDLLFERFLNPERVSMPDFDVDFCMEKRDQVIEHVADMYGRDAVSQIITFGTMAAKAVIRDVGRVLGHPYGFVDRISKLVPPDPGMTLAKAFEAEPQLPEIYEADEEVKALIDMARKLEGVTRNAGKHAGGVVIAPTKITDFAPLYCDEQGLHPVTQFDKNDVEYAGLVKFDFLGLRTLTIINWALEMINKRREKNGEGPLDIAAIPLDDKKSFDMLQRSETTAVFQLESRGMKDLIKRLQPDCFEDMIALVALFRPGPLQSGMVDNFIDRKHGREEISYPDVQWQHESLKPVLEPTYGIILYQEQVMQIAQVLSGYTLGGADMLRRAMGKKKPEEMAKQRSIFEDGAKKNGIDGELAMKIFDLVEKFAGYGFNKSHSAAYALVSYQTLWLKAHYPAEFMAAVMTADMDNTEKVVGLVDECWRMGLKILPPDINSGLYHFHVNDDGEIVYGIGAIKGVGEGPIEAIIEARNNGGYFRELFDLCARTDIKKLNRRVLEKLIMSGAFDRLGPHRAALMNSLGDALKAADQHAKAEAIGQADMFGVLAEEPEQIEQSYASCQPWPEQVVLDGERETLGLYLTGHPINQYLKEIERYVGGVRLKDMHPTERGKVTTAAGLVIAARVMVTKRGNRIGICTLDDRSGRLEVMLFTDALDKYQQLLEKDRILIVSGQVSFDDFSGGLKMTAREVMDIDEAREKYARGLAISLTDRQIDDQLLNRLRQSLEPHRSGTIPVHLYYQRADARARLRFGATWRVSPSDRLLNDLRGLIGSEQVELEFD

SEQ ID NO: 59608 - protein, 199 aa, Klebsiella pneumoniae
MMEFVYPHTHLVAGVDEVGRGPLVGAVVTAAVILDPAKPIVGLNDSKKLSEKRRLALFDEIKEKALCWSLGRAEPHEIDELNILHATMLAMQRAVAGLSIVPEFVLIDGNRCPSLPMPSQAVVKGDSRVAEISAASILAKVTRDAEMATLDLAFPHYGFAQHKGYPTAVHLQKLQEHGATEHHRRSFGPVKRALGLASN

SEQ ID NO: 59609 - protein, 383 aa, Klebsiella pneumoniae
MAEQRPLTIALVAGETSGDILGAGLIRALKARIPNARFVGVAGPLMQAEGCEAWYEMEELAVMGIVEVLGRLCRLLHIRADLTRRFGELRPDVFVGIDAPDFNITLEGNLKKQGIKTIHYVSPSVWAWRQKRVFKIGRSTDLVLAFLPFEKAFYDKFNVPCRFIGHTMADAMLLDPDKGAARDRLGIPHSVRCLALLPGSRGAEVEMLSADFLKTAQLLRATYPDLQVVVPLVNAKRREQFERIKAETAPDMIVHMLDGQARDAMIASDAALLASGTAALECMLAKCPMVVGYRMKPFTFWLAKRLVKTDYVSLPNLLAGRELVKELLQDECEPQALAAALQPLLADGKTSHEMHETFRALHQQIRCNADEQAADAVLELAKQ

SEQ ID NO: 59610 - protein, 138 aa, Klebsiella pneumoniae
MEEKIQKPGLMMVMKRPSLRQFCWLLGGSLLLGALFWLWLAVQQQEATLAIRPVGQGIGMPDGFSVWHHLDANGIRFKSITPQKDGLLIKFDSTAQGAAAKEVLGRALPHGYIIALLEDDNSPTAWLSRLRDAPHRLG

SEQ ID NO: 59611 - protein, 328 aa, Klebsiella pneumoniae
MGQLVDGVWQDTWYDTKSTGGRFKRSVSAFRNWLTADGAAGPSGEGGFAAEKDRYHLYVSLACPWAHRTLIMRKLKGLEPFLPVSVVNPLMLENGWTFDDSFPEATGDTLYQHDFLYQLYLHADPHYTGRVTVPVLWDKKQQTIVSNESAEIIRMFNTAFDGLGARAGDYYPPALREQIDELNGWIYDNVNNGVYKAGFATSQQAYDEAVDAVFTSLERLEQILGQHRYLTGNQLTEADIRLWTTLVRFDPVYVTHFKCDKRRISDYLNLYGFLRDIYQMPGIAETVSFPHIRHHYYRSHKTINPTGIISIGPQQDLNEPHGRDQRFR

SEQ ID NO: 59612 - protein, 127 aa, Klebsiella pneumoniae
MEGTSMKHRIALLLVLTSLSASALAASPCQEKEQDIQREISYAEKHHNQSRIDGLNTALRQVRENCSDSKLKADHQQKIAKQREEIAERQRDLQEARKKGDADKINKRQHKLNEAQQELKTLESRDY

SEQ ID NO: 59613 - protein, 101 aa, Klebsiella pneumoniae
MAKENVTDDLRAELKTLADTLEEVLNSSADKSKEEMGKLRSKAESALKESRARLGETSEAILRQTRETAARADDYVRENPWTGVGIGAAVGLVLGVLLSRR

SEQ ID NO: 59614 - protein, 132 aa, Klebsiella pneumoniae
MANTQHTQGPGQRVFSIGQRIVTLLVEMVETRLRLVVVELEEEKANLFQLLIMTGLTLLFAAFGLMSLLVLVIWAVDAQYRLHVMIATTVVLLLAAAIVGILTLRKARRSTLLRLTRKELENDRALLEEDKS

SEQ ID NO: 59615 - protein, 304 aa, Klebsiella pneumoniae
MIHTLTLNTAIDMNIFCDPLQPAAVNRTRQTEYCPNGKGVNVSLVLHHYQQPTHVMGIFGGFTGRYIVEELRKQHINVTPAWVAEPTRINIFINDGSDEYKLVNPGARIDDEGKEQILHHLQCVAPGDYLVISGSLPPGIESRFYSEILVLCQQKGCEVILDISHPVLRQLLEWRPLLIKPNDDELKEIFGLDVSSPRRVREAMQTLHQLGARNVLLTLGAQGLYFSNGAQLWFCSAPKIELVSSACAGDAALGAFLSHWLNTDDIPQALALASATGADVAASAGLGKLNRTQELLQQLQIVQL

SEQ ID NO: 59616 - protein, 451 aa, Klebsiella pneumoniae
KIIAVTGCPTGIAHTFMAEEALKTAAKKLNVEIKVETNGASGVENAITPEDLKDIYGVIIAADKDVNAERFNGLPVIEVPVKEAIHHPAELINKVVNGQAPRRQGFSAATDPDEKYERESFGRQIYKHLMSGVSNMLPFVVAGGILIAVSFLWGIYSADPNSPQYNVIAATLMKVGQQAFSIMVPVFTAYIAWSISGRPGMVAGFVGGLLANATGAGFLGGIIAGFAAGYFMLLIRHLLDGLPRQYEGLKSIFIMPLIGVLVIGVMMVLLGQPVAAINNGMMNWLSSLQEANPILLGIVVGAMCSFDFGGPVNKAAYVTGTLLLGQGNYFFMAGVSAACITPPLVIALATTFFPKGFSEEERAAGMVNYILGCTHITEGAIPFAAKDPLRVIPMMMIASSISAVLSYSLHIQVPAPHGGFLILPLVSKPLMWVLCILAGSACGALMLGCWR

SEQ ID NO: 59617 - protein, 256 aa, Klebsiella pneumoniae
MDNAIFPNKFKAALAAHQVQIGCWCALANPISTEVLGLAGFDWLVLDAEHAPNDVTTLIPQLMALKGSSSAQVVRVPTNEPIIIKRMLDIGFYNFLVPFVETAEQAAQAVASTRYPPEGIRGVSVSHRGNMFGTVPDYFAQSNKNISILVQIESQTGVDNVEAIAATEGVDGVFVGPSDLAAALGHLGNAAHPEVQRAIQHIFASAKKHGKPSGILAPVEADARRYLEWGATFVAVGSDLGVFRSATQKLADAFKK

SEQ ID NO: 59618 - protein, 443 aa, Klebsiella pneumoniae
MILDSTLDEKKGIPTRYLILLMIFVVTAVNYGDRATLSIAGTDVAKELGLSAVSMGYIFSAFGWAYLLMQIPGGWLLDKFGSKKVYSYSLFFWSLFTFLQGFIDVFPLAWAGVSMFFMRFMLGFSEAPSFPANARIVAAWFPAKERGTASAIFNAAQYFSLALFSPLLGWLTFALGWEHVFTVMGIIGFVLTIIWVKFVHNPTDHPRMSAAELKYISEGGAVVDMDHKKEATPAAGPKMDYIRQLLTNRMMLGVFFGQYFLNTITWFFLTWFPIYLVQDKGMSILKVGFVASIPALFGFAGGVLGGLFSDYLIGRGCTLTFARKLPIVLGMLLASSIILCNYTASTPLVITLMALAFFGKGFGALGWPVISDVAPKEIVGLCGGVFNVFGNVASIATPLVIGYIVSELHSFNGALIFVGGSALMMMVCYLFVVGDIKRMELQK

SEQ ID NO: 59619 - protein, 439 aa, Klebsiella pneumoniae
MQQIARAVTQAFNNLPRPHRVMLGSLSVLTLAVAVWRPYIYHPESAPIVRTIELEKSEIRSLLPEASEPIDQAPQEEEAIPQDELDEKADSDAGGHEYVVSTGDTLSSILNQYGIDMGDIAQLSSADKELRNLKIGQQLSWTLTADGDLQSLTWEMSRRETRTYTRVDNGFKMSSELQKGDWVNSVLKGTVGASFVSSARDAGLTSTEINAVIKAMQWQMDFRKLKKGDEFSVLMSREMLDGKREQSQLLGVRLRSDGKDYYAIRAEDGKFYDRNGTGLAKGFMRFPTARQFRVSSNFNPRRLNPVTGRVAPHRGVDFAMPQGTPVLAVGDGEVVVAKRSGAAGYYVAIRHGRTYTTRYMHLRKLLVKPGQKVKRGDRIALSGNTGRSTGPHLHYEVWINQQAVNPLTAKLPRTEGLSGSDRTDYLAQVKEVVPQLRFD

SEQ ID NO: 59620 - protein, 480 aa, Klebsiella pneumoniae
MSRRLRRTKIVTTLGPATDRDNNLEKVIAAGANVVRMNFSHGTPEDHQLRADKVREIAAKLGRHVAILGDLQGPKIRVSTFKEGKIFLNVGDKFLLDANLGKGEGDKEKVGIDYKGLPADVVPGDILLLDDGRVQLKVLEVQGMKVFTEVTVGGPLSNNKGINKLGGGLSAEALTDKDKADIVTAAKIGVDYLAVSFPRCGEDLNYARRLARDAGCDAKIVAKVERAEAVCDQDAMDDVILASDVVMVARGDLGVEIGDPELVGIQKALIRRARQLNRSVITATQMMESMITNPMPTRAEVMDVANAVLDGTDAVMLSAETAAGQYPSETVAAMARVCLGAEKIPSLNVSKHRLDVQFDNVEEAIAMSAMYAANHLKGITAIITMTESGRTALMTSRISSGLPIFALSRHERTLNLTALYRGVTPVFFDSQNDGVAAAHDAVNLLRDKGYLVSGDLVVVTQGDVMSTIGSTNTTRILTVE

SEQ ID NO: 59621 - protein, 491 aa, Klebsiella pneumoniae
MAVTQTAQACDLVIFGAKGDLARRKLLPSLYQLEKAGQIHADTRIIGVGRADWDKAAYTKVVREALETFMKEKIDEGLWDTLSGRLEFCNLDVNDTSGFTRLGEMLDQKNRVTINYFAMPPSTFGAICKGLGEAKLNAKPARVVMEKPLGTSLETSREINDQVGEFFEECQVYRIDHYLGKETVLNLLALRFANSLFVNNWDCRTIDHVEITVAEEVGIEGRWGYFDQAGQMRDMIQNHLLQILCMIAMSPPSDLSADSIRDEKVKVLKSLRRIDRSNVREKTVRGQYTAGFAQGKKVPGYLEEEGANKTSNTETFVAIRVDIDNWRWAGVPFYLRTGKRLPTKCSEVVVYFKTPELNLFKETWQELPQNKLTIRLQPDEGVDIQVLNKVPGLDHKHNLQITKLDLSYSETFNQTHLADAYERLLLETMRGIQALFVRRDEVEEAWKWVDSITEAWAADRDAPKPYQAGTWGPVASVAMITRDGRSWNEFE

SEQ ID NO: 59622 - protein, 219 aa, Klebsiella pneumoniae
MLRVIDTETCGLQGGIVEIASVDIVDGQITNPMSHLVRPDRPISPQAMAIHRITEEMVADKPWIEEIIPHYHGSPWYVAHNASFDRRVLPEMHGEWICTMKLARRLWPGIKYSNMGLYKSRKLNVTTPPGLHHHRALYDCYITAALLLDIINVSGWTPDEMADITGRPALLTTFTFGKYRGKAVAEIAENDPGYLRWLFNNLDRMSPELRLTLRHYLGE

SEQ ID NO: 59623 - protein, 142 aa, Klebsiella pneumoniae
MKTFTAKPETVKRDWYVVDATGKTLGRLATELARRLRGKHKAEYTPHVDTGDYIIVLNAEKVAVTGNKREDKMYYHHTGHIGGIKEATFEEMIARRPERVIEIAVKGMLPKGPLGRAMYRKLKVYAGNEHNHAAQQPQVLDI

SEQ ID NO: 59624 - protein, 1486 aa, Klebsiella pneumoniae
MLYDKSLERDNCGFGLIAHIEGEPSHKVVRTAIHALARMQHRGAILADGKTGDGCGLLLQKPDRFFRIVAEERGWRLAKNYAVGMLFLNKDPELAKAARRIVEEELQLETLSIVGWRDVPTNEGVLGEIALSSLPRIEQIFVNAPAGWRPRDMERRLFIARRRIEKRLQEDKDFYVCSLSNLVNIYKGLCMPADLPRFYLDLADLRLESAICLFHQRFSTNTVPRWPLAQPFRYLAHNGEINTITGNRQWARARTYKFQTPLIPDLHDAAPFVNETGSDSSSMDNMLELLLAGGMDIVRAMRLLVPPAWQNNPDMDPELRSFFDFNSMHMEPWDGPAGIVMSDGRYAACNLDRNGLRPARYVITKDKLITCASEVGIWDYQPDEVVEKGRVGPGELMVIDTRAGRILHSAETDDDLKSRHPYKEWMEKNVRRLVPFEDLPDEEVGSRQLDDDLLASYQKQFNYSAEELDSVLRVLGENGQEAVGSMGDDTPFAVLSSQPRIIYDYFRQQFAQVTNPPIDPLREAHVMSLATSIGREMNVFCEAEGQAHRLSFKSPILLYSDFKQLTTMEEEHYRADVLDITFNPAEASLSETVKALCDKAEQMVRDGTVLLVLSDRNIAKDRLPVPAPMAVGAIQTRLVDKSLRCDANIIVETASARDPHHFAVLLGFGATAIYPYLAYETLAKLVDSKAIDKPYRAVMLNYRNGINKGLYKIMSKMGISTIASYRCSKLFEAVGLHRDVSDLCFQGVVSRIGGAGFDDFQQDLLNLSKRAWLARKPLAQGGLLKYVHGGEYHAYNPDVVRTLQQAVQSGEYSDYQQYAKLVNERPAATLRDLLALNPGEDAISIDDVEPAKELFKRFDTAAMSIGALSPEAHESLAEAMNSIGGFSNSGEGGEDPARYGTNKVSRIKQVASGRFGVTPAYLVNADVIQIKVAQGAKPGEGGQLPGDKVTPYIAKLRYSVPGVTLISPPPHHDIYSIEDLAQLIFDLKQVNPKAMISVKLVSEPGVGTIATGVAKAYADLITIAGYDGGTGASPLTSVKYAGCPWELGLVETQQALVANGLRHKIRLQVDGGLKTGLDIIKAAILGAESFGFGTGPMVALGCKYLRICHLNNCATGVATQDDKLRKNHYHGLPFKVTNYFEFIARETRELMAQLGVKRLVDLIGRTDLLKELDGFTAKQQKLDLGKLLETAEPHPGKALYCTENNPPFDNGVLNAQLLQQAKPYVDEKQSKTFWFDIRNTDRSVGASLSGYIAQTHGDQGLAGDPIVAHFSGTAGQSFGVWNAGGVELHLTGDANDYVGKGMAGGLLAIRPPVGSAFRSHEASIIGNTCLYGATGGRLYAAGRAGERFAVRNSGAITVVEGIGDNGCEYMTGGIVCVLGKTGVNFGAGMTGGFAYVLDEDGDFRKRVNPELVEVLDVDSLAIHEEHLRGLITEHVQLTGSQRGEEILANWPAFSAKFALVKPKSSDVKALLGHRSRSAAELRVQAQ

SEQ ID NO: 59625 - protein, 134 aa, Klebsiella pneumoniae
MFMTWEYALIGLVVGIIIGAVAMRFGNRKLRQQQALQYELEKNKAELEEYREELVSHFARSAELLDNMAHDYRQLYQHMAKSSNNLLPDSMADANPFRNRLEESEASNDQAPVQMPRDYSEGASGLLRGGAKRD

SEQ ID NO: 59626 - protein, 455 aa, Klebsiella pneumoniae
MKKQTLLLSALALSIGLSLSVLPPAAASLPTQVPGQGALPSLAPMLEKVLPAVVSVQVEGTASPTLNMPEELKKYFGDNAPQEQAQPFEGLGSGVIIDAAKGYVLTNNHVINQAQKISVQLNDGREFDAKLVGSDEQSDIALLQLIKPDHLTQIAIADSDKLRVGDFAVAVGNPFGLGQTATSGIISALGRSGLNLEGLENFIQTDASINRGNSGGALLNLNGELIGINTAILAPGGGSIGIGFAIPSNMAKTLADQLIQFGEIKRGLLGIKGMEMSADIAKAMNLNVQRGAFVSEVLPNSGSAKAGIKSGDVIVSLNGKPLNSFAELRSRIATTEPGTKVKLGLLRDGKPVDVEVTLDKSTSSTASAELIIPALQGASFSDGQMKDGTKGVVIDNVDKGSAAAQVGLHKDDIIIGLNRQRIHSIAELRKALEGKPPVIALNVIRGNESIYLLLR

SEQ ID NO: 59627 - protein, 212 aa, Klebsiella pneumoniae
MAVAANKRSVMTLFSGPTDIYSHQVRIVLAEKGVSFEIEHVEKDNPPQDLIDLNPNQSVPTLVDRELTLWESRIIMEYLDERFPHPPLMPVYPVARGESRLYMQRIEKDWYSLMNTIQSGTAAQADAARKQLREELLAIAPVFTQKPYFLSDEFSLVDCYLAPLLWRLPVLGVELVGAGAKELKGYMTRVFERDSFLASLTEAEREMRLGRG

SEQ ID NO: 59628 - protein, 130 aa, Klebsiella pneumoniae; identical to SEQ ID NO: 42880

SEQ ID NO: 59629 - protein, 457 aa, Klebsiella pneumoniae
MTAFSTLTVLPAAQLANLNELGYLSMTPVQAAALPAILAGKDVRVQAKTGSGKTAAFGLGLLQHIDPARFETQSLVLCPTRELADQVAGELRRLARCLPNIKILMLCGGQPFGAQRDSLQHAPHIIVATPGRLLDHLQKGTISLDALQTLVMDEADRMLDMGFSDAIDEVIRFAPADRQTLLFSATWPAAIAAISGRVQRNPQTIEIDTVDALPAIEQQFFEVSRHGKIALLQRLLSQHQPASCVVFCNTKRDCQAVCDALNAAGQSALSLHGDLEQRDRDQTLVRFANGSVRVLVATDVAARGLDIKSLALVVNFELAWDPEVHVHRIGRTARAGEQGLAISFCAPEEAQRATILADMLQLSLNWLPAPTGNTIAPLTAEMATLCIDGGKKAKMRPGDVLGALTGDMGFDGADIGKITVHPAHVYVAIRQNMAQKAYKQLQNGKIKGKSCRVRLLK

SEQ ID NO: 59630 - protein, 144 aa, Klebsiella pneumoniae
MSRMILVPIDISDKEFTERIISHVESEARIDDAEVHFLTVIPSLPYYASLGMAYTAELPGMDELREGSETQLKEIAKQFSIPEDRMHFHVAEGSPKDKILALAKSLPADLVIIASHRPDITTYLLGSNAAAVVRHAECSVLVVR

SEQ ID NO: 59631 - protein, 384 aa, Klebsiella pneumoniae
MKRKVLALVIPALLAAGAAHAAEIYNKDGNKLDLYGKVDGLHYFSSDSKKDGDQTYLRFGFKGETQINDMLTGYGQWEYNVQANNTETSSDQAWTRLAFAGIKVGDYGSFDYGRNYGVLYDVEGWTDMLPEFGGDSYTYADNFMAGRANGVATYRNSDFFGLVEGLNFALQYQGKNEGQNAQDINVGTNNRSSDSDVRFDNGDGFGLSISYDFGMGISAAAAYTSSDRTGDQHHYTHTERYAKGDKADAWTAGLKYDANDIYLATMYSETRNMTPYGSTSSTNGGGIANKTQNFEVTAQYQFDFGLRPAISYLQSKGKDLYNNGRYADKDLVKYMDVGATYYFNRNMSTYVDYKINLLDGNDKFYEDNGISTDNIVALGLVYQF

SEQ ID NO: 59632 - protein, 305 aa, Klebsiella pneumoniae
MELKDYYAILGVQPTDDLKTIKTAYRRLARKYHPDVSKENDAEAKFKDLAEAWEVLKDEQRRAEYDQLWQHRNDPGFGRQRQTHEQSYSQQDFDDIFSSMFGQQAHQRRRQHAARGHDLEIEVAVFLEETLAEQTRTISYNLPVYNVFGMIESETPKTLNVKIPAGVVDGQRIRLKGQGTPGENGGPNGDLWLVIHIAPHPLFDIVGHNLEIVLPLAPWEAALGAKVTVPTLKESILLTVPPGSQAGQRLRIKGKGLVSKTHTGDLFAVIKIVMPPKPDEKARELWQQLAAAEASFDPRKTWGKA

SEQ ID NO: 59633 - protein, 442 aa, Klebsiella pneumoniae
MTDRIIALCILCLVFGLPLGVAAVFTGELILDFVFFWPLFMSVLWITGGLYFWFQLERHWPWGEDTPPPTLPGNPLISILIPCFNEEKNARETISAALAQRYANLEVIAINDGSSDNTAQVLQQLAQEEPRLRVIHLAANQGKAVALKAGAAAARGDLLVCIDGDALLDRDTAAWLVAPLIHYPHVGAVTGNPRIRTRSTLIGRIQVGEFSSIIGLIKRTQRIYGRVFTVSGVIAAFRRQALADVGYWSPDMITEDIDISWKLQLRHWDIFFEPRALCWILMPETLKGLWKQRLRWAQGGAEVFLVNLRRLFHWQHHRMWPLFLEYACSTLWAFAYAITILLFILSRLMPLPDNLAVHSLFPPEFTGMLLGLMCLLQFVASLYIERRYEKKVAKSLFWVIWFPMVYWMIGLLTTLVAFPKVMVKRQRSRARWVSPDRGKGSL

SEQ ID NO: 59634 - protein, 671 aa, Klebsiella pneumoniae
MLNTTLRNGLMLLIWLCLIFSVRAEEVPFLAPQQRPQLEANQPWPADRFLVLAYHDVEDDAADQRYLSVRTSALNEQIAWLLHNGYHAINVQDILDAHYGLKSLPPKAFLLSFDDGYSSFYTRVWPLLKAWNVPALWAPVGSWVDTPAGQPVNFGGLMTPRERFATWEMVRELSRSPLVEIGAHTWASHYGLPANPQGSREPAAANRGWDKTTGRYESDAQFTRRMTDDVQKVTAKIHEVAGKTPRAWVWPYGAASGSTLTIAKQQGYQLAFTLNDGLGNVKDLDNIPRLLIAGNPSLKAFASAVTQIQEADPVRVMHVDLDYVYDPNPVQQAKNIDKLVQRVYDMKISHVFLQAFSDPQGDGTVKSLYFPNRWLPMRADLFNFVSWQLQTRGNVKVYAWMPVLAFDLASDLPRVQRWDPQTGKALLARQPYVRLSPWDPRVRQQITDIYEDLARHASFSGILFHDDAVLTDFEDVSPEAVAAWRQTGMAHDAAPVPQRPQERQAWMRFKSQTLTRFTLDLRQAVQAIRGPQVKTARNLFALPILEPQSEAWFAQNLDDFLAAYDWTVPMAMPLMESVPIDASQAWLTRLVQAVARHPGALKKTIFELQARDWNRRQQNAIPDQQLADWMRLLRLNGVKNYGYYPDDFINNQPDISRIRPQFSSWWYPDHD

SEQ ID NO: 59635 - protein, 548 aa, Klebsiella pneumoniae
MNGAQWVVHALRTQGVDTVFGYPGGAIMPVYDALYDGGVEHLLCRHEQGAAMAAIGYARATGKTGVCIATSGPGATNLITGLADALLDSIPIVAITGQVAAPFIGTDAFQEVDVLGLSLACTKHSFLVQSLDELPRVIAEAFQVANSGRPGPVLVDIPKDIQMAQGDLDPHFSTVADEMAFPQAEVAQALQMLAQSQQPMLYVGGGVGMAQAVPALREFLAVTRMPATCTLKGLGVVDADYPYYLGMLGMHGTKAANLAVQECDLLIAVGARFDDRVTGKLNTFAPHAKVIHMDIDPAELNKLRQAHIGLTGDLNCLLPALQQPLAIDGWRERSAALRAEHAWRYDHPGEAIYAPLLLKQLSDRKPADSVVTTDVGQHQMWSAQHMTYTRPENFITSSGLGTMGFGLPAAVGAQVARPNDTVICISGDGSFMMNVQELGTVKRKQLPLKIVLLDNQRLGMVRQWQQLFFQERYSETTLTDNPDFLTLASAFGIPGQHITRKDQVEAALDTMLSSQGPYLLHVSIDELENVWPLVPPGASNSEMLEKLS

SEQ ID NO: 59636 - protein, 491 aa, Klebsiella pneumoniae
MANYFNTLNLRQQLAQLGKCRFMARDEFADGASYLQGKKVVIVGCGAQGLNQGLNMRDSGLDISYALRKEAIAEKRASWRKATENGFKVGTYEELIPQADLVVNLTPDKQHSDVVRSVQPLMKDGAALGYSHGFNIVEVGEQIRKDITVVMVAPKCPGTEVREEYKRGFGVPTLIAVHPENDPKGEGMAIAKAWAAATGGHRAGVLESSFVAEVKSDLMGEQTILCGMLQAGSLLCFDKLVAEGTDPAYAEKLIQFGWETITEALKQGGITLMMDRLSNPAKLRAYALSEQLKEIMAPLFQKHMDDIISGEFSSGMMADWANDDKKLLTWREETGKTAFETAPQYEGKIGEQEYFDKGVLMIAMVKAGVELAFETMVASGIIEESAYYESLHELPLIANTIARKRLYEMNVVISDTAEYGNYLFSYACVPLLKEFMTTLQTGDLGTAIAEGAVDNAQLRDVNEAIRSHAIEQVGKKLRGYMTDMKRIAVAG

SEQ ID NO: 59637 - protein, 309 aa, Klebsiella pneumoniae
MTTKKADYIWFNGEMVPWGEAKVHVMSHALHYGTSVFEGIRCYDSHKGPVVFRHREHMQRLHDSAKIYRFPVSQSVDELMEACREVIRTNNLTSAYIRPLVFVGDVGMGVNPPPGYNTDVIIAAFPWGAYLGAEALEQGIDAMVSSWNRAAPNTIPTAAKAGGNYLSSLLVGSEARRHGYQEGIALDVNGYISEGAGENLFEVKDGVLFTPPFTSSALPGITRDAIIKLAKDLGIEVREQVLSRESLYLADEVFMSGTAAEITPVRSVDGIQVGAGRRGPVTKRIQEAFFGLFTGETEDKWGWLDPVSK

SEQ ID NO: 59638 - protein, 616 aa, Klebsiella pneumoniae
MPKYRSATTTHGRNMAGARALWRATGMTDADFGKPIIAVVNSFTQFVPGHVHLRDLGKLVAEQIEAAGGVAKEFNTIAVDDGIAMGHGGMLYSLPSRELIADSVEYMVNAHCADAMVCISNCDKITPGMLMASLRLNIPVIFVSGGPMEAGKTKLSDKIIKLDLVDAMIQGADPKVSDEQSNQVERSACPTCGSCSGMFTANSMNCLTEALGLSQPGNGSLLATHADRKELFLNAGKRIVELTKRYYEQDDASALPRNIASKAAFENAMTLDIAMGGSTNTVLHLLAAAQEAEIDFTMSDIDKLSRKVPQLCKVAPSTQKYHMEDVHRAGGVLGILGELDRAGLLNREVKNVLGLTLPQTLEQYDVMVTQDDAVKKMFRAGPAGIRTTQAFSQDCRWDTLDDDRAEGCIRSLEHAYSKDGGLAVLYGNFAENGCIVKTAGVDDSILKFTGPAKVYESQDDAVEAILGGKVVEGDVVVIRYEGPKGGPGMQEMLYPTSFLKSMGLGKACALITDGRFSGGTSGLSIGHVSPEAASGGNIALIEDGDMIAIDIPNRSIQLQLSDAEIAARREAQEARGDQAWTPKNRQRQVSFALRAYASLATSADKGAVRDKSKLGG

SEQ ID NO: 59639 - protein, 642 aa, Klebsiella pneumoniae
MRLNPGQQQAVEFVTGPCLVLAGAGSGKTRVITNKIAHLIRGCGYQARHIAAVTFTNKAAREMKERVGKRLGRKEARGLMISTFHTLGLDIIKREYAALGMKSNFSLFDDTDQVALLKELTEGLIEDDKVVLQQLISTISNWKNDLKTPAQAAAGAKGERDRIFAHCYGLYDAHMKACNVLDFDDLILLPTLLLQRNEEVRERWQNKIRYLLVDEYQDTNTSQYELVKLLVGQRARFTVVGDDDQSIYSWRGARPQNLVLLSQDFPALRVIKLEQNYRSSGRILKAANILIANNPHVFEKRLFSELGYGAELKVLSANNEDHEAERVAGELIAHHFINKTNYKDYAILYRGNHQSRVFEKMLMQNRIPYKISGGTSFFSRPEIKDLLAYLRVLTNPDDDSAFLRIVNTPKREIGPATLQKLGEWAMGRNKGLFTASFDMGLSQTLTGRGYESLTRFTHWLREIQQLAEREPVNAVRDLIRGIDYESWLYETSPSPKAAEMRMKNVNQLFTWMTEMLEGSEIDEPMTLTQVVTRFTLRDMMERGESDEELDQVQLMTLHASKGLEFPYVYLVGMEEGLLPHQSSIDEDNVDEERRLAYVGITRAQKELTFTLCKERRQYGELVRPEPSRFLLELPQDDLIWEQ

SEQ ID NO: 59640 - protein, 332 aa, Klebsiella pneumoniae
MRGKIALEEHVSTPENNRLWDSSGEAGRNGTEYMKDVERRLLDRSIQLEEMAQRHIDHVILSLTSPGAQSILDKAKAVSFARDTNDFIVENYVKPNPDKFSAFATLALQNPEAAAEELERAVKKLGMKGALINGYTNVKDSEHGLYLDDESMLVFWDKVNELNVPVYLHPREPLEGPARGIYTGYESLIGSAWGFAQETAVHAIRLMMSGLFDRYPNLNLVLGHLGEGLVHMLPRTQHRLYRQRFGCGLGKAEKPLMHYLQNNFIVTTSGHFNTHSLNNAIEVMGADRVMFSVDYPYEDIHQACDWFDPLELEAGLKEKIAWGNASRVFNIK

SEQ ID NO: 59641 - protein, 409 aa, Klebsiella pneumoniae
MFSEIMRYILDLGPTVMLPIVIIIFSKLLGMKLGDCFKSGLHIGIGFVGIGLVIGLMLDSIGPAAKAMAEHFQINLHVIDIGWPGSSPMTWASQIALVAIPVAIAVNIVMLVTRMTRVVNVDIWNIWHMTFTGAMLHIATGSYWIGILGVVVHAAFVYKLGDWFAKDTRDFFGLEGIAIPHGSSAYLGPGCRPRGYHHRQDPWLNRIHFSADDIQKRFGPFGEPVTVGFVMGLVIGALAGYDLKGILQLAVKTAAVMLLMPRVIKPIMDGLTPIAKQARKRLQAKFGGQEFLIGLDPALLLGHTSVVSASLIFIPLTILIAVVVPGNQVLPFGDLATIGFFVAMAVAVHQGNLFRTLISGVIIMGITLWIATQTIGLHTQLAANAGALKAGGMVASMDQGWFADYLAAD

SEQ ID NO: 59642 - protein, 347 aa, Klebsiella pneumoniae
MKSVVIHAEGNVCVEERPIPTLQTENDVLVKVVSSGLCGSDIPRIFAKGAHYYPITLGHEFSGYVESYGAAVTDLQPGDAVACVPLLPCFQCPQCQREYFSLCKQYQFVGSRSEGGNAEYVVVKRANLFRLPDQMPIDDGAFIEPITVGLHAFHLAQGCEGKNVIIIGAGTIGLLALQCARELGANSVTAIDINPQKLELAKTLGATHVFNSREMSGQAIQQALESIQFDQVVLETAGTPQTVALAIEAAGPRAQLALVGTLHHDLTLPAATFGQILRKELNIVGSWMNYSGPWPGEEWQTATRLLTEKRLQLAPLIAHRGDAESFARAVQALNGAPMQGKILLKLS

SEQ ID NO: 59643 - protein, 287 aa, Klebsiella pneumoniae
MKQHESADNSQGQLYIVPTPIGNLSDITQRALEVLQAVDLIAAEDTRHTGLLLQHFAINARLFALHDHNEQQKAETLLAKLKEGQNIALVSDAGTPLINDPGYHLVRTCREANIRVVPLPGPCAAIAALSAAGLPSDRFCYEGFLPAKSKGRRDTLKALEEEPRTLIFYESTHRLVESLEDICAVLGESRYVVLARELTKTWESIHGAPIGELVAWVKEDENRRKGEMVLIVEGFKAQEEALPAAALRTLALLQAELPLKKAAALAAEIHGVKKNALYKYALEQQGE

SEQ ID NO: 59644 - protein, 132 aa, Klebsiella pneumoniae
SLFRLSVGLILSVSFITSAAANDHKILGVIAMPRNETNDLTLTLPVCRVVKRIQLSSRRGDVQLSEGDVYFKASRWRQHTLNVPAGIKEGRPPGWININSDNDSKRCVKKIAFSGHTVHSSDMASLKIIGDD

SEQ ID NO: 59645 - protein, 309 aa, Klebsiella pneumoniae
MVKVYAPASSANMSVGFDVLGAAVTPVDGTLLGDNVTVEAAEQFSLQNLGRFASKLPTAPQENIVYQCWESFCREIGKTVPVAMTLEKNMPIGSGLGSSACSVVAALVAMNEFCGKPLNETRMLALMGEMEGRISGSIHYDNVAPCYLGGMQLMIEENGIISQQVPGFDEWLWVLAYPGIKVSTAEARAILPAQYRRQDCIAHGRHLAGFIHACYTRQPQLAAKLMKDVIAEPYRTKLLPGFSEARQAAMEMGAQACGISGSGPTLFALCDKPDTAQRVADWLGAHYLQNQEGFVHICRLDTAGARVVG

SEQ ID NO: 59646 - protein, 195 aa, Klebsiella pneumoniae
MNTLRIGLVSISDRASSGVYQDKGIPALEEWLARALTTPFELQTRLIPDEQAIIEQTLCELVDEMGCHLVLTTGGTGPARRDVTPDATLAIADREMPGFGEQMRQVSLHFVPTAILSRQVGVIRKQALILNLPGQPKAIQETLEGVKDADGNVLVHGIFASVPYCVQLLEGPYVETDGRVVEAFRPKSARRETLS

SEQ ID NO: 59647 - protein, 820 aa, Klebsiella pneumoniae
MRVLKFGGTSVANAERFLRVADILESNARQGQVATVLSAPAKITNHLVAMIEKTIGGQDALPNIADAERIFAELLQGLADAQPAFPLAQLKAFVEQEFAQIKHVLHGISLLGQCPDSVNAALICRGEKLSIAIMAGLLEARGHKVSVINPVEKLLAVGHYLESTVDIAESTRRIAASQIPADHMILMAGFTAGNEKGELVVLGRNGSDYSAAVLAACLRADCCEIWTDVDGVYTCDPRQVPDARLLKSMSYQEAMELSYFGAKVLHPRTIAPIAQFQIPCLIKNTGNPQAPGTLIGASRDEDDLPVKGISNLNNMAMFNVSGPGMKGMVGMAARVFATMSRAGISVVLITQSSSEYSISFCVPQSDCARAKRAMEDEFYLELKEGLLEPLAIMERLAIISVVGDGMRTLRGISAKFFAALARANINIVAIAQGSSERSISVVVSNDDATTGVRVTHQMLFNTDQVIEVFVIGVGGVGGALLEQIKRQQGWLKNKHIDLRVCGVANSQALLTSVHGLNLENWSAELAEAKEPFNLGRLIRLVKEYHLLNPVIVDCTSSQAVADQYADFLREGFHVVTPNKKANTSSLDYYHQLRHAASSSRRKFLYDTNVGAGLPVIENLQNLLNAGDELRHFSGILSGSLSFIFGKLDEGVSFSAATALAREMGYTEPDPRDDLSGVDVARKLLILARETGRELELADIIVESALPPDFDASGDVETFMARLPSLDDGFASRVAKARDEGKVLRYVGNIEEDGTCRVKIAAVDGNDPLFKVKNGENALAFYSHYYQPLPLVLRGYGAGNDVTAAGVFADLLRTLSWKLGV

SEQ ID NO: 59648 - protein, 215 aa, Klebsiella pneumoniae
MLQVYLVRHGETQWNAERRIQGQSDSPLTAHGERQAWQVGERARTLGITHIITSDLGRTRRTAEIIAEACGCSVIADARLRELDMGVLEKRHIDSLSEEEEGWRRQLVNGTPDGRIPQGESMQELSERMHAALASCLELPAGSRPLLVSHGIALGCLVSTILGLPAYAERRLRLRNCSISRVDYQQSPWLASGWVVETAGDVSHLDAPAMDELQR

SEQ ID NO: 59649 - protein, 317 aa, Klebsiella pneumoniae
MTDKLTSLRQYTTVVADTGDIAAMKLYQPQDATTNPSLILGAAQIPEYRKLIDDAVAWARSQSSDRAQQILDASDKLAVNIGLEILKLIPGRISTEVDARLSYDTEASIAKAQRIIKLYNDAGISNDRILTNLASTWRAFRAAEQLRTRGINCNLTLLFSFAQARACAEAGVFLISPFVGRILDWYKANTDKKEYAPAEDPGVVSVSEIYEYYKQHGYETVVMGASFRNVGEILELAGCDRLTIAPALLKELSESEGAVERKLVYTGEVKARPERITESEFLWQHNQDPMAVDKLAEGIRKFAIDQEKLEKMIDELL

SEQ ID NO: 59650 - protein, 426 aa, Klebsiella pneumoniae
MKLYNLKDHNEQVSFAQAVTQGLGKHQGLFFPHDLPEFSLTEIDDMLAQDFVTRSAKILSAFIGDEIPQDVLQQRVRAAFAFPAPVSKVQADVGCLELFHGPTLAFKDFGGRFMAQMLTHIAGDKPVTILTATSGDTGAAVAHAFYGLPNVKVVILYPRGKISPLQEKLFCTLGGNIETVAIDGDFDACQALVKQAFDDEELKATLGLNSANSINISRLLAQICYYFEAAAQLPQEARNQLVISVPSGNFGDLTAGLLAKSLGLPIKRFIAATNANDTVPRYLQGGEWAPKATQATLSNAMDVSQPNNWPRVEELFRRKIWRLSELGYAAVDDETTKAAMRELKAIGYISEPHAAIAWRALRDQLQPGEYGLFLGTAHPAKFKESVEEILRETLPLPKELADRADLPLLSHNLPADFAALRKLMMG

SEQ ID NO: 59651 - protein, 452 aa, Klebsiella pneumoniae
MLKSPLFWKITTLIGCIVLLSLPLMMVRELINERADYRSEVVDAIEQSTSGSQKLAGPLIAIPITETLTRMENQKEVNYQRSWVYYWLPESLAVAGKQTVESRRVGIYSGQVWHNALQIKASFDPLRLAALRKTNIVLGQPRLVVSVGDARGIGAIHAPEVNGNVLSVEPGLGISGDGAGIHMPMPALAEDNKPLEIAFSLDLNGTGEFSLVPLGRNSELQLTSNWPHPGFLGSFLPTQREVSAAGYRAHWQSSWFANDMGSYFKDDMEIPWSRLPAFSADVMSLADQYQLTDRATKYAILLIGLTFMAFFVFESLTRRPLHPMQYLLVGLSLVLFYLVLLALSEHIGFTAAWLAASLSGAVMNGIYLQAVLRGWRNSLLFVAALLLLDGVMWFLLHSEDSALLLGTGVLALALSVLMFLTRRVDWYALSLPKGTVPPTPAADDDKLRLWKE

SEQ ID NO: 59652 - protein, 235 aa, Klebsiella pneumoniae
MSRMHVLAVAVLSAAVSGPLAAAGINSFSQAKAAGVKVNADVPGDFYCGCKIDWQGKKGVIDLESCGYKVRKNENRASRVEWEHVVPAWQFGHQRQCWQEGGRKNCAKDPEYRKMESDMHNLQPAVGEVNGDRGNFMYSQWNGGEGQYGQCTMKVDFKDKIAEPPARARGAIARTYFYMRDRYQLNLSRQQTQLFTAWNKQYPVTAWECERDERIAKVQGNHNPYVQQACQAQKS

SEQ ID NO: 59653 - protein, 243 aa, Klebsiella pneumoniae
MRIPRIHHPERLIVGSQIALSDDAANHVGRVLRMTAGQHLQLFDGSNQVFDAVITEAGKKNVTVEVLSGEPDDRESPLHIHLGQVMSRGEKMEFTIQKSIELGVSLITPLFSERCGVKLDAERLQKKIQQWQKIAIAACEQSGRNVVPEIRPAMQLEAWCAEQDSGLKLNLHPRASASINTLPLPVERVRLLIGPEGGLSAEEIAMTAQYQFTDILLGPRVLRTETTALTAITALQVRFGDLG

SEQ ID NO: 59654 - protein, 233 aa, Klebsiella pneumoniae
MNDIAHNLAQVRDKISGAAARCGRAPEEVTLLAVSKTKPASAIEEAIAAGQRAFGENYVQEGVEKINHFQQAGVSGLQWHFIGPLQSNKSRLVAEHFDWCHTVDRLKIATRLNEQRPAHLPPLKVLIQINISDEQSKSGIPLEALDGLAAEIAELPHLELRGLMAIPAPESEYVRQFAVARQMAVAFARLKTRYPTVDTLSLGMSDDMEAAIAAGSTMVRIGTAIFGARDYSK

SEQ ID NO: 59655 - protein, 139 aa, Klebsiella pneumoniae
MMSGTFLGFDFGTKSIGVAVGQRITATARPLPALKAQDGKPDWNVIEKLLKEWQPEAVIVGLPLNMDGTEQPLTARARNFANKIHGRFGVAILLHDERLSTVEARAGLFEHGGYRALNKGSVDSASAVVILESYFEQSF

SEQ ID NO: 59656 - protein, 197 aa, Klebsiella pneumoniae
MQKVVLATGNAGKVRELASLLEDFGLDIVAQTELGVDSAEETGLTFIENAILKARHAAQITGLPAIADDSGLAVDALGGAPGIYSARYSGVDASDQQNLEKLLDALKDVPDDQRQAQFHCVLVYLRHAEDPTPLVCHGSWPGVITRQAAGHGGFGYDPIFFVPSEGKTAAELSREEKSAISHRGQALKLLLEALRNG

SEQ ID NO: 59657 - protein, 341 aa, Klebsiella pneumoniae
  MISC_FEATURE (14)..(14): X=any amino acid
VPGYAQYRSYSEDXVMKLEEIVALSVKHNVSDLHLCNSAAPRWRRQGRLEPAPFPAPDIANLLNDWLDAAQLLHWQEHGQIDFALNLACGARLRASAFAHTRGISLVLRLLPEQCPRLDMLGAPPALSELLAEESGLLLVTGATGSGKSTTLAAMVGHLNQHLDGHILTLEDPVEFIHHSERCLIQQREVGRHCPSFAAALRVALRQDPDVILLGELRDSETIRLALTAAETGHLVMATLHTRGAAPAVERLIDVFPAEEKDQVRSQLAGSLCAVLAQKLLPARQGGRVALYELLVNTPAVANLIREGKVHQLPGVMQTGMQAGMLTFTQSFQQRVAAGAL

SEQ ID NO: 59658 - protein, 328 aa, Klebsiella pneumoniae
MKKYAFSRSLIAISLLALFSSGASAAEKITLKLAHNLERSHVVHQAFEEMAKEVNQLSDGNMKIRIYPSSQMGSARETMELLQNGALDLTKGSASDLESFDNIYAIYNLPFLFNDQNHFNKVVFGKVGKEIMDSTKEKGFFALSAYVAGTRSFYAKKPITQPEDLKGLKIRVQASPTTLKMIELMGGSPTPISFGEVYTAMQQGVVDGAENNVPSWVQTRHIEIAKVFSEDEHASIPDFLVISSKTWDKLTPGQQQILVKAAKASEVYQQQLWQKIDADTRAQAKALGGEIIKVDKAQFRAAVQPLFDDFKKDPKQAALLAKFDAAAE

SEQ ID NO: 59659 - protein, 493 aa, Klebsiella pneumoniae
MSLIGLILMIFTSVFGFANSPSAFYLMGYSAMPFYLFSALFFFIPFALMMAEMGSAYRREEGGIYSWMNHSVGPRFAFIGTFMWFASYVVWMVSTAAKIWVPLSTFLFGADKTQTWALGSLTPTQTVGILAACWMVVVTFIAVKGINKIAKITAVGGIAVMGLNLVLLLVSGAILLLNGGHFAQPLNFTLSPNPGYQSGMAMLSFVVFAIFAYGGIEAVGGLVDKTDKPEKNFAKGIIIAAIVISIGYSLAIVLWGVSANWQQVLGARSTNLGNITYVLMTSLGATLGQALHLTPAASALTGVWFARITGLSMFLAYTGAFFTLSYSPLKAIIQGTPKALWPSVMTRLNVNGMPAAAMWLQCLLVGVFIVLVSFGGDSASAFYNKLTLMANVSMTLPYLFLTIAFPFFKAKTHLDRPFVIFKNRPSTLLATGVVLLVVTFANIFTIIQPVIDSGDWNSTLWMVGGPIFFSLLALGIYESYRRRMASGALVMES

SEQ ID NO: 59660 - protein, 325 aa, Klebsiella pneumoniae
MSETATWQPSAPIPNLLKRAAVMAEIRRFFTDRGVLEVETPCMSQATVTDIHLFPFETRFVGPGHSQGLNLYLMTSPEYHMKRLLAAGCGPVFQLCRSFRNEEMGRHHNPEFTMLEWYRPCYDMYRLINEVDDLLQQVLECQPAESLSYQQAFQRHLEIDPLSADKAQLREVAAKLDLSNIADTEEDRDTLLQLLFTMGVEPHIGKDRPTFIYHFPATQASLAQISPEDHRVAERFEVYYKGIELANGFHELTDAHEQRLRFEQDNRKRAARGLPQQPIDNNLLAALEAGLPDCSGVALGVDRVVMLALGAESIGEVIAFTVDRA

SEQ ID NO: 59661 - protein, 248 aa, Klebsiella pneumoniae
DGSSTMKKLVLAALLTSFAFGAAAGQKISFGVSATYPPFESMDANNQIVGFDIDLAHALCKQMQAECTFTNHAFDSLIPALKFKKYDAVISGMDITPERSKQVAFTDPYYANSALVIAKKDAFHSFDDLKGKRIGMENGTTHQKYLQDKHPEVKTVAYDSYQNAIIDLKNGRIDGVFGDTAVVNEWLKTNPQLGAATPKVTDPQYFGTGLGIAVRPDNKALLEKLNAALKAIKADGTYQKISNQWFPE

SEQ ID NO: 59662 - protein, 238 aa, Klebsiella pneumoniae
MAKTILLVEDDEDIATLLRLNLQDEGYQIVHEADGGQALARLETQVWDAVILDLMLPGVDGLEICRRIRQMTRYLPVIIISARTSEMHRVLGLEMGADDYLAKPFSLLELIARVKALFRRQEAMGQNLLMDAGRLSCHGLSIDPLSREVKLRGETVDLTPREFDLLYYFARHPGEVFSRLALLEQVWGYQHEGYEHTVNTHINRLRSKIERDPAEPDIILTVWGKGYKFAPVTQEAAL

SEQ ID NO: 59663 - protein, 281 aa, Klebsiella pneumoniae
MNDLPVVRSPWRILILVLGFTFLYAPMLMLVIYSFNSSKLVTVWAGWSTRWYSELFHDDAMMSAVGLSLTIAACAATAAAILGTIAAVVMVRFGRFRGSNGFAFMITAPLVMPDVITGLSLLLLFVALGHAIGWPSDRGMLTIWLAHVTFCTAYVAVVISSRLRELDHSIEEAAMDLGAAPLKVFFVITLPMIMPAVISGWLLAFTLSLDDLVIASFVSGPGATTLPMLVFSSVRMGVNPEINALATLILGVVGIVGFIAWYLMARAEKQRVRDIQRARQG

SEQ ID NO: 59664 - protein, 197 aa, Klebsiella pneumoniae
MLENINYALFALLNATPASPQWAIEMAIFIAKDLILIVPLLVVTLWLWGPAQRQMVFKLMLALTISLTVSWAIGHLYPHDRPFVAGVGYNFLHHAADDSFPSDHGTVSFTFALAFLFWHRLWSGALLMAIAAAIAWSRVYLGVHWPLDMVGGLLAGMCGCLGAALIWHTFGPALYHQLQRLYRLCFSLPIRKGWVRG

SEQ ID NO: 59665 - protein, 322 aa, Klebsiella pneumoniae
MSAFTPASEVLLRHSDDFESARVLFAGDLQDDLPARLDTAASRAHTQQFHHWQVLNRQMGDTVRFSLVAEAADVAECDTLIYYWPKNKPEAQFQLMNLLSLLPVGSDIFVVGENRSGVRSAEQMLAEYAPLNKVDSARRCGLYHGRLEKQPTFDADAFWGEYTLDNLTIKTLPGVFSRDGLDVGSQLLLSTLEPYTKGKVLDVGCGAGVLAAALASHSPKVRLTLCDVSAPAVEASRATLAANGLAGDVFASNVFSEVNGRFDMIISNPPFHDGLQTSLEAAQALIRGAVRHLNSGGELRIVANAFLPYPQVLDETFGFHEV

SEQ ID NO: 59666 - protein, 542 aa, Klebsiella pneumoniae
MRGPWPRLLRRLIMTLSPYLQEVAKRRTFAIISHPDAGKTTITEKVLLFGQAIQTAGTVKGRGSSQHAKSDWMEMEKQRGISITTSVMQFPYHDCLVNLLDTPGHEDFSEDTYRTLTAVDCCLMVIDAAKGVEDRTRKLMEVTRLRDTPILTFMNKLDRDIRDPMELLDEVENELKIGCAPITWPIGCGKLFKGVYHLYKDETYLYQTGKGHTIQEVRIVKGLNNPDLDAAVGEDLAQQLRDELELVQGASNEFDKDLFLAGEITPVFFGTALGNFGVDHMLDGLVEWAPAPMPRNTDTREVTATEEKFTGFVFKIQANMDPKHRDRVAFMRVVSGKYEKGMKLRQVRIGKDVVISDALTFMAGDRSHVEEAYPGDIIGLHNHGTIQIGDTFTQGEMMKFTGIPNFAPELFRRIRLKDPLKQKQLLKGLVQLSEEGAVQVFRPIANNDLIVGAVGVLQFDVVVARLKSEYNVEAIYESVNVATARWVESTDVKKFEEFKRKNEVQLALDGGDNLTYIAPTMVNLNLTQERYPDVVFRKTREH

SEQ ID NO: 59667 - protein, 457 aa, Klebsiella pneumoniae
VAKAPKRAFVCNECGADYPRWQGQCSACHAWNTITEMRIAASPQVARNERLSGYAGNAGVSKVQKLSDISLEALPRFSTGFKEFDRVLGGGVVPGSAILIGGNPGAGKSTLLLQTLCKLAEGMKTLYVTGEESLQQVAMRAHRLGLPTANLNMLSETSIEQICQIADEEKPQLMVIDSIQVMHMADVQSSPGSVAQVRETAAYLTRFAKTRGVAIVMVGHVTKDGSLAGPKVLEHCIDCSVLLDGDADSRFRTLRSHKNRFGAVNELGVFAMTEQGLREVSNPSAIFLSRGDEITSGSSVMVVWEGTRPLLVEIQALVDHSMMSNPRRVAVGLEQNRLAILLAVLHRHGGLQMADQDVFVNVVGGVKVTETSADLALLLAMVSSLRDRPLPQDLVVFGEVGLAGEIRPVPSGQERISEAAKHGFRRAIVPAANGPKKVPEGMQIFGVKKLSDALSVF

SEQ ID NO: 59668 - protein, 553 aa, Klebsiella pneumoniae
QFVYTMHRVGKVVPPKRHILKNISLSFFPGAKIGVLGLNGAGKSTLLRIMAGIDTEIEGEARPQPGIKIGYLPQEPQLNPEHTVRESVEEAVAEVVNALKGLDEVYAKYAEPDADFDKLAAQQGKFEEIIQAHDGHNLNVQLERAADALRLPDWDAKIANLSGGERRRVALCRLLLEKPDMLLLDEPTNHLDAESVAWLERFLHDFEGTVVAITHDRYFLDNVAGWILELDRGEGIPWEGNYSSWLEQKDQRLAQEASQEAARRKSIEKELEWVRQGAKGRQSKGKARLARFEELNNVEYQKRNETNELFIPPGPRLGDKVLEVSHLRKSYGDRVLIDDLSFSVPKGAIVGIIGPNGAGKSTLFRMMSGQEQPDSGTITLGETVKLASVDQFRDAMDNSKTVWEEVSGGLDIMKIGNTEMPSRAYVGRFNFKGVDQGKRVGELSGGERGRLHLAKLLQVGGNVLLLDEPTNDLDIETLRALENALLEFPGCAMVISHDRWFLDRIATHILDYQDEGKVEFFEGNFTEYEEYKKRTLGADALEPKRIKYKRIAK

SEQ ID NO: 59669 - protein, 420 aa, Klebsiella pneumoniae
MAWNQPGNNGQDRDPWGSSKPGGNSEGNGNKGGREQGPPDLDDIFRKLSKKLGGLGGGKGGLGGGNSAQGPRGPMGGRIVGIVAAAAVIIWAASGFYTIKEAERGVVTRFGKFSHLVEPGLNWKPTFIDNVQAVNVESVRELAASGVMLTSDENVVRVEMNVQYRVTDPERYLFSVTSADDSLRQATDSALRGVIGKYTMDRILTEGRTVIRSDTQRELEETIRPYNMGITLLDVNFQTARPPEEVKAAFDDAIAARENEQQYIREAEAYTNEVQPRANGQAQRILEEARAYKTQTVLEAQGEVARFAKILPEYKAAPEITRERLYIETMEKVLSHTRKVLVNDSKNGNLMVLPLDQMLKGAAAPAAKSDSSDASDLLRLPPASSSSSASTSSTSSSTGGSIMDQRRANAQRNDYQRQGE

SEQ ID NO: 59670 - protein, 432 aa, Klebsiella pneumoniae
MGNNVVVLGTQWGDEGKGKIVDLLTERAKYVVRYQGGHNAGHTLVINGEKTVLHLIPSGILRENVTSIIGNGVVLSPAALMKEMKGLEDRGIPVRERLLLSEACPLILDYHVALDVAREKARGAKAIGTTGRGIGPAYEDKVARRGLRVGDLFDKATFADKLKEVMEYHNFQLVNFYKAEAVDYQKVLDDVMAIADILTSMVVDVSDLLDQARQRGDFVMFEGAQGTLLDIDHGTYPYVTSSNTTAGGVATGSGLGPRYVDYVLGIIKAYSTRVGAGPFPTELFDETGEFLCKQGNEFGATTGRRRRTGWLDAVAVRRAVQINSLSGFCLTKLDVLDGLKEVKICVGYRMPDGREVTTTPLAADNWEGIEPIYETMPGWSETTFGVKERSGLPQAALNYIQRIEELTGVPVDIISTGPDRTETMILRDPFDA

SEQ ID NO: 59671 - protein, 251 aa, Klebsiella pneumoniae
MTEAQRHQILLDLLAQTGFVTVEQVMSRLGISPATARRDINKLDESGKLKKVRNGAEAISEQRPRWTPMNIHQAQNLDEKVRIARAASQLIAPGESIVINCGSTAFLLGRELCGKPVQIITNYLPLANYLIDQEHDSVIIMGGQYNRSHAITLSPHGSENSLYAGHWMFTSGKGLTAEGLYKTDMLTAMAEQKMLNVVGKLAVLVDSSKIGERAGMLFSQAGQIDVVITGKQADAAILKQLEDQGVSVIRV

SEQ ID NO: 59672 - protein, 129 aa, Klebsiella pneumoniae
MRHYEIVFMVHPDQSEQVPGMIERYTGAITAAAGTIHRLEDWGRRQLAYPINKLHKAHYVLMNVEAPQEAIDELETNFRFNDAVIRSMVMRTKHAVTEASPMVKAKDERRERREDFANETADDSEAGGF

SEQ ID NO: 59673 - protein, 155 aa, Klebsiella pneumoniae
MKLHESLAQNHSIRLQAEAETWQEAVKIGVDLLVAADVVEPRYYQAILDGVAQHGPYFVIAPGLAMPHGRPEEGVKKTGFALVTLKKPLIFNHEDNDPVDILITMAAVDATTHQEVGIMQIVNLFDDEANFDRLRACRSEQEVLDLIKNATAAAV

SEQ ID NO: 59674 - protein, 119 aa, Klebsiella pneumoniae
MVKLAFPRELRLLTPSHFTFVFQQPQRAGTPQITILGRLNSLGHPRIGLTVAKKNVKRAHERNRIKRLTRESFRLRQHELPPMDFVVVAKRGVADLDNRALSEALEKLWRRHCRLARGS

SEQ ID NO: 59675 - protein, 537 aa, Klebsiella pneumoniae
MDSQRNLLIIALLFVSFMIWQAWEQDKNPQPQQQTTQTTTTAAGSAADQGVPASGQGKLITVKTDVLELTINTNGGDIEQALLLAYPKTLKSTEPFQLLETTPQFVYQAQSGLTGRDGPDNPANGPRPLYNVDKEAFVLADGQDELVIPLTYTDKAGNVFTKTFTLKSGGYAVNVGYSVQNASEKPLEVSTFGQLKQTAALPTSRDTQTGGLSTMHTFRGAAFSTADSKYEKYKFDTILDNENLNVSTKNGWVAMLQQYFTTAWVPRNNGTNNFYTANLGNGVVAIGYKSQPVLVQPGQTDKLQSTLWVGPAIQDKMAAVAPHLDLTVDYGWLWFISQPLFKLLKFIHSFLGNWGFSIIVITFIVRGIMYPLTKAQYTSMAKMRMLQPKIQAMRERLGDDKQRQSQEMMALYKAEKVNPLGGCFPLIIQMPIFLALYYMLSASVELRHAPFILWIHDLSAQDPYYILPIIMGATMFFIQKMSPTTVTDPMQQKIMTFMPVIFTVFFLWFPSGLVVYYIVSNLVTIIQQQLIYRGLEK

SEQ ID NO: 59676 - protein, 454 aa, Klebsiella pneumoniae
MSHNDTIVAQATPPGRGGVGILRISGLKARNVAQAVLGKLPKPRYADYLPFNDVDGTPLDQGIALWFPGPNSFTGEDVLELQGHGGPVILDLLLKRILTLPGLRIARPGEFSERAFLNDKLDLAQAEAIADLIDASSEQAARSALNSLQGAFSARVNHLVEALTHLRIYVEAAIDFPDEEIDFLSDGKIEAQLNEVMADLDAVRAEARQGSLLREGMKVVIAGRPNAGKSSLLNALAGREAAIVTDIAGTTRDVLREHIHIDGMPLHIIDTAGLRDANDEVERIGIERAWQEIAQADRVLFMVDGTTTSAVDPAEIWPDFIERLPAKLPITVVRNKADVTGEALGINEVNGHSLIRLSARTGDGVEVLRNHLKQSMGFDTNMEGGFLARRRHLQALEEAANHLQQGKAQLLGAWAGELLAEELRLAQQALSEITGEFTSDDLLGRIFSSFCIGK

SEQ ID NO: 59677 - protein, 139 aa, Klebsiella pneumoniae
MTVEYTVIEKVPSAEAFCHLRVAAGMSPRPLEGARAGLPHSCYGVHILWQETPIAMGRIVGDGAINFDIVDVAVDPAHQGKGLGRLVMEKLVAWLDANAFDGAYVTLVADVPELYAKFGFESVRPESEGMARVWRTRSR

SEQ ID NO: 59678 - protein, 110 aa, Klebsiella pneumoniae
MPGNRPHYGRWPQHDFPPFKKLRPQSVTSRIQPGSDVIVCAEMDEQWGYVGAKSRQRWLFYAYDRLRKTVVAHVFGERTMATLGRLMSLLSPFDVVIWMTDGWPLYESRL

SEQ ID NO: 59679 - protein, 91 aa, Klebsiella pneumoniae; identical to SEQ ID NO: 43000

SEQ ID NO: 59680 - protein, 543 aa, Klebsiella pneumoniae
MRKKRIASAIVLLAPLCYSTNLLASQLTVEQRLELLEKALKDTQKELKKYQDQERKRDQIWASWSPPAEGQKRKTGGATAGPKTAVKPDALLVKNQQPVTDGAPAYSAMTLKDFSKFVKDEIGFSYNGYFRSGWGTASHGSPKSWAIGSLGRLGNEYSGWFDLQLKQRVFQEGDKRVDAIVMLDGNVGQQYSTGWFGDNAGGENYIQFSDMYVNTKGFLPFAPEADFWVGKHGAPKIEIQMLDWKTQRTDAAAGVGLENWQVGAGKFDIALIREDVDDYDRSLSNKQQINTNTLDVRYKEIPLWDKASLMVSGRYVAANQSSSEKYKEGNEGYYPWKDTWMAGTSLTQKFANGGFNEFSFLLANNSIASSFSRYAGSSPYTTFNGRYYGDHTNGTAVRLTSQGETYLRDDVIMANAIVYSFGNDVYSYETGAHSDFESIRTVLRPAYIWDKYNQTGVELGYFKQQNKDVTGKKYNESGYKTTLFHTFKVNTSMLTSRPEIRFYATYIKAKDIDLDKAANNTTSIFEDGKNDQFAVGAQAEIWW

SEQ ID NO: 59681 - protein, 257 aa, Klebsiella pneumoniae
MSMVNTAPGKISVRNLNFYYGKFHALKNINLDITKNQVTAFIGPSGCGKSTLLRTFNKMFELYPEQRAEGEILLDGDNILTNTQDIALLRAKVGMVFQKPTPFPMSIYDNIAFGVRLFEKLSRADMDERVQWALTKAALWNETKDKLHQSGYSLSGGQQQRLCIARGIAIRPEVLLLDEPCSALDPISTGRIEELITELKQDYTVVIVTHNMQQAARCSDHTAFMYLGELIEFSNTDDLFTKPAKKQTEDYITGRYG

SEQ ID NO: 59682 - protein, 319 aa, Klebsiella pneumoniae
MAATKPAFTPPGKKGDMIFSALVKLAALIVLLMLGGIIVSLIISSWPSIQKFGFAFLWTKEWDAPNEIFGALVPIYGTLVTSFIALLIAVPVSFGIALFLTELSPAWLKRPLGIAIELLAAIPSIVYGMWGLFIFAPLFATYFQEPVGNVLSTIPFVGALFAGPAFGIGILAAGVILAIMIIPYIAAVMRDVFEQTPVMMKESAYGIGCTTWEVIWRIVLPFTKNGVIGGVMLGLGRALGETMAVTFIIGNTYQLDSISLYMPGNSITSALANEFAEAETGLHVAALMELGLILFVITFIVLAASKFMIMRLAKNEGAR

SEQ ID NO: 59683 - protein, 287 aa, Klebsiella pneumoniae
MIRSMTAYARREIKGDWGSAAWELRSVNQRYLETYFRLPEQFRSLEPVVRERIRARLTRGKVECTLRFEQDPSAQGELILNEKLAKQLVNAANWVKMQSDEGEINPVDILRWPGVMAAKEQDLDAIAADILAALDGALDDFIVARETEGQALKALIEQRLEGVSGEVAKVRAHMPEILQWQRERLVAKLEDAEVQLENNRLEQELVLMAQRIDVAEELDRLEAHVKETYNILKKKEAVGRRLDFMMQEFNRESNTLASKSINAEVTNSAIELKVLIEQMREQIQNIE

SEQ ID NO: 59684 - protein, 397 aa, Klebsiella pneumoniae
MIGPHGVPVEVQIRTEDMDQMAEMGVAAHWAYKEHGGESSTTAQIRAQRWMQSLLELQQSAGSSFEFIESVKSDLFPDEIYVFTPEGRIVELPAGATPVDFAYAVHTDIGHACVGARVDRQPYPLSQPLSSGQTVEIITAPGARPNAAWLNFVVSSKARAKIRQLLKNLKRDDSVSLGRRLLNHALGGSRKLAEIPPENIQRELDRMKLASLDDLLAEIGLGNAMSVVVAKNLQQGEAAAAPVPANASNHGHLPIKGADGVLITFAKCCRPIPGDPIIAHVSPGKGLVIHHESCRNIRGYQKEPEKFMAVEWDKETAQEFITEIKVDMFNHQGALANLTAAINTASSNIQSLNTEEKDGRVYSAFIRLTARDRVHLANIMRKIRVMPDVIKVTRNRN

SEQ ID NO: 59685 - protein, 336 aa, Klebsiella pneumoniae
MKRELAIEFSRVTEAAALAGYKWLGRGDKNTADGAAVNAMRIMLNLVNIDGTIVIGEGEIDEAPMLYIGEKVGTGKGDAVDIAVDPIEGTRMTAMGQANALAVMAVGDKGCFLNAPDMYMEKLIVGPGAKGAIDLNLPLEENLHNIARALNKPLGELTVTVLAKPRHDAVIAQLQQLGVRVFAIPDGDVAASILTCMPDSEVDVLYGIGGAPEGVVSAAVIRALDGDMQGRLLARHHVKGDNEENRRIGENELARCKTMGIEAGKVLRLDEMARSDNVVFSATGITKGDLLDGITRKGNMATTETLLIRGKSRTIRRIQSIHYLDRKDPDIQQHIL

SEQ ID NO: 59686 - protein, 352 aa, Klebsiella pneumoniae
MKITDSMQCDIWYQALLERAVEFTGVFFVGVKTTGVFCISVCRARKPRRENVEFYNDFKSALDAGFRPCKVCRPTENARTAPAFVEQALRLLREAPKVRLSDSELRQHDISPERVRRWFLQNHGITFQAFQRMQRLNMALQELKAGRSTTDVAFDSGYESLSGFGYTCKKLTGFAPSAQRQVVLIHRFTTPLGPMFVCATQRGICLLEFVDRRALESEFSDLQRRFNASIIAGENAHTRQAQQEITEYFAGQRQSFEVALDTPGSEFQRVVWRRLQQVSFGETTHYQSIAMEIGKPTATRAVAAANGANRVAIIIPCHRIIGKDGSMTGYGGGIARKIWLINHEATIREKRG

SEQ ID NO: 59687 - protein, 274 aa, Klebsiella pneumoniae
MNEQQPFEAIRKSDEAGREYWSARNLGPLLDYKEWRNFYKVIAKAIISCEASGHPSADHFVETNKMVELGSGASRNLEDFHLSRYACYLVVQNSDPSKPVIAAGQTYFALQTRRQELQDDQIFKSLREDEKRLFLRNELKEHNKHLVETAQRAGVETTLYFAVFQNHGYKGLYGGLDQKAIHERKGLKKSQKILDYMGSTELAANLFRATQTEEKLRRDAVDSKQLANKTHYDVGQKVRQTIKDLGGTMPEALPSPEKSIQQLTIAAKNKNAPE

SEQ ID NO: 59688 - protein, 142 aa, Klebsiella pneumoniae
MRNYDLSPLLRQWIGFDKLASALQTAGESQSFPPYNIEKSDDNHYRITLALAGFRQEDLDIQLEGTRLVVKGTPQQPEKETTWLHQGLVSQAFSLSFTLADNMEVSGATFTNGLLHIDLTRNEPEQIAPQRIAISERPALNS

SEQ ID NO: 59689 - protein, 270 aa, Klebsiella pneumoniae
MAIKLIAIDMDGTLLLPDHTISPAVKAAIAAARERGVNVVLTTGRPYAGVHSYLKELHMEQPGDYCITYNGALVQKAGDGSTVAQTALSYDDYRFLEQLSREVGSHFHALDRNTLYTANRDISYYTVHESYVATIPLVFCEAEKMDPEIQLLKVMMIDEPAILDQAIARIPAEVKEKYTVLKSAPYFLEILDKRVNKGTGVKSLADALGIKPEEIMAIGDQENDIAMIEFAGVGVAMDNAIPAVKEAANFITKSNLEDGVAFAIEKYVLA

SEQ ID NO: 59690 - protein, 540 aa, Klebsiella pneumoniae
MLSQIQRFGGAMFTPVLLFPFAGIVVGIAIMLRNPMFVGEALTAPDSLFAQIVHIIEEGGWTVFRNMPLIFAVGLPIGLAKQAQGRACLAVLVSFLTWNYFINAMGMTWGHFFGVDFSAEPTAGSGLTMIAGIKTLDTSIIGAIVISGLVTALHNRYFDKPLPVFLGIFQGSSFVVIVAFLAMIPCAWLTLLGWPKVQLGIESLQAFLRSAGALGVWVYIFLERILIPTGLHHFVYGPFIFGPAVVEGGLQVYWAEHLQAFSQSTEPLKTLFPEGGFALHGNSKVFGSVGIALALYFTAAPENRVKVAGLLIPATLTAMLVGITEPLEFTFLFISPLLFAVHAVLAATMATVMYICGVVGNFGGGLLDQFLPQNWIPMFHHHASMMFIQIGIGLCFTALYFVVFRTLILRLNLKTPGREESEIKLYSKADYQAARGKTTAAAAPETRLGQAAGFLQALGGADNIESINNCATRLRIALVDMAKTQSDDVFKALGAHGVVRRGNGIQVIVGLHVPQVRDQLENLMKDSLSTEHTTMTEAVS

SEQ ID NO: 59691 - protein, 382 aa, Klebsiella pneumoniae
MKITNITTYRLPPRWMFLKIETDEGIVGWGEPVIEGRARTVEAAVHEFGDYLIGQDPARINDLWQVMYRGGFYRGGPIMMSAIAGIDQALWDIKGKVLNAPVWQLMGGLVRDKIKAYSWVGGDRPAEVIDGIKKLRGIGFDTFKLNGCEEMGIIDNSRAVDAAVNTVAQIREAFGNEIEFGLDFHGRVSAPMAKVLIKELEPYRPLFIEEPVLAEQAEYYPRLAAQTHIPIAAGERMFSRFEFKRVLEAGGVAILQPDLSHAGGITECYKIAGMAEAYDVGLAPHCPLGPIALAACLHVDFVSHNAVFQEQSMGIHYNKGAELLDFVKNKEDFNMEGGFFKPLMKPGLGVEIDEARVIELSKNAPDWRNPLWRYEDGSVAEW

SEQ ID NO: 59692 - protein, 400 aa, Klebsiella pneumoniae
MQSVDVAIVGGGMVGLAVACGLQGSGLRVAVLEKAEPRPLAADAPPALRVSAINAASEKLLTKLDVWREIVAQRASCYHGMEVWDKDSFGHISFDDQSMGFSHLGYIIENAVVHHALWQKAQRCADVTLLAPAELQQVAWGENEAFLSLQDGSMLTARLVIGADGANSWLRNKADIPLTFWDYHHHALVATIRTAEPHQAVARQAFHGDGILAFLPLSDPHLCSIVWSLSPGEAQRMQQADETTFNQALNIAFDNRLGLCQLASEREVFPLTGRYARQFAAHRLALVGDAAHTIHPLAGQGVNLGFMDAAELIDELKRLHAQGKDIGQHLYLRRYERSRKHSAALMLAGMQGFREMFSGSHPAKKFLRDVGLKLADTLPGVKPQLIRQAMGLNDLPAWLR

SEQ ID NO: 59693 - protein, 364 aa, Klebsiella pneumoniae
MAQQTPLYEQHTLCGARMVDFHGWMMPLHYGSQIDEHHAVRGDAGMFDVSHMTIVDFHGSRIREFLRYLLANDVAKLTTPGKALYTGMLTASAGVIDDLIVYFLSEDYFRLVVNSATREKDLAWISEQAEPYGLEITVRDDLSLIAVQGPQAKAKAATLFTDAQRQAVEGMKPFFGVQAGDLFIATTGYTGEAGYEIAMPNEQAADFWRGLLDAGVKPCGLGARDTLRLEAGMNLYGQEMDEGVSPLAANMGWTIAWEPADRNFIGREALEMQREKGTEQLVGLVMTEKGVLRGGLPVRFTDSDGNQKEGIITSGTFSPTLGYSIALARVPAGIGDTAVVQIRNREMPVKVTKPGFVRNGKAIV

SEQ ID NO: 59694 - protein, 957 aa, Klebsiella pneumoniae
MTQTLSQLENRDAFIERHIGPDAQQQQEMLKTVGADSLNALIGQIVPQDIQLATPPQVGDATTEFAALAELKAIASRNKRFKSYIGMGYTAVQLPPVIQRNMLENPGWYTAYTPYQPEVSQGRLESLLNFQQVTLDLTGLDIASASLLDEATAAAEAMAMAKRVSKLKNANRFFVAADVHPQTLDVVRTRAETFGFDVIVDDADKVLDHQDVFGVLLQQVGTTGEIHDYSKLIAELKARKVIVSVAADFMALVLLTAPGKQGADIVFGSAQRFGVPMGYGGPHAAFFAAKDEFKRSMPGRIIGVSKDAAGNTALRMAMQTREQHIRREKANSNICTSQVLLANIASLYAVFHGPAGLKRIAGRIHRLTDILADGLQKKGLKLRHAHYFDTLCVEVADKAAVLARAEALQINLRSDIHGAVGITLDEATTREDVLNLFRAVVGDDHGLDIDTLDKDVALDSRSIPAAMLRDDAILTHPVFNRYHSETEMMRYMHALERKDLALNQAMIPLGSCTMKLNAAAEMIPITWPEFAELHPFCPVEQAEGYQQMIAQLSDWLVKLTGYDAVCMQPNSGAQGEYAGLLAIRHYHESRNEGHREICLIPSSAHGTNPASAQMAGMQVVVVACDKNGNIDLADLREKAEQAGANLSCIMVTYPSTHGVYEETIREVCEIVHQFGGQVYLDGANMNAQVGITSPGFIGADVSHLNLHKTFCIPHGGGGPGMGPIGVKAHLAPFVPGHSVVQIEGMLTRQGAVSAAPFGSASILPISWMYIRMMGAEGLKQASQNAILNANYIATRLKDAYPVLYTGRDGRVAHECILDIRPLKEETGISELDIAKRLIDFGFHAPTMSFPVAGTLMVEPTESESKVELDRFIDAMLAIRAEIDRVKAGEWPLEDNPLVNAPHTQGELVGEWNHPYSRELAVFPAGLHNKYWPTVKRLDDVYGDRNLFCSCVPMSEYQ

SEQ ID NO: 59695 - protein, 477 aa, Klebsiella pneumoniae
MKKLTLPKDFLWGGAVAAHQVEGGWDLGGKGPSICDVLTGGAHGVPREITHQVEAGKYYPNHEAVDFYGRYKEDIKLFAEMGFKCFRTSIAWTRIFPQGDETQPNEEGLKFYDDMFDELLKYNIEPVITLSHFEMPLHLVQQYGGWTNRKVVDFFVRFAEVVFERYKHKVKYWMTFNEINNQRNWRAPLFGYCCSGVVYTEHDNPEETMYQVLHHQFVASALAVKAARRINPDMQVGCMLAMVALYPYSCKPEDVMFAQESMRERYVFTDVQLRGYYPSYVLNEWERRGFNIRMEDGDAQILREGTCAYLGFSYYMTNAVKAEGGTGDAISGFEGSVPNPHVKASDWGWQIDPVGLRYSLCELYERYQKPLFIVENGFGAYDKVEADGSINDDYRIDYLRAHIEEMIKAVTYDGVDLLGYTPWGCIDCVSFTTGQYSKRYGFIYVNKHDDGTGDMSRSRKKSFNWYKEVIASNGENL

SEQ ID NO: 59696 - protein, 167 aa, Klebsiella pneumoniae; identical to SEQ ID NO: 56103

SEQ ID NO: 59697 - protein, 91 aa, Klebsiella pneumoniae; identical to SEQ ID NO: 43000

SEQ ID NO: 59698 - protein, 291 aa, Klebsiella pneumoniae
FTVEYSVLSNARKMPMLGFGVFKVTDKAECKQAVLNAIRTGYRLIDTAAVYDNEDAVGEAVREAIAEGLCTREALFITSKLWVQDMANTGMAKAGIAASLKKSGLEYFDLYLLHQAMGDYFSAWRALEEAYEAGTLKAIGVSNFYPHVLANFCETVRIKPMVNQVELHPYFAQPAALEAMKHYHVQPEAWAPLGGGRHNPYQDALLRGIADAHQKTIAQVVLRWNVQRGVTVIPKSTRQERIEENFAIWDFVLTDNEMAQISALDLGYVGEALKHFNPEFVRGCLGVKIHD

SEQ ID NO: 59699 - protein, 216 aa, Klebsiella pneumoniae
MNTMNVIIADDHPIVLFGIRKSLEQIEWVNVVGEFEDSTALINNLPKLDAHVLITDLSMPGDKYGDGITLIKYIKRHFPDLSIIVLTMNNNPAILSAVLDLDIEGIVLKQGAPTDLPKALAALQKGKKFTPESVSRLLEKISASGYGDKRLSPKESEVLRLFAEGFLVTEIAKKLNRSIKTISSQKKSAMMKLGVENDIALLNYLSSVSLSATDKE

SEQ ID NO: 59700 - protein, 877 aa, Klebsiella pneumoniae
MSDLAREITPVNIEEELKNSYLDYAMSVIVGRALPDVRDGLKPVHRRVLYAMNVLGNDWNKAYKKSARVVGDVIGKYHPHGDSAVYDTIVRMAQPFSLRYMLVDGQGNFGSIDGDSAAAMRYTEIRLAKIAHELMADLEKETVDFVDNYDGTERIPDVMPTKIPNLLVNGASGIAVGMATNIPPHNLTEVINGCLAYVDDEDISIEGLMAHIPGPDFPTAAIINGRRGIEEAYRTGRGKVYIRARAEVEVDAKSGRETIIVHEIPYQVNKARLIEKIAELVKEKRVEGISALRDESDKDGMRIVIEVKRDAVGEVVLNNLYSQTQLQVSFGINMVALHHGQPKIMNLKDIIAAFVRHRREVVTRRTIFELRKARDRAHILEALAVALANIDPIIELIRRAPTPAEAKTALVAQAWDLGNVAAMLERAGDDAARPEWLEPEFGVRDGKYYLTEQQAQAILDLRLQKLTGLEHEKLLDEYKELLEQIAELLHILGSADRLMEVIREELELIRDQFGDERRTEITANSADINIEDLINQEDVVVTLSHQGYVKYQPLTDYEAQRRGGKGKSAARIKEEDFIDRLLVANTHDTILCFSSRGRLYWMKVYQLPEASRGARGRPIVNLLPLEADERITAILPVREYEEGVNVFMATASGTVKKTALTEFSRPRSAGIIAVNLNEGDELIGVDLTSGQDEVMLFSAAGKVVRFKEDAVRAMGRTATGVRGIKLAENDSVVSLIIPRGEGAILTVTQNGYGKRTAAAEYPTKSRATQGVISIKVTERNGSVVGAVQVDDCDQIMMITDAGTLVRTRVSEVSIVGRNTQGVILIRTAEDENVVGLQRVAEPVDDEELDAIDGSAAEGDDDIAPEADTDDDIAEDEE

SEQ ID NO: 59701 - protein, 376 aa, Klebsiella pneumoniae
MAYTTFSQTKNDQLLEPMFFGQPVNVARYDQQKYDIFEKLIEKQLSFFWRPEEVDVSRDRIDYQALPEHEKHIFISNLKYQTLLDSIQGRSPNVALLPLISIPELETWVETWAFSETIHSRSYTHIIRNIVNDPATVFDDIVTNEQIQKRAEGISHYYDSLIEMTSYWHLLGEGTHTVNGKTVTVNLRELKKKLYLCLMSVNALEAIRFYVSFACSFAFAERKLMEGNAKIIRLIARDEALHLTGTQHMLNLLRSGSDDPEMAEIAEECKQECYDLFVLAAQQEKEWADYLFRDGSMIGLNKDILCQYVEYITNIRMQAVGLDLPFQTRSNPIPWINTWLVSDNVQVAPQEVEVSSYLVGQIDSEVDADDLSNFQL

SEQ ID NO: 59702 - protein, 392 aa, Klebsiella pneumoniae
MNDTRFESCIKCTVCTTTCPVSRVNPRYPGPKQAGPDGERLRLKDGALYDEALKYCINCKRCEVACPSDVKIGDIIQRARAQYGQQKPTLRDAILSHTDLMGTLSTPFAPLVNAATGLKPVRRLLDATLNIDHRRTLPKYGFGTFRRAYRQLAARQKQYSEQVAFFHGCYVNYNHPQLGKDLIRVVNALGTGVQLLSKEKCCGVPLIANGFFDKARKQAQSNVAAMRENTLPIIATSSTCAFTLRDEYPHLLDVDNSDLRDRVELATRWIWKQLAAGRTLPLRPLPLKVVYHTPCHMEKMGWSLYTLELLRLIPGLQLEVLDSQCCGIAGTYGFKTENYAVSQAIGAPLFRQIEESGADLVVTDCETCKWQIEMSTSKRCEHPLTVLAQALV

SEQ ID NO: 59703 - protein, 104 aa, Klebsiella pneumoniae
MIRKAFVMQVNPDAHEEYQRRHNPIWPELEAVLKAHGAHHYAIYLDKERHLLFATVEIESEARWEAVASTEVCQRWWKYMREVMPSNPDNSPLSEELKEVFYLA

SEQ ID NO: 59704 - protein, 419 aa, Klebsiella pneumoniae
MTTQLEQAWEIAKQRYAAVGVDVEEALRQLDRLPVSMHCWQGDDVAGFENPAGSLTGGIQATGNYPGKARNAEELRADLEQALSLIPGPKRLNLHAIYLESDAPVARNEIKPEHFKNWVTWAKANKLGLDFNPSCFSHPLSADGFTLSHANDEIRQFWIDHCKASRRVSAYFGEQLGTPSVMNIWVPDGMKDITVDRFAPRQRLLNALDEVISEKLDPAHHIDAVESKLFGIGAESYTVGSNEFYMGYATSRQTALCLDAGHFHPTEVISDKISAAMLYIPRLLLHVSRPVRWDSDHVVLLDDETQAIASEIIRHNLFDRVHIGLDFFDASINRIAAWVIGTRNMKKALLRALLEPTAQLRQLENDGDYTARLALLEEQKSLPWQAIWEMYCQRHDTPAGSQWLDSVRAYENAVLSQRG

SEQ ID NO: 59705 - protein, 168 aa, Klebsiella pneumoniae
MMRNVIAAVMASTLALSAYSQAAEVVTSVNWLPGDEGGQRGSQSHMFDGISLTEQQRQQLRDLMQRARHDRLPVNVSEMETMHRLVTAENFDENAVRAQAEKMAQEQVARQVEMAKVRNQMYHLLTPEQQAVLNAKHQQRMDQLREVARMQKGSAMMLSSSSNTLQPQ

SEQ ID NO: 59706 - protein, 133 aa, Klebsiella pneumoniae
MQTQIKVRGYHLDVYQHVNNARYLEFLEEARWDGLENSPAFQWMMEKNIAFVVVNININYRRPAVLGDVLTVSSKLEQLNGKSGTLSQVVTLNPNGEVVADALITFVCIDLKTQKALPLEGELRAKLDQMNLR

SEQ ID NO: 59707 - protein, 163 aa, Klebsiella pneumoniae
MKFAYMFSALAVAATLTACANHHSNNSSTQAAAPDPYGIATLSVAQQQPSVTGTINIRQRIALPPDAVLTVTLSDASLADAPARVLSQKAVRTEGKQAPFNFALPYNPADIQPNARILLSAAITVNGQLMFITDTVQTVINQGGTHADLTLVPVQQTAVPVAQ

SEQ ID NO: 59708 - protein, 287 aa, Klebsiella pneumoniae
MNDFTSLLQQGNAWLFIPSAILLGALHGLEPGHSKTMMAAFIVAVRGTLKQAVLLGLAATVSHTAVVWLIAMAGLWFGRGWNAQTSEPWFQLVSGIVIVLIACWMLWRTWRESQPHTHHDHHHEHEHRHEHDHHHEHDHHPEHYHRHDHHHASSSAAPLVAEEWQDAHQRAHAQEINRRFDGRQVTTGQIVLFGLTGGLIPCPASITVLLICLQLKKFSLGATLVLGFSVGLALTLVASGAIAALSLKHATRRWPWLNDLSRKAPWFSGLLIIVVGIYMMLHGLSGL

SEQ ID NO: 59709 - protein, 114 aa, Klebsiella pneumoniae
MVCWQALLTTQVGNPGQNETVDRAMSHTVRHKKMLLTRLKKIQGQSTALEKMLNREHECAEILQQLAAIRGAVNGMMLQVIQGHLTDHVVKEPDETQREADLETVMQVIKSYLK

SEQ ID NO: 59710 - protein, 251 aa, Klebsiella pneumoniae
RHLRSPRNSMLDALNSEAIQVHYQPIISLQDGKIAGAEALARWQQPDGTFLSPDIFIPWAEQTGLITQLTEDIVRKIFADLGPWLRQRPEVHISINLSVDDLRSPTLPTLLHNQLQHWGIAAEQIILEITERGFVDPETTMPVIAHYRQAGHRISIDDFGTGYSSLSYLQKLDVDTLKIDKSFVDTLEYRPLTPHIIEMAKALNLATVAEGVETESQRDWLRQHGVQYAQGWLYSKALPKEQFILWAEHNL

SEQ ID NO: 59711 - protein, 481 aa, Klebsiella pneumoniae
MRCRMAAKRPFSLATRLTFFISLATIIAFFAFTWIMIHSVKAHFEERDVHDLRQLSTTLETVLDHADYPPARRLEIVKNIIAGYANVFICLDDGQGNILFQSPNGPDLSHMLSTPGLAMQLRDGNVISWTDPQPRAMAHDNHPLETRAWRLIMLPLGKQADGKPAYHLLMALSIDFHLHYINELKAKLISAASIISLLIIAIVLFVVYQGHKPIRQISRQIQNITSRDLDVRLDPQAVPVELERLALSFNHMLERIEDVFTRQSNFSADIAHEIRTPITNLVTQTEIALSQSRSPQELEEVLYSNLEEFSRMSRMVSDMLFLAQADNNQLIPEQQALDLAEEVHKVFEFFEAWAEEKAVALRFVGSHCRVTGDPLMLRRAISNLLSNAIRYTPAGQAVTIQLSESAETVRLVVENPGTPIAAEHLPRLFDRFYRVDPSRQRKGEGSGIGLAIVKSIVGAHHGSVAAQSDLRSTRFIVVLPK

SEQ ID NO: 59712 - protein, 439 aa, Klebsiella pneumoniae
MQTYFDQVDRVRFAGPKTDNPLAFRHYNPDEIVLGKRMADHLRFAACYWHNFCWNGADMFGAGSFERPWQAAGDALEMAKRKADVAFEFFYKLNVPYYCFHDVDVSPEGASLKEYLHNFAIMTEVLAEKQQQTGVKLLWGTANCFTHPRYGAGAATNPDPEVFAWAATQVVTAMNATHQLGGENYVLWGGREGYESLLNTDLRQEREQIGRFLQMVVEHKHKIGFGGALLIEPKPQEPTKHQYDYDVATVYGFLKQFGLENEIKVNIEANHATLAGHSFHHEIASAIALGIFGSVDANRGDAQLGWDTDQFPNSVEENTLVMYEILKAGGFTTGGLNFDAKVRRQSTDKYDMFYGHIGAMDVMALSLKLAARMIEDGKLDQGLAKRYAGWQGELGQKIMSGQMSLDNIARYAEQHNLNPQPQSGRQELLENLVNTYIFG

SEQ ID NO: 59713 - protein, 413 aa, Klebsiella pneumoniae
MDITQFSQINPPQRLLMGPGPINADPRVLRAMSSQLVGQYDPAMTHYMNEVMALYRGVFRTENRWTMLVDGTSRAGIEAILLSAIRPGDKVLVPVFGRFGHLLCEIARRCRAEVHTIEVPWGEVFTPDQVEDAIKRVRPRLLLTVQGDTSTTMLQPLAELGEICRRHDVLFYTDATASLGGNPLETDAWQLDAVSAGMQKCLGGPSGTSPITLSPRMEEVIRRRRCIEQGIRTDAHHDGVDEMIYSNYFDLGMVMDYWGPERLNHHTEATSALFAARECARLILQEGLDNGIARHKLHGDALLKGIQAMGLETFGDLRHKMNNVLGVVIPNGVNGDQVRKLMLEDFGIEIGTSFGPLHGKVWRIGTMGYNARKDCVMQTLSALEAVLNYLRFTTTQGAAMQAAWDHYRTEATL

SEQ ID NO: 59714 - protein, 465 aa, Klebsiella pneumoniae
MTLHHFTIAEIQRALHDGELSAREIARQTLDDIARVNPQINAWTEVTAQRMLAEADSIDALRREKRPLPPLAGIPYAVKNLFDVAGHTTLAGAELLSDRPPATSDSWAVRQLHSAGALLSGMLNMDAYAYGFTTENSHYGATRNPHDLSRIAGGSSGGSAAAVAAGLVHFSLGSDTNGSIRVPASLCGIFGLKPTFGRLSRSGSHPFVASLDHIGPFARRVADLAAVYDALQGRRPADDFQADKASERTGNLLERGLEGLRCARLGGYFTTWCDDDARAAVDRVAHALGADSELQFADAALARSAAFIISASEGGNQYLTDLRHSPERFEPHSRERLLAGAMIPSAWYLQAQRFRRHARQAMKSLFSQADVLIAPATPCSATPIGAEEMVINGQPLPVRASMGMLTQPISFLGLPVVTVPLRTASGKPIGLQLIAAPFNEQACLRAARALEAMGITDARVAESAA

SEQ ID NO: 59715 - protein, 385 aa, Klebsiella pneumoniae
MIITTALANEIVARAMAIIHHNVNVIDHHGQIIASGERHRIGEQHEVAREVIRTGKRICINNAAEAARFHNVHPGINHPIIYDDRVVMVVGISGDPAAISRYAELAVLTAELLVRQAIEMRETNWRQRLRDTLFCQYLEQGATPAGQEALHRLLELGFDFDTPRVPIVVTVQVEQHQLSDILSTLLREFSQLSGVSDVILLGSHEILILNALSEAQETLLRGIEFVLSNQISHYHIGIGVQADSAPDIREAIRFARSVIEVGSKVQPQRQIYYFREMAMLCLFRVLEDSYMVNFFINNVRQLLEHDSGEVLLDTLSSFIANNAEPGKTSLLLGIHRNTLTYRLQQIKKHIQLDPMVFTDLTQLAVSVHCYRRLNPRQSEWIDSLS

SEQ ID NO: 59716 - protein, 91 aa, Klebsiella pneumoniae; identical to SEQ ID NO: 43000

SEQ ID NO: 59717 - protein, 309 aa, Klebsiella pneumoniae
MSIRIIPQDELGSSEKRTAEAIPPLLFPRLKNLYNRRAERLRELAANNPLGDYLRFAALIAHAQEVVLYDHPLQMDLTARIKAASEQGKPPLDIHVLPRDKHWHKLLHSLIAELKPEMSGPALAVIENLEKASEQELEQMASALFVSDFASVSSDKAPFIWAALSLYWAQMASLIPGKARAEYGEQRQFCPVCGSMPVSSIVQIGTTQGLRYLHCNLCETEWHVVRVKCSNCEQSRDLHYWSLDNEQAAVKAESCGDCGTYLKIMYQEKDPKVEAVADDLASLVLDARMEQEGFARSSINPFMFPGEGE

SEQ ID NO: 59718 - protein, 167 aa, Klebsiella pneumoniae; identical to SEQ ID NO: 56103

SEQ ID NO: 59719 - protein, 211 aa, Klebsiella pneumoniae
MKRRDTIVRYTAPERINHWVTAFCFVLAAVSGLGFFFPSFNWLMHILGTPQLARILHPFVGVVMFASFIIMFFRYWHHNLINRDDIFWAKNIRKIVVNEEVGDTGRYNFGQKCVFWAAIIFLVLLLVSGVIIWRPYFAPAFSIPVIRFALMLHSFAAVALIVVIMVHIYAALWVKGTITAMVEGWVTKTWAKKHHPRWYREVRQKQEKSSE

SEQ ID NO: 59720 - protein, 417 aa, Klebsiella pneumoniae
MLEQMGIAAKAASWQLALLSSREKNQVLEKIADYLEAQTDDILRANAEDLAEARANGLSEAMLDRLALTPARLSGIANDVRQVCNLADPVGQVIDGGLLDSGLRIERRRVPLGVIGVIYEARPNVTVDVASLCLKTGNAAILRGGKETWRTNAATVKVIQQALQECGLPAAAVQAIESPDRALVGEMLKMDKYIDMLIPRGGAGLHKLCREQSTIPVITGGIGVCHIFVDETAEIAPALKIIVNAKTQRPSTCNTVETLLVHRNIADTFLPALSKQMAESGVTLHAAPSALPALQNGPAKVEPVKAEQYDDEYLSLDLNVKVVADMDEAIAHIREHGTQHSDAILTRTLRNANRFINEVDSSAVYVNASTRFTDGGQFGLGAEVAVSTQKLHARGPMGLEALTTYKWIGFGDDTIRA

SEQ ID NO: 59721 - protein, 1270 aa, Klebsiella pneumoniae
YRLGEPVFDVKECQIRGVTYSAPLRVKLRLVIYEREAPEGTVKDIKEQEVYMGEIPLMTDNGTFVINGTERVIVSQLHRSPGVFFDSDKGKTHSSGKVLYNARIIPYRGSWLDFEFDPKDNLFVRIDRRRKLPATIILRALNYTTEQILDLFFEKVVFEIRDNKLQMELIPERLRGETASFDIEANGKVYVEKGRRITARHIRQLEKDDIKHIEVPVEYIAGKVAAKDYIDEATGELICPANMELSLDLLAKLSQSGHKRIETLFTNDLDHGPYISETVRVDPTNDRLSALVEIYRMMRPGEPPTREAAESLFENLFFSEDRYDLSAVGRMKFNRSLLRDEIEGSGILSKDDIIEVMKKLIDIRNGKGEVDDIDHLGHRRIRSVGEMAENQFRVGLVRVERAVKERLSLGDLDTLMPQDMINAKPISAAVKEFFGSSQLSQFMDQNNPLSEITHKRRISALGPGGLTRERAGFEVRDVHPTHYGRVCPIETPEGPNIGLINSLSVYAQTNEYGFLETPYRKVTDGVVTDEIHYLSAIEEGNYVIAQANSNLDENGHFVEDLVTCRSKGESSLFSRDQVDYMDVSTQQVVSVGASLIPFLEHDDANRALMGANMQRQAVPTLRADKPLVGTGMERAVAVDSGVTAVAKRGGTVQYVDASRIVIKVNEDEMYPGEAGIDIYNLTKYTRSNQNTCINQMPCVSLGEPIERGDVLADGPSTDLGELALGQNMRVAFMPWNGYNFEDSILVSERVVQEDRFTTIHIQELACVSRDTKLGPEEITADIPNVGEAALSKLDESGIVYIGAEVTGGDILVGKVTPKGETQLTPEEKLLRAIFGEKASDVKDSSLRVPNGVSGTVIDVQVFTRDGVEKDKRALEIEEMQLKQAKKDLSEELQILEAGLFSRIYAVLVSGGVEAEKLDKLPRDRWLELGLTDEEKQNQLEQLAEQYDELKHEFEKKLEAKRRKITQGDDLAPGVLKIVKVYLAVKRRIQPGDKMAGRHGNKGVISKINPIEDMPHDANGTPVDIVLNPLGVPSRMNIGQILETHLGMAAKGIGDKINAMLKQQQEVAKLREFIQRAYDLGADVRQKVDLNTFSDEEVLRLAENLRKGMPIATPVFDGAKEAEIKELLQLGDLPTSGQITLFDGRTGEQFERPVTVGYMYMLKLNHLVDDKMHARSTGSYSLVTQQPLGGKAQFGGQRFGEMEVWALEAYGAAYTLQEMLTVKSDDVNGRTKMYKNIVDGNHQMEPGMPESFNVLLKEIRSLGINIELEDE

SEQ ID NO: 59722 - protein, 1407 aa, Klebsiella pneumoniae
MKDLLKFLKAQTKTEEFDAIKIALASPDMIRSWSFGEVKKPETINYRTFKPERDGLFCARIFGPVKDYECLCGKYKRLKHRGVICEKCGVEVTQTKVRRERMGHIELACPTAHIWFLKSLPSRIGLLLDMPLRDIERVLYFESYVVIEGGMTNLERNQILTEEQYLDALEEFGDEFDAKMGAEAIQALLRNMDLEQECEQLREELNETNSETKRKKLTKRIKLLEAFVQSGNKPEWMILTVLPVLPPDLRPLVPLDGGRFATSDLNDLYRRVINRNNRLKRLLDLAAPDIIVRNEKRMLQEAVDALLDNGRRGRAITGSNKRPLKSLADMIKGKQGRFRQNLLGKRVDYSGRSVITVGPYLRLHQCGLPKKMALELFKPFIYGKLELRGLATTIKAAKKMVEREEAVVWDILDEVIREHPVLLNRAPTLHRLGIQAFEPVLIEGKAIQLHPLVCAAYNADFDGDQMAVHVPLTLEAQLEARALMMSTNNILSPANGEPIIVPSQDVVLGLYYMTRDSVNAKGEGMVLTGPKEAERIYRAGLASLHARVKVRITEYEKDDNGEFVAKTSLKDTTVGRAILWMIVPKGLPFSIVNQALGKKAISKMLNTCYRILGLKPTVIFADQTMYTGFAYAARSGASVGIDDMVIPEKKYEIISEAEAEVAEIQEQFQSGLVTAGERYNKVIDIWAAANDRVSKAMMDNLQTETVINRDGQEEQQVSFNSIYMMADSGARGSAAQIRQLAGMRGLMAKPDGSIIETPITANFREGLNVLQYFISTHGARKGLADTALKTANSGYLTRRLVDVAQDLVVTEDDCGTLEGITMTPVIEGGDVKEPLRDRVLGRVTAEDVLKPGTADILVPRNTLLHEHWCDLLEANSVDSVKVRSVVSCDTDFGVCAHCYGRDLARGHLINKGEAIGVIAAQSIGEPGTQLTMRTFHIGGAASRAAAESSIQVKNKGSIKLSNAKSVVNSSGKLVITSRNTELKLIDEFGRTKESYKVPYGAVMAKGDGEQVAGGETVANWDPHTMPVITEVSGFIRFTDMIDGQTITRQTDELTGLSSLVVLDSAERTAGGKDLRPALKIVDAQGNDVLIPGTDMPAQYFLPGKAIVQLEDGVQISSGDTLARIPQESGGTKDITGGLPRVADLFEARRPKEPAILAEISGIISFGKETKGKRRLVITPVDGSEPYEEMIPKWRQLNVFEGERVERGDVVSDGPEAPHDILRLRGVHAVTRYIVNEVQDVYRLQGVKINDKHIEVIVRQMLRKATIESAGSSDFLEGEQVEYSRVKIANRELEANGKVGATFSRDLLGITKASLATESFISAASFQETTRVLTEAAVAGKRDELRGLKENVIVGRLIPAGTGYAYHQDRMRRRAAGELPAAPQVSVEEASANLAELLNAGLGGSDND

SEQ ID NO: 59723 - protein, 211 aa, Klebsiella pneumoniae
MYQPDFPPVPFRLGLYPVVDSVAWIERLLEAGVRTLQLRIKDRRDSEVEDDVIAAIALGRRYHARLFINDYWQLAIKHQAYGVHLGQEDLETTDLSAIRQAGLRLGVSTHDDMEIDVALAARPSYIALGHVFPTQTKQMPSAPQGLEQLARHIQRLADYPTVAIGGISLEKAPGVLATGVGSIAVVSAITQAADWRAATDQLLALAGAGDE

SEQ ID NO: 59724 - protein, 90 aa, Klebsiella pneumoniae
MNKTQLIDVIADKADLSKAQAKAALESTLAAITESLKEGDAVQLVGFGTFKVNHRAERTGRNPQTGKEIKIAAANVPAFVSGKALKDAVK

SEQ ID NO: 59725 - protein, 629 aa, Klebsiella pneumoniae
MGFLQLLIGRDKYSISASTVGDEPLNPAHRTALIMPICNEDVDRVFAGLRATWESVKATGNAAHFDVYILSDSYNPDICVAEQKAWMELIAEVQGEGQIFYRRRRRRVKRKSGNIDDFCRRWGSQYSYMVVLDADSVMTGECLSSLVRLMEANPNAGIIQSSPRASGMDTLYARCQQFATRVYGPLFTAGLHFWQLGESHYWGHNAIIRVKPFIEHCALAPLPGEGNFAGSILSHDFVEAALMRRAGWGVWIAYDLPGSYEELPPNLLDELKRDRRWCQGNLMNFRLFLVRGMHPVHRAVFLTGVMSYLSAPLWFMFLALSTALQVVHALTEPQYFLQPRQLFPVWPQWRPELAIALFASTMVLLFLPKLLSIILVWCKGPKEYGGFIRVTLSLLLEVLFSVLLAPVRMLFHTVFVVSAFLGWEVVWNSPQRDDDSTPWGEAFMRHGSQLLLGLVWAVGMAWLDLRFLFWLAPIVVSLILSPFVSAISSRATVGLRTKRWKLFLIPEEYSPPQVLKDTDAYLTMNRQRSLDDGFMHAVFNPSFNALATAMATARHRQGHILEIARERHVEQALNETPDKLNRDRRLVLLSDPVTMSRLHYRVWAAPEKYSSWVNAYQQLALNPLALKTK

SEQ ID NO: 59726 - protein, 83 aa, Klebsiella pneumoniae
MRIEVSIAKTTALPNGALEALNNELSRRIAEQFPAIDSQVSVRYATGNQLSVFGALKEDKDRISEILQETWESADDWFVHDLS

SEQ ID NO: 59727 - protein, 408 aa, Klebsiella pneumoniae
MSSAETPINWKRNLTVTWLGCFLTGAAFSLVMPFLPLYVEQLGVTGHSALNMWSGLVFSITFLFSAIASPFWGGLADRKGRKIMLLRSALGMAIVMMLMGMAQNIWQFLLLRALLGLLGGFIPNANALIATQIPRHKSGWALGTLSTGAVSGALLGPLAGGFLADHWGLRTVFFMTAAVLFICFLFTLFLIRENFVPIARKEMLSAREVFSSLQNPKLVLSLFVTSLIIQVATGSIAPILTLYVRDLAGNVSNIAFISGMIASVPGIAALMSAPRLGKLGDRIGPEKILIVALIISVLLLIPMSFVQTPLQLGILRFLLGAADGALLPAVQTLLVYNSTSQISGRIFSYNQSFRDIGNVTGPLIGASVSANYGFRAVFLVTAGVVLFNAIYSTLSLRRPAADTSHSVN

SEQ ID NO: 59728 - protein, 348 aa, Klebsiella pneumoniae
MTAQSQVLKIRRPDDWHIHLRDDDMLKTVVPYTSEFYGRAIVMPNLVPPVTTVAAAIAYRQRIMDAVPAGHDFTPLMTCYLTDSLDPAELERGFNEGVFTAAKLYPANATTNSSHGVTSTDAIMPVLERMEKLGMPLLVHGEVTHAEIDIFDREARFIETVMEPLRQRLPGLKVVFEHITTKDAAEYVRDGNELLAATITPQHLMFNRNHMLVGGIRPHLYCLPVLKRNIHQQALRELVASGFSRAFLGTDSAPHARHRKEASCGCAGCFNAPTALGSYATVFEEMNALQHFEAFCSLNGPRFYGLPVNESYVELVREETTVVDSIALPNDTLVPFLAGETVRWTVKK

SEQ ID NO: 59729 - protein, 186 aa, Klebsiella pneumoniae
MKKILIAAALIVSGLLSGCNQLTQYTVSEQEINQALQKRNHFAKDIGLKGVADAHIELQNLTSAIGREEPGKVTLSGIANVDLNSLFGTQKATIDLKLKALPTFDREKGAIFLQEMEVVDAKVAPEKLQSVIQALLPYLNQSLRSYFSQQPAYVLREDASTGEALAKKYAKGIEVKPGEIVIPFTN

SEQ ID NO: 59730 - protein, 354 aa, Klebsiella pneumoniae
MPVLHNRISNETLKAQMLAETEPRTTISFYKYFTIVDPQATRDALWVALTQLKVFGRIYLAREGINAQISVPQSNVEALREFLYGFDPALAGLRFNIAVEDDGKSFWVLRLKVRDRIVADGIDDPSFDASNVGEYLKAAEVNAMLDDPDAVFIDMRNHYEYEVGHFENALEIPADTFRDQLPKAVEMMQDHKDKKIVMYCTGGIRCEKASAWMKHNGFNKVWHIEGGIIEYARRAREQGLPVRFIGKNFVFDERMGERISNDVIAHCHQCGAPCDTHTNCLNDGCHLLFIQCPSCAEKFAGCCSEACMEEHKLPEEEQRKLRAGRENGNKIFNKSRGRLNTKLGILDPEPSEKP

SEQ ID NO: 59731 - protein, 372 aa, Klebsiella pneumoniae
MQYDLIIIGSGSVGAAAGYYARRAGLNVLMTDAHQPPHQEGSHHGSSRLIRHAYGEGEKYVPLVLRAQQLWDELAEISGEAVFERTGVINLGPASSAFLANVAASARAFQLEVEELDAQAVMQRWPEIRLPDDYRAIFEPASGVLRSELAVETWIRLAREAGCAQLFNCPVSAIHHHADGITIDTLDGEYHGKKLLVSAGTWVTRLLPDLPIQPVRKVFAWYQADGRYSSKNHFPAFTGELPNGDQYYGFPAEDNELKIGKHNGGQPISTPQERVAFGAVASDGSESFPFLRNVLPGIGGCLHGASCTYDNTVDEDFIIDTLPGRPDTLLITGLSGHGFKFAPVLGEIASQFAQGEASSFNLAPFSLARFNA

SEQ ID NO: 59732 - protein, 207 aa, Klebsiella pneumoniae
MMLCEALYVDEKNMSDLILASTSPWRRMLLEKLGLPFECAAPDVDETPRPDESARQLVTRLAQAKAQSLATRFPNHLIIGSDQVCVLDGEITGKPHTEENARRQLRKASGSIITFYTGLALYNSASGHLQTECEPFDVHFRHLSDKEIEGYVRKENPLQCAGSFKSEGLGITLFERLEGRDPNTLVGLPLIALCQMLRRENYNPLLG

SEQ ID NO: 59733 - protein, 307 aa, Klebsiella pneumoniae
MGTRLRIGVVGLGSIAQKAWLPVLGAAESWTLQAAWSPGKEKALRICETWRMPYADSLDALAAQCDAVFVHTSTASHYEVVNHLLNAGVHVCVDKPLADKLSEAETLVELAARRRLTLMVGFNRRFAPLYRELKGRLGEAASLRMDKHRSDSVGNDLRFTLLDDYLHVVDTALWLADGQARLRGGALKITPQGEMLYAEHQFSSPRLQVTTSMHRRAGSQREWVQAVTDGGLYAVSEMREWQEECGHGVVQRPVAGWQTTLEQRGFVGCARHFIECVQNQTVPETAGEQALLAQRIVEKLWRDAISE

SEQ ID NO: 59734 - protein, 524 aa, Klebsiella pneumoniae
MRAFYSRVWNNSVMNLLKSLAAVSSMTMFSRVLGFARDAIVARIFGAGMATDAFFVAFKLPNLLRRIFAEGAFSQAFVPILAEYKSKQGEDATRVFVSYVSGLLTLALAIVTVIGMLAAPWVITITAPGFADTADKFALTTQLLRITFPYILLISLASLVGAILNTWNRFSVPAFAPTFLNVSMIGFALFAAPYFHPPVLALAWAVTVGGVLQLAYQLPHLKKIGMLVLPRINLKDAGAMRVVKQMGPAILGVSVSQISLIINTIFASFLVSGSVSWMYYADRLMEFPSGVLGVALGTILLPSLSKSFASGNHDEYCRLMDWGLRLCFLLALPSAVALGILAKPLTVALFQYGKFSAFDAAMTQRALVAYSVGLMGLIVVKVLAPGFYSRQDIKTPVKIAIITLIMTQVMNLAFIGPLKHAGLSLSIGLAACLNAALLYWQLRKQKIFTPQPGWLAFLLRLIIAVLVMAAALLGVMHLMPEWSLGTMPFRLMRLLAVVIAGVVAYFATLLVLGFRVKEFVRRTA

SEQ ID NO: 59735 - protein, 201 aa, Klebsiella pneumoniae
RFTVKQIVWLKVLLHLAGFLPLVWLFWAGHQGYFSADPAKDIQHFTGRMALKFLLATLLVSPLARYAKQPLLIRVRRLLGLWCFAWATLHLTSYTLLELGINNLALLGSEIITRPYLTLGMISWAILLALAVTSTQAMQRKLGRRWQLLHNFVYLVAILAPIHYLWSVKIVSPQPVIYALLAAGLLTWRYKKFRQWWRSIR

SEQ ID NO: 59736 - protein, 970 aa, Klebsiella pneumoniae
LSHDKQSWAFYIPDTRIAIDDKPWPSGALAMAWIPAQDVGGDDRQRSDELRIRASNLALSGLSGLQPFADKLAPSLGELWRTTQPGGKINLLALDIPLQATEKTRFQAQWSDLAWKQWKLLPGAEHFSGSLNGSVEHGELRAHMAKALMPYAGVFRAPLEIAAGEATLSWVKNDKGFMLDGRDIDVQATGVRARGGFRYLQPQGDDPWLGILAGISTNDGGQAWRYFPENLMGKALVDYLSGAIKAGQASDATLVYGGNPHLFPYPHNEGQFQVYVPLKNATFAFQPDWPALTGLNIDLNFINNGLWMRADKAMLGNVTASNLDAAIPDYAQEKLLIDADIKGPGKEVGPYFNTTPLKESLGAALDSLQLDGDVSARLHLNIPLDGEMTTAKGDVRLQNNSLFIKPLDTTLQNLSGNFSFVNGDLNSQTLSATWFNQPLNLNFSTREGEKAFLVDVGMNANWQPSRTGLLPKAVSEALSGSVPWDGKVAIELPYHGNASYKVDINGDLKNVSSRLPSPVSKPAGEPLPVKINVAGGLSSFDLTGSIGAKNHINSRWLLNHKLTLDRAILTTDSKGYSPLPDQSGIELNLPPMDGAQWLALFENGAANEVSSSVLFPPRIVLRTPSLALAGQQWNNVSLMSQPVAGGSQVEAQGREINATLTMRDNAPWLANVRYLYFNPASASGQNATENVAPQTATRLDFHGWPDLQLRCAECWLWGQKYGRIDGDVAIKGDTLTLSNGLVDTGFGRLTTNGVWVNAPSGVRTSLKGRLHGNKTDAFADFFGVSTPVKDSPFDIDYDLHWRAPPWSPDVASLNGIIKSHLGKGQFTDLSTGHAGQLLRLLSVDALLRKLRFDFSDTFSEGFYFDSINSTAWIKDGVLHTDDTLVDGLEADIAMKGSVDLVRRQLDLQAVVAPEISATVGVAAAFAVNPIVGAAVFAASKVLGPLWNKVSILRYRITGPIDQPQINEVLR

SEQ ID NO: 59737 - protein, 483 aa, Klebsiella pneumoniae
MQFEVIIPLIAYLVVVFGLSLYAMRKRASGSFLNEYFLGSRSMGGFVLAMTLTATYISASSFIGGPGAAYKYGLGWVLLAMIQLPAIWLSLGVLGKKFAILARRYNAVTLNDMLFARYQSRLLVWLASLSLLVAFVGAMTVQFIGGARLLETAAGIPYDTGLLIFGVSIALYTAYGGFRASVLNDTMQGMVMLIGTIVLLVGVIHAAGGVGHAVETLQSIDVKLVSPQGAEDILSPTFMASFWVLVCFGVIGLPHTAVRCISYKDSKAVHRGIIIGTIVVAILMFGMHLAGALGRAVIPDLTVPDLVIPTLMVKVLPPFAAGIFLAAPMAAIMSTINAQLLQSSATIIKDLYLNWRPDQATNEKRLKRMSAGITLLLGVLLLLAAWRPPEMIIWLNLLAFGGLEAVFLWPLVLGLYWERANAAGALSAMIVGGVLYAVLATLKVQFLGFHPIVPALLLSLLAFVAGNRFGRPAPQPPILTTDK

SEQ ID NO: 59738 - protein, 646 aa, Klebsiella pneumoniae
MRLTTKFSAFITLLTSLTIFVTLIGASLSFYNGIENKVENRVQAVATMLDNRLITTSFDKLEPQLDELMTPIEIVHIDFMLNGKPLYSHSRPDSYRPLGSHEQFREITVQSLKHPGITLHLVYVDPMVNYFRSLSITAPLSISIGFMVVIIFFAVRWIRRQLAGQELLEVRSTRILSGERGPQVRGSVYEWPASTSSALDMLLSELQFASDQRSRMDTLIRSYAAQDSKTGLNNRLFFDNQLATLLEDQEKVGAYGIVMMIRLPEFDLLRDNWGRAAAEEHYFTLINLLSTFIMRYPGALLARYHRSDFAVLLPHRTLKEADSIAGLLLKAMDALPPTRILDRDDMMHIGICSFRSGQSAAQVMEHAEAATRNAVLQGSNSWSVYDDTLPEKGRGNVRWRTLIEQMLSRGGPRLYQKPAVTRDGRVHHRELMSRMYDGKEEVIAAEYMPMVLQFGLAEEYDRLQVTRLLPFLGFWPEENLALQLSVESLIRPRFQRWLRDALMQCEKSQRQRIIFELAEADVCQYIGRLQPVMRLVNALGVRVAVVQAGLTLVGTSWIKQLDAELIKLHPGLARNIEKRSENQLLVQSLVEACKGMPMQVFATGVRSRSEWLVLSQCGVTGGQGEFFAASQPLDTNVKKYSQRYSV

SEQ ID NO: 59739 - protein, 347 aa, Klebsiella pneumoniae
MLKKFRGMFSNDLSIDLGTANTLIYVKGQGIVLNEPSVVAIRQDRAGSPKSVAAVGHEAKQMLGRTPGNIAAIRPMKDGVIADFFVTEKMLQHFIKQVHSNSFMRPSPRVLVCVPVGATQVERRAIRESAQGAGAREVFLIEEPMAAAIGAGLPVSEATGSMVVDIGGGTTEVAVISLNGVVYSSSVRIGGDRFDEAVINYVRRNYGSLIGEATAERIKHEIGSAYPGDEVREIEVRGRNLAEGVPRGFTLNSNEILEALQEPLTGIVSAVMVALEQCPPELASDISERGMVLTGGGALLRNLDRLLMEETGIPVVVAEDPLTCVARGGGKALEMIDMHGGDLFSEE

SEQ ID NO: 59740 - protein, 498 aa, Klebsiella pneumoniae
LRFAIKLACAVVLALFVGFHFQLETPRWAVLTAAIVAAGPAFAAGGEPYSGAIRYRGMLRIAGTFIGCIAALVIIILMIRAPLLMMLVCCLWAGFCTWVSSLVKVENSYAWGLAGYTALIIIITIHTNPMLAPQFAVERCSEIVIGIVSAIVADLLFSPRSIKKEIDLELDNLLIAQYKLMQLCVAHGEKEEVDQAWGALVRRTTALEGMRSNLIMESSRWAKANQRLKAINTLSLTLITQACETYLIQNSRPEMVTDDYRELFAEPVETVQDVHQQLKRMRRFLTWKGEHNTPVTIYSWVGAATRYLLLKRGVVGNTKISRIEDGVLRGETVVKVESAERHHAMVNFWRTSVSCILGTLFWLWTGWTSGSGAMVMIAVVTALAMRLPNPRMVAIDFLYGTLAALPLGTLYFLVIMPATQQSMLLLCISLAAMAFFIGIEVQKRRLGSLGALASTINILVLDNPMQFQFSQFLDSALGQIVGCFLALMVFSLSGITPG

SEQ ID NO: 59741 - protein, 425 aa, Klebsiella pneumoniae
DAKAKITLGGDTAIELDVLKGTLGQDVIDIRSLGSKGVFTFDPGFTSTASCESKITFIDGDEGILLHRGFPIDQLATESNYLEVCYILLYGEKPTQAEYDEFKTTVTRHTMIHEQITRLFHAFRRDSHPMAVMCGITGALAAFYHDSLDVNNPRHREIAAYRLLSKMPTMAAMCYKYSIGQPFVYPRNDLSYAGNFLRMMFATPCEEYEVNPVLERAMDRILILHADHEQNASTSTVRTAGSSGANPFACIAAGIASLWGPAHGGANEAALKMLEEISSVEHIPEFVRRAKDKNDSFRLMGFGHRVYKNYDPRATVMRETCHEVLKELGTKDDLLQVAMELEHIALNDPYFIEKKLYPNVDFYSGIILKAMGIPSSMFTVIFAMARTVGWIAHWNEMHSDGMKIARPRQLYTGYAKRDFQSDIKR

SEQ ID NO: 59742 - protein, 247 aa, Klebsiella pneumoniae
MKIDLNADLGEGCASDSALLQLVSSANIACGFHAGDAVLMQQCVREALKNGVAIGAHPSFPDRENFGRTAMQLPPETVYAQVLYQIGALAAIVHAQGGELRHVKPHGMLYNQAAKEPPLADAIARAVRDADADLVLVGLAGSELIRAGQHYQLTTRQEVFADRGYQADGSLVPRSQPGALIESEEQALAQTLEMVQHNRVRSLSGEWAHVKAETVCLHGDGAHALDFARRLRAAFAGRNIDVSADLE

SEQ ID NO: 59743 - protein, 682 aa, Klebsiella pneumoniae
MSRKQLALLEPTLVRQALLDAVKKLSPMVQWRNPVMFIVWVGSLLTTLLAIAMAGGALTGSATFTAAVSIWLWFTVLFANFAEAMAEGRSKAQANSLKGVKKTAFARKLRAPQHDAPVDHVPAEDLRKGDVVLVEAGDIIPCDGEVIEGGASVDESAITGESAPVIRESGGDFASVTGGTRILSDWLVIRCSVNPGETFLDRMIAMVEGAQRRKTPNEIALTILLIALTLVFLLATATIWPFSAWSGNAVSVTVLVALLVCLIPTTIGGLLSAIGVAGMSRMLGANVIATSGRAVEAAGDVDVLLLDKTGTITLGNRQASAFLPARGVEERTLADAAQLSSLADETPEGRSIVVLAKQRFNLRERDLQSLHATFVPFTAQTRMSGINIDQRMIRKGSVDAIRRHVEANGGHFPADVDKQVEEVARQGATPLVVAEGEKVLGIIALKDIVKGGIKERFAQLRKMGIKTVMITGDNRLTAAAIAAEAGVDDFLAEATPEAKLALIRQYQSEGRLVAMTGDGTNDAPALAQADVAVAMNSGTQAAKEAGNMVDLDSNPTKLIEVVHIGKQMLMTRGSLTTFSIANDVAKYFAIIPAAFAAVYPQLAMLNVMGLHSPSSAILSAVIFNALIIVFLIPLALKGVSYRPLSASAMLRRNLWIYGLGGLLVPFIGIKAIDLLLTLSGLV

SEQ ID NO: 59744 - protein, 191 aa, Klebsiella pneumoniae
MSLIRPALVLFILLTLLTGGVYPLLTTSLGQWWFNSQANGSLIRLNGEVRGSALIGQNFTAAGYFQGRPSATAETTDNPMASGGSNLAASNPALDKAVSERVQALRAANPDADPRVPVELVTTSASGLDNNLTPAAALWQVPRVAQARQLSVEQVTQLVNQATQTPLLSFLGQPVVNILQLNMALDALKDK

SEQ ID NO: 59745 - protein, 895 aa, Klebsiella pneumoniae
MSDEPLRPDPDRLLQHTAAPHRGKLKVFFGACAGVGKTWAMLAEAQRLRAQGLDILIGVAETHGRKETAAMLQGLSTLPPRRLAHRGRYVYEFDLDAALARRPALILVDELAHSNAPGSRHPKRWQDVDELLEAGIDVFTTVNVQHLESLNDVVSGITGVQVRETVPDPFFDAADDVVLVDLPPDDLRQRLNEGKVYIGGQAERAIENFFRKGNLIALRELALRRTADRVDEQMRAWRDRQGQEKVWHTRDAILLCIGHNTGSEKLVRAAARLAARLGSVWHAVYVETPSLHRLPEGRRRAILAALRLAQELGAETATLSDPSEEKAVLHYAREHNLGKIVIGRQSKRRWWDRSGFADRLARHAPDLDLVVIALDEKPFPLAARASDSRPALEKWRLQLQGCAVAVALCAIITLVAMQWLMAFEAANLVMLYLLGVVLIALVYGRWPSVLATVINVISFDLFFVAPRGTLAVSDVQYLLTFGVMLTVGLLIGNLTAGVRYQARVARYRERRTRHLYEMSKALAVGRSQQDIATTSERFIASTFQARSQLLLPDAQGKLLPLTHQPGLTPWDDAIARWSFDKGQPAGAGTDTLPGVPYQILPLKSAARTWGLLVVEPENLRQLMIPEQQRLLETFTLLVASALERLTLTASEEQARLTSERESLRNSLLAALSHDLRTPLTVLFGQAEILTLDLASEGSKHAPQANEIRQHVLNTTRLVNNLLDMARIQSGGFNLHKEWLTLEEVVGSALRMLEPSLGGQHIQLDLPDPLQLVHVDGPLFERVLINLLENAHKYAGARASIGIRAEADARQLSLEVWDNGPGIPAGQEQTIFDKFARGNKESAIPGVGLGLAICQAIVDVHGGTISASNRPEGGASFRVTLPGETPPELEELPEEL

SEQ ID NO: 59746 - protein, 194 aa, Klebsiella pneumoniae
MFDRDAALDKAMTLFWQHGYEATSLADLVEATGAKAPTLYAEFVNKEGLFRAVLDRYISRFAAKHEAVLFAEGKSVDRALRDYFTAVATCFTSKETPAGCFIINTSAALAASSTDIANTIKSRHAMQEQALTQFLQQRQAQGELPAGRDVAQLAQFLNCVLQGMSISAREGADFDKLMQITDTTLRLWPQVLGS

SEQ ID NO: 59747 - protein, 296 aa, Klebsiella pneumoniae
IMWSWFVIAGLQLLLVIPLLWVAAWWSLRPIESLAKEVRELEEHHREKLNPNTTRELTRLVSNLNRLVRSERERYDKYRTTLTDLTHSLKTPLAVMQSTLRSLRGEKISVDEAEPVMLEQISRISQQIGYYLHRASMRSGGTLLSRELHPIAPLLDSLTSALNKVYQRKGVNISLDISPEITFVGEQNDFMEVMGNVLDNACKYCLEFVEVSVRQTTDSHLHILVEDDGPGIPQSQRRAVFDRGQRADTLRPGQGVGLSVAREIVEQYDGEIIAGESLLGGACMEVVFGRQQMEDK

SEQ ID NO: 59748 - protein, 321 aa, Klebsiella pneumoniae
MVMRNRFPVTLWLTLVALVAALALPARANTWPLPPPGSRLVGQNQFHMVQDDGGSLEAIAKKYNVGFLALLQANPGVDPYVPRAGSVLTIPLQTLLPDAPREGLVINLAELRLYYYPPGKNEVTVYPIGIGQLGGTTITPTMVTTVSDKRANPTWTPTANIRARYKAMGIELPAVVPAGPDNPMGHHAIRLAAYGGVYLLHGTNADFGIGMRVSSGCIRLRDNDIKALYNTISPGTKVNIINTPIKASVEPDGRRLVEVHQPLSEHIDDDPQTLPITLNAAMTAFKQAPQTDGTVMERAMNYRSGMPIDVTRHADPGPQSL

SEQ ID NO: 59749 - protein, 1148 aa, Klebsiella pneumoniae
MPEQYRYSLPVKAGDQRQLGELTGAACATLVAEMAERHNGPVVLVAPDMQNALRLNDEIRQFTDSMVMGLADWETLPYDSFSPHQDIISSRLATLYQLPTMQRGVLIVPVSTLMQRVCPHSFLHGHALVMKKGQRLSRDALRDQLEGAGYRHVDQVMEHGEYATRGALLDLFPMGSDQPYRLDFFDDEIDSLRLFDVDSQRTLEEVAAINLLPAHEFPTDQTAIELFRSQWRDRFEVKRDAEHIYQQVSKGTLPAGIEYWQPLFFSEPLPPLFSYFPASTLIVNTGDLEASAERFQNEARARFENRGVDPMRPLLPPELLWLRSDELFSELKKWPRVQLKTERLADKAANTNLGYQTLPDLAVQAQNKAPLDNLRRFLESFTGPVIFSVESEGRREALSEMLARIKVAPKHVLRLEEATGNGRYLMIGAAEHGFIDSQRGLALICESDLLGERVARRRQDSRRTINPDTLIRNLAELHIGQPVVHLEHGVGRYAGMTTLEAGGITGEYLMLTYANDAKLYVPVSSLHLISRYAGGAEENAPLHKLGGDAWTRARQKAAEKVRDVAAELLDIYAQRAAKAGFAFKHDREQYQLFCDGFPFETTPDQAQAINAVLSDMCQPLAMDRLVCGDVGFGKTEVAMRAAFLAVENHKQVAVLVPTTLLAQQHYDNFRDRFANWPVRIEMLSRFRSAKEQAQILEQAAEGKIDILIGTHKLLQSEVKLRDLGLLIVDEEHRFGVRHKERIKAMRADVDILTLTATPIPRTLNMAMSGMRDLSIIATPPARRLAVKTFVREYDALVVREAILRETLRGGQVYYLFNDVENIQKAADKLAELVPEARIAIGHGQMRERELERVMNDFHHQRFNVLVCTTIIETGIDIPTANTIIIERADHFGLAQLHQLRGRVGRSHHQAYAWLLTPHPKAMTTDAQKRLEAIASLEDLGAGFALATHDLEIRGAGELLGEDQSGQMETIGFSLYMELLENAVDALKAGREPSLEDLTSQQTEVELRMPSLLPDDFIPDVNTRLSFYKRIASAKNEQDLEEIKVELIDRFGRLPDAARNLLDIARLRQQAQKLGIRKLESNEKGGVIEFNEKNNVNPVWLIGLLQKQPQHFRLDGPTRLKFMQDLEERKTRMDWVRQFMRQLEENAVA

SEQ ID NO: 59750 - protein, 402 aa, Klebsiella pneumoniae
MDDMYQPAALFIGLRYMRGRAADRFGRFVSWLSTIGITLGVMALVTVLSVMNGFERELQNNILGLMPQAILSAKQGSVNPQQLPEREAKLNGVTRVAPITTGDVVLQSARSVAVGVMLGIDPAQNDPLTPYLVNVKQSDLQAGKYNVILGEQLAGQLGVNRGDKIRVMVPSASQFTPMGRVPSQRLFTVIGTFAANSEVDGYQMLTNIDDASRLMRYPLGNITGWRLWLDKPLQVDTLSQQTLPPGTQWQDWRERKGELFQAVRMEKNMMGLLLSLIVAVAAFNIITSLGMMVMEKQGEVAILQTQGLTPRQIMAVFMVQGASAGIVGALLGAVLGALLASQLNNLMPIIGAFLDGAALPVAIEPLQVIVIALVAMVLALLSTLYPSWRAAATQPAEALRYE

SEQ ID NO: 59751 - protein, 348 aa, Klebsiella pneumoniae
MKKWSRHLLAASALAIGMGAAHADDSKTLYFYNWTEYVPPGLLEQFTKETGIKVIYSTYESNETMYAKLKTYKDGAYDLVVPSTYFVDKMRKEGMLQKIDKSKLTNFSNLDPQMLNKPFDPNNDYSIPYIWGATAIGVNSEAIDPKTITSWADLWKPEYKSSLLLTDDAREVFQMALRKLGYSGNTTDPKEIEAAYNELKKLMPNVAAFNSDNPANPYMEGEVNLGMVWNGSAYVARQAGTPLEVIWPKEGGIFWMDSLSIPANAKNVDGALKLINFLLRPDVAKQVAETIGYPTPNLAARKMLSPAVANDKSLYPDAATIEKGEWQNDVGSASAIYEEYYQKLKAGR

SEQ ID NO: 59752 - protein, 233 aa, Klebsiella pneumoniae
MNKILLQCDNLCKRYQEGNVQTDVLHNVSFSIGEGEMMAIVGTSGSGKSTLLHLLGGLDTPTSGDVIFSGQPMSKLSTAARADLRNRELGFIYQFHHLLPDFSALENVAMPLLIGKKKPADIERQAKAMLQAVGLEHRSHHRPSELSGGERQRVAIARALVNKPRLVLADEPTGNLDARNADSIFQLLGELNVAQRTAFLVVTHDLQLAKRMSRQLEMRDGRLTADLTLMGAE

SEQ ID NO: 59753 - protein, 410 aa, Klebsiella pneumoniae
MDKLLERFLQYVSLDTQSKPGVRQVPSTEGQWKLLRLLQAQLEEMGLVKVTLSEKGTVMGTLPANVEGDIPAIGFISHVDTSPDFSGKNVNPQIVENYRGGDIALGIGDEVLSPVMFPVLHQLLGQTLITTDGKTLLGADDKAGIAEIMTALATLQAKNIPHGDIRVAFTPDEEVGKGAKHFDVEAFDARWAYTVDGGGVGELEFENFNAASVTIKIVGNNVHPGTAKGVMVNALSLAARIHAEVPADEAPETTEGYEGFYHLTSMKGSVDRAEMHYIIRDFDRKHFEARKRKMMEIAKKVGKGLHPDCYIELVIEDSYYNMHEQVIAHPHVVDIARQAMVDCDIEPQMKPIRGGTDGAQLSFMGLPCPNLFTGGYNYHGKHEFVTLEGMEKAVQVIVRIAELTAARKGH

SEQ ID NO: 59754 - protein, 533 aa, Klebsiella pneumoniae
MTQQATITDELAFSQPYGEQEKQILTPEAVEFLTELVSRFTPARNKLLAARLQQQQAIDDGQLPDFISETASIRNGDWTIRGIPADLQDRRVEITGPVERKMVINALNANVKVFMADFEDSLAPDWRKVIDGQINLRDAVNGTISYTNEAGKIYQLQPNPAVLVCRVRGLHLPEKHVTWRNEAIPGSLFDFALYFFHNYQALLAKGSGPYFYLPKTQAWQEAAWWNDVFSFTEDRFDLPRGTIKATLLIETLPAVFQMDEILHALRDHIVGLNCGRWDYIFSYIKTLKNHPDRVLPDRQVVTMDKPFLSAYSRLLIKTCHKRGAFAMGGMAAFIPSKDTERNRQVLSKVTADKELEANNGHDGTWIAHPGLADTAMAVFDRVLGDKPNQLSVTRSEDAPITAEQLLAPCEGERTEAGMRANIRVAVQYIEAWISGNGCVPIYGLMEDAATAEISRTSIWQWIHHQKTLNDGTPVTKALFRQWLAEELMVIQEELGEHRFSHGRFDDAARLMEQITTSDELIDFLTLPGYRLLA

SEQ ID NO: 59755 - protein, 439 aa, Klebsiella pneumoniae
MEHLHMKTRTQQIEELNKEWTNPRWEGITRPYSAEEVVKLRGSVNPECTLAQLGAAKLWRLLHGEAKKGYVNSLGALTGGQALQQAKAGIEAIYLSGWQVAADANLASSMYPDQSLYPANSVPAVVDRINNTFRRADQIQWSAGIEPNDPRFIDYFLPIVADAEAGFGGVLNAFELMKSMIEAGAAAVHFEDQLASVKKCGHMGGKVLVPTQEAIQKLVAARLAADVMGVPTLVIARTDADAADLITSDCDPYDREFITGDRTSEGFFRTHAGIEQAISRGLAYAPYADLVWCETSKPDLEQARRFAEAIHARFPGKLLAYNCSPSFNWKKNLDDKTIASFQQQLSDMGYKYQFITLAGIHSMWFNMFDLAHAYAQGEGMRHYVEKVQQPEFAAGPEGYTFVSHQQEVGTGYFDKVTTIIQGGTSSVTALTGSTEEDQF

SEQ ID NO: 59756 - protein, 276 aa, Klebsiella pneumoniae
MATTPIPAKRGRKPAAATAQQAGGQVQSLTRGLKLLEWIAESHSSVALTELAQQAGLPNSTTHRLLTTMQQLGFVRQVGELGHWAVGAHAFVVGSSFLQSRNLLAIVHPILRQLMEDSGETVNLAVLDQSDHQAIIIDQVQCTQLMRMSAPIGGKLPMHASGAGKAFLAQLSEEQVTSLLHRKGLHAYTHATLVSPLHLKEDLAQTRKRGYSFDDEEHALGLRCVAACIYDEHREPFAAISISGPISRMTDDRVTELGALVIKAAKEVTLAYGGVK

SEQ ID NO: 59757 - protein, 549 aa, Klebsiella pneumoniae
MKNINPTQTSAWQALQKHFDEMKDVTISELFAKDSDRFSKFSATFDDLMLVDFSKNRITEETLAKLQDLAKETDLAGAIKSMFSGEKINRTEDRAVLHVALRNRSNTPIVVDGKDVMPEVNAVLEKMKTFSEAIISGSWKGYTGKPITDVVNIGIGGSDLGPFMVTEALRPYKNHLNMHFVSNVDGTHIAEVLKNVNPETTLFLVASKTFTTQETMTNAHSARDWFLATAGDDKHVAKHFAALSTNAKAVGEFGIDTANMFEFWDWVGGRYSLWSAIGLSIILSVGFDNFVELLSGAHAMDKHFSTTPAEKNLPVLLALIGIWYNNFFGAETEAILPYDQYMHRFAAYFQQGNMESNGKYVDRNGHAVDYQTGPIIWGEPGTNGQHAFYQLIHQGTKMVPCDFIAPAITHNPLSDHHQKLLSNFFAQTEALAFGKSREVVEQEYRDQGKDPATLEHVVPFKVFEGNRPTNSILLREITPFSLGALIALYEHKIFTQGAILNIFTFDQWGVELGKQLANRILPELKDGSEVSSHDSSTNGLINRYKAWRA

SEQ ID NO: 59758 - protein, 543 aa, Klebsiella pneumoniae
MLTLLHLLSAVALLVWGTHIVRTGVMRVYGARLRTVLSSSVEKKPLAFCAGLGVTALVQSSNATTMLVTSFVAQDLVGLMPALVMVLGADVGTALMARVLTFDLSWLSPLLIFIGVIFFLGRKQTRAGQLGRVGIGLGLILLALELIVQAVHPITQANGVQVIFASLTGDIMLDALIGAVFAIISYSSLAAVLLTATLTAAGAISFPVALCLVIGANLGSGLLAMLNNSAANAAARRVALGSLLFKLVGSLIILPFVHPLAAAMHKLPLAESELVIYFHVFYNLLRCIAMVPFAGPMAKLCQRLIRDEPELDNHLKPKHLDPSALDTPALALANAARETLRIGDAMEQMLESLHKVMHGEPRQEKELRRMADDINVLYTAIKLYLARMPKDELAEEESRRWAEIIEMSLNLEQASDIVERMGSEIADKSLAARRAFSVEGLKELDALYDLLLSNLQLAMSVFFSSDVPSARRLRRSKHRFRILNRRYSHAHVDRLHQQNVQSIETSTLHLALLGDMKRLNSLFCSVAYSVMEQPDEDDERDDY

SEQ ID NO: 59759 - protein, 291 aa, Klebsiella pneumoniae
MLPDSSTRLNKYISESGICSRREADRFIEQGNVFINGKRATIGDQVKPGDLVKVNGRLIEPREADDLVLIALNKPVGIVSTTEDGERDNIVDFVNHSKRIFPIGRLDKDSQGLIFLTNHGDLVNKILRAGNDHEKEYLVTVDKPVTDEFIRGMGAGVPILGTVTKKCKVKKEAPFVFRITLVQGLNRQIRRMCEHFGYEVTKLERTRIMNVSLTGIPLGEWRDLTDDELIDLFKLIENSSSEAKPKARPKAKAATPGIKRPVVKMENSNDKGRPAGNGKRFTQPGRKKKGR

SEQ ID NO: 59760 - protein, 539 aa, Klebsiella pneumoniae
  MISC_FEATURE (5)..(5): X=any amino acid
LILTXRLNMTESFAQLFEESLKEIETRPGSIVRGVVVAIDKDVVLVDAGLKSESAIPAEQFKNAQGELEIQVGDEVDVALDAVEDGFGETLLSREKAKRHEAWITLEKAYEDAETVTGVINGKVKGGFTVELNGIRAFLPGSLVDVRPVRDTLHLEGKELEFKVIKLDQKRNNVVVSRRAVIESENSAERDQLLENLQEGMEVKGIVKNLTDYGAFVDLGGVDGLLHITDMAWKRVKHPSEIVNVGDEITVKVLKFDRERTRVSLGLKQLGEDPWVAIAKRYPEGTKLTGRVTNLTDYGCFVEIEEGVEGLVHVSEMDWTNKNIHPSKVVNVGDVVEVMVLDIDEERRRISLGLKQCKSNPWQQFAETHNKGDRVEGKIKSITDFGIFIGLDGGIDGLVHLSDISWNVAGEEAVREYKKGDEIAAVVLQVDAERERISLGVKQLAEDPFNNYVALNKKGAIVVGKVTAVDAKGATVELADGVEGYLRASEASRDRVEDATLVLSVGDEVEAKFTGVDRKNRVVSLSVRAKDEAEEKDAI

SEQ ID NO: 59761 - protein, 582 aa, Klebsiella pneumoniae
MQNDKDLSTWQTFRRLWPIIAPFKAGLIVAAVALVLNAGSDTFMLSLLKPLLDDGFGKTDRSVLLWMPLVVIGLMVLRGITSYISSYCISWVSGKVVMTMRRRLFGHMMGMPVAFFDKQSTGTLLSRITYDSEQVASSSSSALITVVREGASIIGLFVMMFYYSWQLSLILIVLAPIVSVAIRVVSKRFRNISKNMQNTMGQVTTSAEQMLKGHKEVLMFGGQEVETKRFDKVSNKMRLQGMKMVSASSISDPIIQLIASLALAFVLYAASFPSVMDTLTAGTITVVFSSMIALMRPLKSLTNVNAQFQRGMAACQTLFAILDSEQEKDEGTRVIERAKGNLKFENVTFTYPGREVAALRNINLDIPEGKTVALVGRSGSGKSTIASLITRFYDVDEGQILLDGHDLREYKLSSLRDQVALVSQNVHLFNDTVANNIAYARTEEYSREQIEEAARMAYAMDFINKMDNGLDTIIGENGVMLSGGQRQRIAIARALLRNSPILILDEATSALDTESERAIQAALDELQKNRTSLVIAHRLSTIEQADEIVVVEDGRIVERGTHHDLLEHKGVYAQLHKMQFGE

SEQ ID NO: 59762 - protein, 167 aa, Klebsiella pneumoniae; identical to SEQ ID NO: 56103

SEQ ID NO: 59763 - protein, 141 aa, Klebsiella pneumoniae
MAKPKYSPETKLAVVNHYLSGKDGEQSTADLFGIERTSVRRWVRAWQFHGAEGLTAKNNHYSDEFKLVVVRAVISDRLTMREAAARFNLSAEILVRRWLDVYNDAGAEGLLNMQCGRPGQMTKAKNIPTLTDKEWKNLPEE

SEQ ID NO: 59764 - protein, 277 aa, Klebsiella pneumoniae
MELLEEHRCFDGQQQRWRHHSPVLNCAMTFSIFLPPERETPPPVLYWLSGLTCNDENFTTKAGAQRIAAELGIALVMPDTSPRGDEAANDDGYDLGQGAGFYLNATEAPWAAHYRMYDYLRDELPALIRSEFSVGERCAVSGHSMGGHGALIMALKNPGRYASVSAFAPIVNPSQVPWGKKAFTAYLGADESAWHSWDSCALMQASRPEDAVPTLIDQGDNDPFLAGQLQPAVLAEVARQKAWPLTLRIQPGYDHSYYFIASFIEDHLRFHAQHLFG

SEQ ID NO: 59765 - protein, 496 aa, Klebsiella pneumoniae
EYLLEMSNINKSFPGVKALDNVNLKVRPHSIHALMGENGAGKSTLLKCLFGIYQKDSGSILFQGKEIDFHSAKEALENGISMVHQELNLVLQRSVMDNMWLGRYPTKGMFVDQDKMYRDTKAIFDELDIDIDPRARVGTLSVSQMQMIEIAKAFSYDAKIVIMDEPTSSLTEKEVNHLFKIIRKLKDRGCGIVYISHKMEEIFQLCDEITILRDGQWIATQPLEGLDMDKIIAMMFGRSLNQRFPDRENTPGEVILQVRNLTSLRQPSIRDVSFDLHKGEILGIAGLVGAKRTDIVETLFGIREKASGTITLHGKKINNHSANEAINHGFALVTEERRSTGIYAYLDIGFNSLISNIKKYKNSIGLLDNSRMKSDTQWVIDSMRVKTPGQHTQIGSLSGGNQQKVIIGRWLLTQPEILMLDEPTRGIDVGAKFEIYQLIAELAKKDKGIIIISSEMPELLGITDRILVMSNGLVAGIVETKTTTQNEILRLASLHL

SEQ ID NO: 59766 - protein, 284 aa, Klebsiella pneumoniae
MKYVGAHVSASGGLANAAIRAAEIEATAFALFTKNQRQWRAAPLSDETIAEFKAACEKYHFGPGQILPHDSYLINLGHPVEEALEKSRDAFIDEMTRCQQLGLTLLNFHPGSHLQQIPEEECLARIAESINIALAKTEGVTAVIENTAGQGSNLGFKFEHLAAIIDGVEDKSRVGVCIDTCHAFAAGYDLRSAEACEKTFAAFERIVGFQYLRGMHLNDAKSAFGSRVDRHHSLGEGNIGHDCFSWIMQDSRFDGIPLILETINPDIWAEEIAWLRAQQIAEVA

SEQ ID NO: 59767 - protein, 564 aa, Klebsiella pneumoniae
MKTLLIIDAGLGQARAYMAKTLLGAAAPKAHLELIDNPNDAELAIVLGTALPADSALNGKNVYLGDINRAVAHPELFLGEAKDHAKSYVAPAAVAVPAAAQGQKRIVAVTACPTGVAHTFMAAEAIETEAKKRGWWVKVETRGSVGAGNAITPEEVAEADLVIVAADIEVDLAKFAGKPMYRTTTGLALKKTAQELDKAVAEAKPYQPSGKPQAAAEGKKESAGAYRHLLTGVSYMLPMVVAGGLCIALSFAFGIKAFEVKDTLAAALMQIGGGSAFALMVPVLAGFIAFSIADRPGLTPGLIGGMLAVSGGSGFIGGIIAGFLAGYVAKAISTKLKLPQSMEALKPILIIPLVSSLIVGLAMIYLIGKPVAGILAWLTHWLQTMGTANAVLLGAILGAMMCTDMGGPVNKAAYAFGVGLLSTQTYAPMAAIMAAGMVPPLAMGIATLVARNKFDKGQREGGKAALVLGLCFISEGAIPFAARDPMRVLPCCIVGGAVTGAISMAVGAKLMAPHGGLFVLLIPGAITPVLGYLLAIVAGTLVAGLAYAVLKRPEAQTAEVEKAA

SEQ ID NO: 59768 - protein, 315 aa, Klebsiella pneumoniae
MPSGAEFTRDERQLNQHENPNDAMSDDNSHSSDTVNSKKGFFSLLLSQLFHGEPKNRDELLALIRDSGQNDLIDEDTRDMLEGVMDIADQRVRDIMIPRSQMITLKRNQTLDECLDVIIESAHSRFPVISEDKDHIEGILMAKDLLPFMRSDAEAFSMEKVLRPAVVVPESKRVDRMLKEFRSQRYHMAIVIDEFGGVSGLVTIEDILELIVGEIEDEYDEEEDIDFRQLSRHTWTVRALASIEDFNEAFDTHFSDEEVDTIGGLVMQAFGHLPARGESIDIDGYQFKVAMADSRRIIQVHVKLPDDAPQPKLEE

SEQ ID NO: 59769 - protein, 858 aa, Klebsiella pneumoniae
MQEQYRPEEIESKVQLHWDENRTFEVTEDESKEKYYCLSMLPYPSGRLHMGHVRNYTIGDVIARYQRMLGKNVLQPIGWDAFGLPAEGAAVKNNTAPAPWTYDNIAYMKNQLKMLGFGYDWSRELATCTPEYYRWEQKFFTELYKKGLVYKKTSAVNWCPNDQTVLANEQVIDGCCWRCDTKVERKEIPQWFIKITAYADELLNDLDKLDHWPDTVKTMQRNWIGRSEGVEISFDVNDYADKLTVYTTRPDTFMGCTYLAVAAGHPLAQQAAANNPALAAFIDECRNTKVAEADMATMEKKGVDTGFKAIHPLTGEEIPVWAANLCLMEYGTGAVMAVPGHDQRDYEFASKYGLNIKPVILAADGSEPDLSEQALTEKGVLFNSGEFSGLDYEAGFNAIADKLAAMGVGERKVNYRLRDWGVSRQRYWGAPIPMVTLEDGTVLPTPEDQLPVILPEDVVMDGITSPIKADPEWAKTTVNGQPALRETDTFDTFMESSWYYARYTCPQYQEGMLDSKAANYWLPVDIYIGGIEHAIMHLLYFRFFHKLMRDAGMVNSDEPAKQLLCQGMVLADAFYYVGENGERNWVSPVDAIVERDEKGRIVKAKDAAGHELVYTGMSKMSKSKNNGIDPQVMVERYGADTVRLFMMFASPADMTLEWQESGVEGANRFLKRVWKLVYEHTTKGEVAALNVAALSEDQKALRRDIHKTIAKVTDDIGRRQTFNTAIAAIMELMNKLAKAPQEDEQDRALMQEALLAVVRMLNPFTPHASFTLWRELNGEGDIDNAPWPVADESAMVEDSTLVVVQVNGKVRGKITVAVDATEEQVRERAGQEHLVAKYLDGKTVRKVIYVPGKLLNLV

SEQ ID NO: 59770 - protein, 321 aa, Klebsiella pneumoniae
MSKPIVMERGVKYRDADKMALIPVKNVATEREALLRKPEWMKIKLPADSSRIQGIKAAMRKNGLHSVCEEASCPNLAECFNHGTATFMILGAICTRRCPFCDVAHGRPVAPDANEPQKLAQTIADMGLRYVVVTSVDRDDLRDGGAQHFADCISAIREKNPSIKIETLVPDFRGRMDRALDILTVTPPDVFNHNLENVPRLYRQVRPGADYNWSLKLLERFKEAHPEIPTKSGLMVGLGETNDEIIEVMRDLRRHGVTMLTLGQYLQPSRHHLPVQRYVSPEEFEEMKAEAMAMGFTHAACGPFVRSSYHADLQAKGMEVK

SEQ ID NO: 59771 - protein, 298 aa, Klebsiella pneumoniae
MFRILRNIDLNLLTIFEAVYVHKGIVNAAKILNITPSAISQSINKLRALFPDPLFIRKGQGVTPTAYATHLHQYISRGMEAFLSALDITGSPHQQRVITIATTPAMGALLMPGLASALKPTFPQILLHNIAIVDAARQLDQRQVDLLIDTHLHSGQAISHHVLYQDRVQMYCRAGHPALDGPQDETTLAEYEFALLLPEGQRYPTLHRRLQEEMGERRCGFSTFNLMTQAAMIAGSDMLGLTTERLFAMVSRLWPLQTLDFPSLGEEQIDVALHFNKLSGKEPLLKEIIETVIRSFKA

SEQ ID NO: 59772 - protein, 155 aa, Klebsiella pneumoniae
MKLQLVAVGTKMPDWVQTGFSEYLRRFPKDMPFELVEIPAGKRGKNADIKRILEKEGEMMLAAAGKNRIVTLDIPGKPWDTPQLARELERWKQDGRDVSLLVGGPEGLSPACKAAAEQSWSLSTLTLPHPLVRVLVAESLYRAWSITTNHPYHRE

SEQ ID NO: 59773 - protein, 391 aa, Klebsiella pneumoniae
MTIHVTDVAIVGGGMVGGALALGLAQQGFTVTVLEKAAPPAFDPASAPDVRISAISAASVGLLKSLGVWDAIRAMRVHAYRRLETWEWESAHVAFDAAELKLPELGYMVENKVLQWGLWQALAAHEAVTLRVGSELKTMQRGETQTALHLREGETIHARLVIGADGANSQVREMAGIGVHAWQYQQSCMLISVECADDPGDSTWQQFTPSGPRAFLPLFDHWASLVWYDAPARIRQLQSMTMAQLQQEIASHFPARLGRVTPQAAGAFPLTRRHALQYVQPGLALVGDAAHTIHPLAGQGVNLGYRDVDALLEILAEARGRGEDWASLPVLKRYQARRRADNFIMQSGMDLFYAGFSNDLAPVRMLRNIGLMAAERAGGLKRQALKYALGL

SEQ ID NO: 59774 - protein, 303 aa, Klebsiella pneumoniae
MQLRKLATAMLVMGMTAGLAQAEDAAPAAGQNTLDKIAKNGVIVVGHRESSVPFSYYDNQQKVVGYSQDYSNAIVDAIKKKLNKPDLQVKLIPVTSQNRIPLLQNGTFDFECGSTTNNLERQKQAAFSDTIFVVGTRLLVKKGGPIKDFPDLKDKAVVVTSGTTSEILLHKLNDEKKMNMRIISAKDHGDSFRTLESGRAVAFMMDDALLAGERAKAKKPDNWEIVGTPQSKEAYGCMLRKDDPTFKALVDETVAQAQTSGEAEKWFDKWFKNPIPPKNLNLNFELSDDMKALFKSPNDKALN

SEQ ID NO: 59775 - protein, 512 aa, Klebsiella pneumoniae
MVFASLLERQRIRLLLALLFGASGTLAFSPYDFWPAAIVSLIGLQALTLNRRPLQSAGIGYFWGLGLFGTGINWVYVSIAQFGGMPGPVNVFLVVLLAAYLSLYTGLFAGLLARLWPKTNWIRMAIAAPVVWQITEFLRGWVLTGFPWLQFGYSQIDGPLKGLAPVMGVEAINFLLMVVSGLLALALVQRNWKPLAIAALLFALPFPLRYIQWYQLLPARATQVSLVQGDIPQAMKWDEKQLVNTLKTYLALTQPHIGHSQLIIWPESAIPDLEINQQQFLSMMDDLLRAKDSSLITGIVDARLNKQNRYDTYNTIITLGKDNPYRYDSTNRYNKNHLVPFGEFVPLESILRPLAPFFDLPMSSFSRGPYVQPQLMAHNLKLTAAICYEIILGEQVRDNFRPDTDFLLTISNDAWFGKSIGPWQHFQMARMRALELARPLLRSTNNGITAVIGPRGEIQKMIPQFTREVLTTTVTPTSGLTPYARTGNWPLWALTALFGFAALLMSLRQRRR

SEQ ID NO: 59776 - protein, 301 aa, Klebsiella pneumoniae
MRIFLTGASGFIGSRILPALQASGHQVIGLARSESTAQALKAAGAEVHRGTLDAPESLLAGVGNADAVIHTAFDHDFSRFAANCEKDRQAILALGQALRGSTRPLVITSGTLMGDDGSGAPARESFFNSGHSSPRTASELAGQQLLEAGVDVRVVRLPQVHDTVRQGLLTCYIERAIANGAVALRGEGSNRWSAAHVDDVARLYVSALLQGAAGERYHAVAEEGIALRDIAAVIAHGLNLPLTHLDESQVDAWFGWFAPFTALDLRASSAWTRERLQWQPVGPGLLEDLQNMDYHKVTLSQ

SEQ ID NO: 59777 - protein, 773 aa, Klebsiella pneumoniae
MEQHAGDFSVTVRDVRQLTQPESDLLTLLWVLEGSVNLAVAEGASQPLVADGLAIVNRNRRWSLRSAGANAVMILTLSASWLARLDNAFFAVDYQITPRTRDADDGLRRLMRQLLVSGLVNHPGHYRLEANRWLSEIALLLATRFSQPIASTPRRDTEKWSRRIASVVARIDANYQRRLSLQEVAAAEFVSEAWLSRLFRKEVGVSFVQYLTALRLRHAADQLLTTRKTVQQIAREQGFASTRMMSDLFKRQHGVTPRQYREQHPLELARPRPPQADRWQPVAADRLYARLNEPEPRDRESPPLPINPPQTREINLRDRPARPAALRHTRMVVTVRELDDLLREDVRRELEQLHHALPVYAIDINDPFLSSRLFGTGWDDPQMAGYACWYNLQQIFSWLAEMGWQVILHTGVTTRSDLLQRFLQLAANHFPPATLNSWRFVWHWSPQASEAARQAAWRQQRGVLHRLLPQPQLGIWHRFAPSDPGNDPLFHSPLLAEADFLACQADANEQLDLAQADSSRLASSEHYPLHKLRQIHSALRQRQLNLPLWLLSWNTLTGDTRDTNGRFFRGALLMDNLLGVADQVWLAGFWLNSGLQGEARANGKLDTSSLALHYLHGLPRPVYWVLWLWRRLRGEILVHDKNLLLLHHQGHYQLLLRNTVVYNPWLSSEAAFIQRFSQLYSVRLQGLDGSWRIKQHLFDQHHGALFPLVDAFRSRSGPDAEDYQWLMHQARPALSVDEARLDGYWLRIDSLQSNALVLYEFTPQLSSGADPAP

SEQ ID NO: 59778 - protein, 530 aa, Klebsiella pneumoniae
MLVSSNVTMQFGSKPLFENISVKFGGGNRYGLIGANGSGKSTFMKILGGDLEPTLGNVSLDPNERIGKLRQDQFAFEAFTVLDTVIMGHGELWEVKQERDRIYALAEMSEEDGYKVADLEVKYGEMDGYSAEARAGELLLGVGIPVEQHYGPMSEVAPGWKLRVLLAQALFSNPDILLLDEPTNNLDIDTIRWLEQTLNDRDSTMIIISHDRHFLNMVCTHMADLDYGELRVYPGNYDEYMTAATQARERLLADNAKKKAQIADLQSFVSRFSANASKSRQATSRARQIDKIKLEEVKASSRQNPFIRFEQDKKLFRNALEVEALTKGFDEGPLFKNVNLLLEVGEKIAILGANGVGKSTMLKTLVGELQPDNGSVKWSENAQIGYYAQDHEYEFENDLTVFEWMSQWKQEGDDEQAVRSILGRLLFSQDDIKKPAKVLSGGEKGRMLFGKLMMQKPNILVMDEPTNHLDMESIESLNMALEMYQGTLIFVSHDREFVSSLATRVLEITPDRVIDFSGNYEDYLRSKGIE

SEQ ID NO: 59779 - protein, 251 aa, Klebsiella pneumoniae
MTVELSDEEMLRYNRQIVLRGFDFDGQERLKAARVLVVGLGGLGCAAAQYLAAAGVGQLTLLDFDTVSLSNLQRQTLHSDATLGQPKVDSAREALARINPHVRLVPLNALLDETALAAQIADHDLVLDCTDNVAIRNQLNVGCFQHKTPLVSGAAIRMEGQISVFTYQDGEPCYRCLSRLFGENALTCVEAGVMAPLVGTIGSLQAMEAIKLLSGYGTPASGKIVIYDAMTCQFREMRLMRHPQCEVCGSH

SEQ ID NO: 59780 - protein, 411 aa, Klebsiella pneumoniae
MDFTAGLMPLDTALAQMLDRITPLNATETVPLLQAISRVTAHDIVSPLDVPGFDNAAMDGYAVRLNDLRDGAALPVAGKAFAGQPFNDAWPSGTCIRIMTGAPVPEGCDAVVMQEETEQTEAGVRFIAPVKAGQHIRRRGEDIAHGAVVFPAGTPLTVAELPVLASLGIAEVEVVRKVRVAVFSTGDELQLPGQPLGDGQIYDTNRLAVHLMLQQLGYEVINLGIIPDDPAKLRDAFIDADQQADVVISSGGVSVGEADYTKTILEELGEIGFWKLAIKPGKPFAFGKLSSSWFCGLPGNPVSATVTFCQLVQPLLAKLSGKHGPLQAPRLRVRAATRLKKSPGRLDFQRGILQRNPDGELVVNTTGHQGSHIFSSFSLGNCFIVLERERGHVEAGEWVEVEPFSHLFGGL

SEQ ID NO: 59781 - protein, 271 aa, Klebsiella pneumoniae
MTVKVIVTDMDGTFLNDAKQYDRPRFLAQLRQLRQQGIEFVVASGNQYYQLISFFPEIREQISFVAENGALVYEHGKQLFHGELTRHESQVVIGELLKDPQLNFVACGLQSAYVSDKAPDAFVELMSKHYHRLQRVSDYHAIDDTLFKFSLNLPDSEIPQLIDKLHVSLDGIMKPVTSGFGFVDLIIPGLHKANGISRLLKRWDLSPQQCVAIGDSGNDAEMLKLVKYAFAMGNAADSIKAIAGYATDDNNHDGALNVIQAVLDNTPPFNA

SEQ ID NO: 59782 - protein, 810 aa, Klebsiella pneumoniae
MTTLKLNTLSARIQAHKMALVHIVKPPVCTERARHYTEMYQRHLDKPIPVRRALALAHHLAERTIWIKHDELIVGNQASEVRAAPIFPEYTVSWIEKEIDDLADRPGAGFSVSEENKRVLHEVCPWWRGQTVQDRCYGMFTDEQKALLATGIIKAEGNMTSGDAHLAVNYPLLLEKGLDGMRAKVAERRSRINLTVLEDLHGEQFLKAIDIVLEAVSDHSKRFAALAREMATAESRESRRHELLTIAENCDVIAHEPPKTFWQALQLCYFIQLILQIESNGHSVSFGRMDQYLYPYYRRDVELQQSLDREQAIELLHSCWLKLLEVNKIRSGSHSKASAGSPLYQNVTIGGQNLVDGKPQDAVNPLSYAILESCGRLRSTQPNLSVRYHAGMSNDFLDACVQVIRCGFGMPAFNNDEIVIPEFIKLGIEPQDAYDYAAIGCIETAVGGKWGYRCTGMSFINFARVMLATLEGGRDATSGQVFLPQEHALSKGNFAIFDQVLADWDRQIRYYTRKSIEIEYVVDTMLEENVHDILCSALVDDCIERAKSIKQGGAKYDWVSGLQVGIANLGNSLAAVKKLVFDQGAIGQQELAKALAEDFDGLTHEQLRQRLINGAPKYGNDDDSVDQLLARAYQTYIDELKQYHNPRYGRGPIGGNYYAGTSSISANVPFGAQTMATPDGRKAHTPLAEGASPASGTDHLGPTAVISSVGKLPTGAILGGVLLNQKLNPSTLENESDKQKLMVLLRTFFEVHKGWHIQYNIVSRDTLLEAKKHPDQYRDLVVRVAGYSAFFTALSPDTQDDIIARTEHTL

SEQ ID NO: 59783 - protein, 303 aa, Klebsiella pneumoniae
MRLLNWRRQAALNAMPGIRPGEIHTPWHEFWRRFRRQPVAMGAGIFVLLLIAVAIVAPWIAPYDAENYFDYDRLNEGPSLVHWFGVDSLGRDIFSRVLVGAQISLAAGVLAVLIGAAIGTVLGLLAGYYEGWWDRLIMRLCDVLFAFPGILLAIAVVAVMGSGMANVIIAVAIFSIPAFARLVRGNTLVLKQQTFIESARSIGASDATILFNHILPGTVSSIVVYFTMRIGVSIISAASLSFLGLGAQPPTPEWGAMLNEARADMVMSPHVALFPAVAIFVTVLAFNLLGDGLRDALDPKLKG

SEQ ID NO: 59784 - protein, 441 aa, Klebsiella pneumoniae
MSNVTHQPKIGFVSLGCPKNLVDSERILTELRTEGYDVVPTYDNADMVIVNTCGFIDSAVQESLEAIGEALKENGKVIVTGCLGAKEDQIREVHPKVLEITGPHSYEQVLEHVHHYTPKPKHNPFLSLVPEQGVKLTPRHYAYLKISEGCNHRCTFCIIPSMRGDLVSRPIGEVLAEAKRLADAGVKELLVISQDTSAYGVDVKHRTGFHNGMPVKTSMVSLCEELAKLGIWVRLHYVYPYPHVDDVIPLMAEGKILPYLDIPLQHASPRILKLMKRPGSADRQLARIKQWREICPDLTLRSTFIVGFPGETEEDFQMLLDFLKEARLDRVGCFKYSPVEGATANELADQVPEEVKEERWNRFMQLQQQISAERLQEKVGREILVLVDEVDEEGAIGRSMADAPEIDGAVYLNGETRVKPGDVVRVKVEHADEYDLWGTRV

SEQ ID NO: 59785 - protein, 132 aa, Klebsiella pneumoniae
MTTTDLAPKGEMVLRTLAMPADTNANGDIFGGWLMSQMDIGGAIMAKEIAQGRVVTVRVDGMTFLRPVAVGDVVCCYARCVKRGNTSVTINIEVWVKKVSSEPIGQRYKATEALFIYVAVDNQGKPRPLPAE

SEQ ID NO: 59786 - protein, 321 aa, Klebsiella pneumoniae
MEHFLALTLAGRLPHHFHGETAHFRWHWLGEGILELTPHARCERGLVLSCAIHGNETAPVEIVDQLVQRLVREALPLRWRLLVIVGNPPALRANKRYLHSDMNRMFGERWRQFPLSEETQRAQRLEQAVARFYRDHDGPRWHLDLHTAIRGSLHPRFGVLPARDTPWEEDFLHWLGGAGLEALVFHRQPGGTFTHFSCERFAALACTLELGKALPLGENDLTQFAAVQRAFSRLLVGDLAIADAPAPLRYRVVQQLTRHSDDFRLHMADQTLNFTPFEPGTLLAEEGETRYVVGPEPEYVLFPNPKVAKGLRAGLMLEKLS

SEQ ID NO: 59787 - protein, 492 aa, Klebsiella pneumoniae
MSLWINGEWRPGRGPGFSKQDPVNLKVVWQGEAADAGQVAEAVAAARQAFPSWARLPFAARQAIVEKFAALLEASKAELTAVIGAETGKPRWEAAGEVTAMINKVAISVKAYHVRTGEQHSDLPDGAATLRHRPHGVLAVFGPYNFPGHLPNGHIVPALLAGNTVVFKPSELTPRSGEAVVKLWQQAGLPAGVLNLVQGGRETGEALSGQADIDGLLFTGSSTTGFHLHRQLAGQPQKILALEMGGNNPLIVDDPRDVDAAVHLTIQSAFITAGQRCTCARRLLVRRGEAGDVFLSRLVTVSQRLIPAAWDAEPQPFLGGLISEQAAQKVHQAWLQRVAAGAVTLLEPRLLQAGTSLLTPGIVDMSDVANVEDEEVFGPLLGVWRYDTFEEAIALANATRFGLSCGLISPEREKFDRLLLEARAGIVNWNKPLTGAASTAPFGGTGASGNHRPGAWYAADYCAWPMASLESPTLTLPASLSPGLDFLAGEAS

SEQ ID NO: 59788 - protein, 752 aa, Klebsiella pneumoniae
MSDKHPNPHQQQAPVHDSEEAQPGLDSLAPDDREWRPTPKPTAPGVEPTAPGSLKAPDTHNSKLDSLEAQRKGGEDFPLTTNQGVRIADDQNSLRAGSRGPTLLEDFILREKITHFDHERIPERIVHARGSAAHGYFQPYKSLAALTKADFLSSADKITPVFVRFSTVQGGAGSADTVRDIRGFATKFYTDEGIFDLVGNNTPVFFIQDAMKFPDFVHAVKPEPHWAIPQGQSAHDTFWDYVSLQPETLHNVMWAMSDRGIPRSYRTMEGFGIHTFRLINAEGKATFVRFHWKPVAGKASLVWDEAQKLTGRDPDFHRRDLWEAIEAGDYPEFELGLQLIPEENEFAFDFDLLDPTKLIPEALVPVQRVGRMVLNRNPDNFFAENEQAAFHPGHIVPGIDFSNDPLLQGRLFSYTDTQISRLGGPNFHEIPINRPTCPYHNFQRDGMHRMDIDTNPANYEPNSINDNWPRETPPAAKRGGFESLAERVDGEKIRQRSPSFGEYYAQPRLFWMSQTPIEQQHIIDGFSFELSKVVRTWIRERVVDHLAHIDTKLAEAVGANLGIELSDDQRNITLPAPVNGVEKDPSLSLYADAEGDVKGRVVAVLLNERTSAQDLVQLLQALQAQGVHSKLLYSRMGEVIADDGSPLPIAGTFAGSPSLTVDAVVVPGGDLSALSQSGDARYYLLEAYKHLKPILLAGDARQLTSVLHVPTQGEEGVIVTDALDTPAADKLLALMTAHRVWSRSPKIAAIPA

SEQ ID NO: 59789 - protein, 406 aa, Klebsiella pneumoniae
MSQSITRNHFDEWMMPVYAPAAFIPVRGAGSRLWDQQGKEYIDFAGGIAVNALGHAHPRLVQALTDQAGKFWHTGNGYTNEPILRLAKMLIDATFADRVFFCNSGAEANEAALKLARKYAHDRFGSEKSGIVAFQNAFHGRTLFTVSAGGQPAYSRDFAPLPPQIQHAVFNDLESAKALINDQTCAVIVEPVQGEGGVVPASVEFLRGLRQLCDQHNALLIFDEVQTGVGRTGELYAYMHYGVTPDVLTTAKALGGGFPIGALLATEACASVMTVGTHGTTYGGNPLAGAVAGELLSIVNTPEVLSGVRQRHQWFCERLQAINARYGLFKEIRGLGLLLGCVLNDAWAGKAKTLSNLAAEEGVMILIAGANVVRFAPALNVSEEEVNSGLDRVERACARFVAGVSS

SEQ ID NO: 59790 - protein, 275 aa, Klebsiella pneumoniae
MTLQQEIIQALGAKPQIDVAGEIRRSVDFLKSYLQTYPFIKSLVLGISGGQDSTLTGKLCQIAINELRAETGDSSLQFIAVRLPYGVQADEQDCQDAIAFIQPDRVLTVNIKAAVLASEQALREAGIELSDFVRGNEKARERMKAQYSIAGMTKGVVVGTDHAAEAITGFFTKYGDGGTDINPIFRLNKRQGKQLLAHLGCPEHLYKKLPTADLEDDRPSLPDEVALGVTYENIDDYLEGKTLDPSIAKTIEGWYLKTEHKRRPPITVFDDFWKK

SEQ ID NO: 59791 - protein, 160 aa, Klebsiella pneumoniae
MKKLTALFVASTLALGAANLAHAADTTTAPSDSKPMMMHHKGGPGQHDMMFKGLNLTDAQKQQIRDIMKSQRENMKRPSLEERRAMHDLIASDTFDKAKAEAQIDKMEAQHKAMALSRLETQNKIYNILTPEQKKQFNANFEKHLTERNAPAGKMPAPAE

SEQ ID NO: 59792 - protein, 228 aa, Klebsiella pneumoniae
MLYGFSQVILQGALVTLELALSSVVLAVLIGLAGAGAKLSSNRPLALVFEGYTTLIRGVPDLVLMLLIFYGLQIALNSVTDALGMAQFDIDPMIAGIITLGLSYGAYFTETFRGAYLAVPKGHIEAATAFGFSGGQTFRRILFPAMMRYALPGIGNNWQVILKATALVSLLGLEDVVKATQLAGKSTWQPFYFAIVCGLIYLVFTTVSNGVLLLLERRYTVGVKRADL

SEQ ID NO: 59793 - protein, 102 aa, Klebsiella pneumoniae
MHLQRKSTMSKCSADETPVCCCMDVGTIVDNTDCTASYSRVFANRAEAEQTLAALSEKARNVESEPCQINPTFTDVDGGVQLDIDFVFSCEAESLIFQLGLR

SEQ ID NO: 59794 - protein, 440 aa, Klebsiella pneumoniae
QGSVMSQALPLITRQGDRIAIVTGLRTPFARQATAFHGVPAIDLGKMVVGEMLARSDIPAEVIEQLVFGQVVQMPEAPNIAREIVLGTGMSVHTDAYSVSRACATSFQAVANVAESLMAGTIRAGIAGGADSSSVLPIGVSKTLARTLVDANKARTLSQKLKLFSRLRPRDLLPVPPAVAEYSTGLRMGDTAEQMAKSWGISREQQDALAHRSHQLAAKAWEEGKLSAEVMTAYAPPFREPLEQDNNIRKNSTLADYQKLRPAFDRKHGTVTAANSTPLTDGAAAVILMTESRAKELGLRPLGYLRSYAFTAIDVWQDMLLGPAWSTPLALERAGLTLADLTLIDMHEAFAAQTLANLQCLASDRLAREVLGRSQATGEVDESKFNVLGGSIAYGHPFAATGARMITQTLHELRRRGGGFGLVTACAAGGLGAAMIVEAE

SEQ ID NO: 59795 - protein, 714 aa, Klebsiella pneumoniae
MDTVSAFKLEVRADKIAVITIDAPGEKMNTLKAEFGSQVRGLIRQLRDDKSVRGVVFISAKADNFIAGADINMIARCRSAQEAEALARQGQQIMAEIHGLSIPVIAAIHGACLGGGLELALACHGRICSDDEKTRLGLPEVQLGLLPGSGGTQRLPRLIGVSTALDMMLTGKQLRPRQALKAGLVDEVVPQAILLQAAVELALKGRPTSREVPVRERVLAGPLGRHLLFQFVGKQTQRKTQGNYPAVKRILQVVENGLAHGCSSGYAEEARAFGELAMSPQSQALRSIFFASTDLKKDPGAEAGPGPLRSVAVLGGGLMGGGIAYVTACKGGLPVRIKDIQPRGINHALKYSWDLLNKQVRQRRLRPVERDRQMALISGTTDYQGFAHRDVVIEAVFEDLALKQRMVSEVEQYGGPQTIFASNTSSLPIGDIAAHASRPGQVIGLHFFSPVEKMPLVEVIPHKGTDPQTIATVVQLAKRQGKTPIVVADKAGFYVNRILAPYINEAMRLLVEGEPIEVIDNALVKFGFPVGPIQLLDEVGIDTGTKIIPVLESAFGERFSPPANIIDAILKDDRKGRKNNRGFYLYETKGRKSKKRPDPAVYPLLGIGRPQSRLSAQQVAERCVMMMLNEAARCFDEQIIRSARDGDIGAVFGIGFPPFLGGPFRYMDTIGAGEVAAILQRLAAQFGPRFTPCDTLLRMAEQGTTFWPADERLT

SEQ ID NO: 59796 - protein, 306 aa, Klebsiella pneumoniae
MSWIERIKSNITPTRKASIPEGVWTKCDSCGQVLYRAELERNLEVCPKCDHHMRMSARNRLHSLLDEGSLVELGSELEPKDVLKFRDSKKYKDRLASAQKETGEKDALVVMKGTLYAMPVVAAAFEFSFMGGSMGSVVGARFVRAVEQALEDNCPLICFSASGGARMQEALMSLMQMAKTSAALAKMQERGLPYISVLTDPTMGGVSASFAMLGDLNIAEPKALIGFAGPRVIEQTVREKLPPGFQRSEFLIEKGAIDMIVRRPEMRLKLASILAKLMNLPAPVAVSEAPHEGVVVPPAPDQEPEA

SEQ ID NO: 59797 - protein, 361 aa, Klebsiella pneumoniae
MAGNTIGQLFRVTTFGESHGLALGCIVDGVPPGIPLTEADLQHDLDRRRPGTSRYTTQRREPDQVKILSGVFEGVTTGTSIGLLIENTDQRSQDYGAIKDLFRPGHADYTYEQKYGLRDYRGGGRSSARETAMRVAAGAIAKKYLAAKFGIVIRGCLTQMGDIPLAIKDWDQVEQNPFFCPDPDKIDALDELMRGLKKEGDSIGAKVTVVADGVPPGLGEPVFDRLDADIAHALMSINAVKGVEIGDGFEVVKLRGSENRDEITKAGFQSNHAGGILGGISSGQQIVANIALKPTSSITVPGHTINRFGEEVEMITKGRHDPCVGIRAVPIAEAMLAIVLMDHFMRQRAQNGDVTTTIPRW

SEQ ID NO: 59798 - protein, 297 aa, Klebsiella pneumoniae; identical to SEQ ID NO: 43422

SEQ ID NO: 59799 - protein, 378 aa, Klebsiella pneumoniae
MKILVDENMPYARELFSRLGDVQAIPGRPVPADALTDADALMVRSVTRVNEALLAGKAIKFVGTATAGTDHVDQAWLQQAGIGFSAAPGCNAIAVVEYVFSSLLMLAERDGFALRDRTVGIVGVGNVGGRLQKRLEALGIKTLLCDPPRADRGDEGDFRSLEALVQEADVITFHTPLYKEGQYKTLHLADEALISRLKPGTILINACRGPVVDNAALLKRLEAGQSLSVVLDVWEPEPDLNVELLKRVDIGTAHIAGYTLEGKARGTTQVFEAYSAFIGHPQQVALDTLLPAPEFGRITLHGPLDQPTLKRLVHLVYDVRRDDAPLRKVAGVAGEFDKLRKNYQERREWSSLYVQCSDEQAATLLRQLGFNAVHHPVR

SEQ ID NO: 59800 - protein, 337 aa, Klebsiella pneumoniae
MSEGWNIAVLGATGAVGEALLETLAERQFPVGEIFALARNDSAGEHLRFGGKSVIVKDAAEFDWTQAQLAFFAAGVEASAAYVEEATNAGCLVIDLSGLFALEPDVPLVVPDVNPFVLGDYRNRNLIAVPNSLTSQLLTALKPLIDQGGLSRISVTNLLSASGQGKKAVDALAGQSAKLLNGIPIDEDDFFGRQLAFNMLPLLPDREGSVREERRIVDEARKILQDDGLMISASVVQSPVFYGHAQMVSFEAMRPLAAEEARDAFTRGEDIELSEEGEFPTQVGDASGNARLSIGCVHNDYGMPEQIQFWSVADNVRFGGALMAVKIAEKLIEEYLY

SEQ ID NO: 59801 - protein, 170 aa, Klebsiella pneumoniae
MSQPVITLWSDADFFSPYVMSVYVALQEKSLPFTLKTVDLNRGEHLQAGWTGYAATRRVPLLEVDDFALSESSAITEYLDERFAPPEWERIYPHDLQKRARARQIQAWLRSDLMPIREERSTAVVFDGAKMPDLSEAGRQSAEKLFATATTLLAHGGQNLFGEWSIADAD

SEQ ID NO: 59802 - protein, 260 aa, Klebsiella pneumoniae
MKKLALSLSLALALSSVSTVFAAIPQKIRIGTDPTYAPFESKNAQGELVGFDIDLAKELCKRINTQCTFVENPLDALIPSLKAKKIDAIMSSLSITEKRQQEIAFTDKLYAADSRLVVKKGSPVTPDLATLKGKRVGVLQGTTQETYGNEHWAPKGIEIVSYQGQDNIYSDLTAGRIDAAFQDEVAASEGFLKQPIGKDYQFGGPSIKDEKLFGVGTGMGLRKEDNELREALNKAFAEMRKDGTYDKLAKKYFDFNVYGE

SEQ ID NO: 59803 - protein, 828 aa, Klebsiella pneumoniae
MKQRSFCPGRLSTAIAIALCCFPPFSSGQENPGTVYQFNDGFIVGSREKVDLSRFSTSAITEGTYSLDVYTNDEWKGRYDLRIARDKDGRLGVCYTKAMLAQYGIAAEKLNPQLSEQEGYCGSLKSWRNEENVKDNLVQSSLRLNISVPQIYEDQRLKNYVSPEFWDKGITALNLGWMANAWNSHTSSVGGSDNSSAYLGVNAGLSWDGWLLKHIGNLNWQQQQGKAHWNSNQTYLQRPIPQLNSIVSGGQIFTNGEFFDTIGLRGVNLSTDDNMFPDGMRSYAPEIRGVAQSNALVTVRQGSNIIYQTTVPPGPFTLQDVYPSGYGSDLEVSVKEADGSVEVFSVPYASVAQLLRPGMTRYALSAGKVDDSALRNKPMLYQATWQHGINNLLTGYTGVTGFDDYQAFLVGTGMNTGIGALSFDVTHSRLKSDAHDDSGQSYRATFNRMFTDTQTSIVLAAYRYSTKGYYNLNDALYAVDQEKNSRSNYTLWRQKNGMTFTVNQNLPDGWGGFYLSGRISDYWNRSGTEKQYQVSYNNSFGRLSWSASAQRVYTPDSSGHRRDDRISLNFSYPLWFGDNRTANLTSNTSFNNSRFASSQIGINGSLDSENNLNYGVSTTTATGGQHDVALNGSYRTPWTTLNGSYSQGEGYRQSGIGASGTMIAHSGGVVLSPESGSTMALIEAKDAAGAMLPGSPGTRVDSNGYAILPYLRPYRINAVEIDPKGSHDDVAFDRTVAQVVPWEGSVVKVAFGTKVQNNLTLQARQANHEPLPFAASIFSPDGKEIGVVGQGSMMFISDANAKRAIVKWSGGQCSVDLGQQTTKDSVCR

SEQ ID NO: 59804 - protein, 392 aa, Klebsiella pneumoniae
MKDVVIVGALRTPIGCFQGALSRHSAVELGSVVVKALVEKTGIDPHSVDEVILGQVLTAGTGQNPARQSAIRGGLPNTVSAITINDVCGSGLKALHLATQAIQCGEADVVIAGGQENMSRAPHVLTDSRTGAQLGNSQLIDSLVHDGLWDAFNDYHMGVTAENLAREFGISRELQDAWALSSQHKARKAIDSGRFRDEIVPVVTEHNGAARTVDTDEQPRVDASAEGLASLQPTFDRLGSVTAGNASSINDGAAAVMMMSEAKALELGLPILARIRAFASVGVDPALMGIAPVHATRRCLERAGWRLDDVDLIEANEAFAAQAISVGRVLEWDERRVNVNGGAIALGHPIGASGCRILVSLVHEMIKRDARKGLATLCIGGGQGVALAVERA

SEQ ID NO: 59805 - protein, 233 aa, Klebsiella pneumoniae
MKRIALFFCFIFSFAAHANNIIVNGTRFIYPGNEKEITVQLSNNADRPALAQAWLDNGDADATPDTITTPFIITPPISRVDAKSGQTLRIKLGSSAGLAKDKETLWWLNLLEIPPVVANQKNEGQNVLQLAIRSRFKFIYRPAGLGNRDAAAEKLTLTASGSSLAINNPTPFYITVSRISRDGGKALNSKTVMLAPQSSQTVALSSAVNRGETLTVNNINDYGADVAVKVAVK

SEQ ID NO: 59806 - protein, 427 aa, Klebsiella pneumoniae
MTWFIDRRLNGKNKSAVNRQRFLRRYKAQIKQSISEAINKRSVTDIESGESVSIPTDDINEPMFHQGRGGLRNRVHPGNDHFVQNDRIERPQGGGGGGGSGQGQASADGEGKDEFVFQISKDEYLDLLFEDLALPNLKKNQHRQLNEFKTHRAGFTSNGVPANISVVRSLQNSLARRTAMTAGKRRELRALEEDLEAISRSEPVQLLEEERLRKEIAELRAKIERVPFIDTFDLRYKNYEKRPEPSSQAVMFCLMDVSGSMDQATKDMAKRFYILLYLFLSRTYKNVDVVYIRHHTQAKEVDEHEFFYSQETGGTIVSSALKLMDEVVQARYDPAQWNIYAAQASDGDNWADDSPLCHELLAKKILPVVRYYSYIEITRRAHQTLWREYEHLQATFDNFAMQHIRDQEDIYPVFRELFHKQSSKSEA

SEQ ID NO: 59807 - protein, 419 aa, Klebsiella pneumoniae; identical to SEQ ID NO: 43418

SEQ ID NO: 59808 - protein, 399 aa, Klebsiella pneumoniae
MTTNTVSRKVAWLRVVTLAIAAFIFNTTEFAPVGLLSDIADSFGMETAQVGMMLTIYAWVVALMSLPFMLLTSKVERRRLLIGLFILFIASHVLSFFAWNFDVLVISRIGIAFAHAVFWSITSALAIRMAPPGKRAQALSLIATGTALAMVFGIPIGRIIGQYFGWRMTFLAIGLGALATLACLVKLLPTLPSEHSGSLKSLPVLFRRPALVSVYILTVVVVTAHYTAYSYIEPFVQTVAGLSGNFATVLLLILGGAGIIGSILFGKLGNQHASGLISLAIALLLACLLLLLPASHNPQHLMLLSIFWGVAIMIIGLGMQVKVLASAPDATDVAMSLFSGIFNIGIGAGALVGSQVSLHLSMASVGYVGAIPALVALVWSLMIFRRWPVSLEDHHADHS

SEQ ID NO: 59809 - protein, 222 aa, Klebsiella pneumoniae
MFDLFKAIGLGLAVLLPLANPLTTVALFLGLAGNMNNAERNKQALMASVYVFAILMVSWYAGQVVMNTFGISIPGLRIAGGLIVAFIGFRMLFPQQKAHDSMEAKIKSEELQDEPTANIAFVPLAMPSTAGPGTIAMIISSASTVKHGVDFPEWVVLAAPPIIFLLLGVILWACLRSSGAIMRLVGKGGIEAISRLMGFLLVCMGVQFIINGVLEIISTWHP

SEQ ID NO: 59810 - protein, 160 aa, Klebsiella pneumoniae
MYTITDIAPTDAEFIALIAALDAWQETLYPAESNHLLDLSQLPPQTVIALAIRSPQGEAVGCGAIVLSEEGFGEMKRVYIDPQHRGQQLGEKLLAALEAKARQRDCHTLRLETGIHQHAAIALYTRNGYQTRCAFAPYQPDPLSVFMEKPLFADLRSAAL

SEQ ID NO: 59811 - protein, 398 aa, Klebsiella pneumoniae
MITTLRRSTIALLASSLLLTIGRGATLPFMTIYLTRRFQLEVDVIGYALSLALVVGVLFSMGFGILADRFDKKRYMVWSVLVFILGFSAIPLVNNALLVVIFFALINCAYSVFSTVLKAWFADRLTAEKKARIFSLNYTILNIGWTVGPPIGTLLVMHSINLPFWLAAACAAFPLVFIQLFLQRDGAAAAQPGAAPWSPSVLLRDRALLWFTCSGLLASFVGGAFASCLSQYVLVVASSDFAEKVVAVVLPVNAAVVVALQYAVGRRLSARNIRPLMTFGTVCFVIGLVGFMFSGASLWAWGISAAIFTLGEVIYAPGEYMLIDHIAPPGMKASYFSAQSLGWLGAAFNPMLTGLILTHLPHWSLFVILIVAIVAAWLMIFRGINARPWQPDSPLANA

SEQ ID NO: 59812 - protein, 505 aa, Klebsiella pneumoniae
MSEQQAQGADEAIDLNNELKARREKLAALREQGVAFPNDFRRDHTSDQLHAEFDAKDNDELASLNVEVAVAGRMMTRRVMGKASFVTLQDVGGRIQLYVARDDLPEGVYNEQFKKWDLGDIIAARGKLFKTQTGELSIHCTELRLLTKALRPLPDKFHGLQDQEVRYRQRYLDLIANEESRHTFRIRSQILATMRQFMVARGFMEVETPMMQVIPGGASARPFITHHNALDLDMYLRIAPELYLKRLVVGGFERVFEINRNFRNEGISVRHNPEFTMMELYMAYADYKDLIELTESLFRTLAQTVLGKTEVPYGDQVFDFGKPFEKLTMREAIKKHRPETNMADLDNFDAAKALAESIGIQVEKSWGLGRIVTEIFDEVAEAHLIQPTFITEYPAEVSPLARRNDVNPEITDRFEFFIGGREIGNGFSELNDAEDQAQRFQDQVNAKAAGDDEAMFYDEDYVTALEYGLPPTAGLGIGIDRMVMLFTNSHTIRDVILFPAMRPQK

SEQ ID NO: 59813 - protein, 444 aa, Klebsiella pneumoniae
MSSAKKIGLFACTGVVAGNMMGSGIALLPANLASIGGIAIWGWVISIIGAMSLAYVYARLATKNPQQGGPIAYAGEISPAFGFQTGVLYYHANWIGNLAIGITAVSYLSTFFPILNNPVPAGIACIAIVWIFTFVNMLGGTWVSRLTTIGLVLVLIPVVMTAVVGWHWFDVATYQANWNTSSTTDSHAVIKSILLCLWAFVGVESAAVSTGMVKNPKRTVPLATMLGTAMAGIVYIAATQVIAGMYPASQMAASGAPFAISASTILGGWAAPMVSAFTAFACLTSLGSWMMLVGQAGVRAANDGNFPKVYGEVDNNGIPKKGLLLAAVKMTALMVLITLMNSAGGKASDLFGELTGIAVLLTMLPYFYSCVDLIRFEGINIRNFVSLICSVLGCVFCFIALMGASSFELAGTFIVSLIILMFYGRKMHQRQNNASDNNTTANAH

SEQ ID NO: 59814 - protein, 764 aa, Klebsiella pneumoniae
MKVDIDTQDVRYADAWLGFRGTAWQTQIDVRDFIQHNYTPYEGDESFLADATPATTALWEQVMAGIRVENATHAPVDFDTNVATSITAHAAGYINLPLEKIVGLQTDQPLKRALHPFGGIKMIKSAFEAYGREMDPDFEYQFTALRKTHNQGVFDVYSPDMLRCRKSGVLTGLPDGYGRGRIIGDYRRVALYGIRYLVRERELQFADLQPALERGEALEATLRLREELAEQRRALLQMQEMAARYGCDIAHPARTAREAVQWLYFAYLAAVKSQNGGAMSLGRTATFLDIYIERDLRAGLLNEEQAQELIDHFIMKIRMVRFLRTPEFDSLFSGDPIWATEVLGGMGLDGRTLVSKTTFRYLHTLHTMGPAPEPNLTVLWSQALPAAFKKYAARVSIATSSLQYENDDLMRSDFHSDDYAIACCVSPMVIGKQMQFFGARANLAKTLLYAINGGVDEKLKIQVGPKTDPLRDEVLDYDTVMASLDHFMDWLAVQYISALNIIHCMHDKYSYEAALMALHDRDVYRTMACGIAGLSVAADSLSAIKYARVKPVRDHHGLAVDFVIEGDYPQYGNNDDRVDAIACDLVERFMRKIQALPTWRQAVPTQSILTITSNVVYGQKTGNTPDGRRAGTPFAPGANPMHGRDRKGAVASLTSVAKLPFTYAKDGISYTFSIVPAALGKAPSAQENNLVGLLDGYFHHEETVEGGQHLNVNVLNREKLLDAIEHPEQYPNLTIRVSGYAVRFNALTREQQQDVISRTFTSQL

SEQ ID NO: 59815 - protein, 443 aa, Klebsiella pneumoniae
MSTTESIASSQTSLSSWRKSDTTWTLGLFGTAIGAGVLFFPIRAGFGGLIPILVMLVLAYPIAFYCHRALARLCLSGANPSGNITETVEEHFGKTGGVVITFLYFFAICPLLWIYGVTITNTFMTFWENQLQMPALNRGVVALLLLLLMAFVIWFGKDLMVKVMSYLVWPFIASLVVISLSLIPYWNSAVIDQVNLSDIALTGHDGILVTVWLGISIMVFSFNFSPIVSSFVVSKREEYEAQFGREYTERKCSQIISRASMLMVAVVMFFAFSCLFTLSPQNMADAKAQNIPVLSYLANHFASMSGTKSTFATLLEYGASIIALVAIFKSFFGHYLGTLEGLNGLILRFGYKGDKTRVSSGKLNTLSMVFIMGSTWVVAYANPNILDLIEAMGAPIIASLLCLLPMYAIRKAPSLAKYRGRLDNLFVTAIGLLTILNIAYKLF

SEQ ID NO: 59816 - protein, 648 aa, Klebsiella pneumoniae
MRLFIAEKPSLGRAIADVLPKPHRKGDGYIECGNGQVVTWCIGHLLEQAQPDIYDSRYARWNLNDLPIVPEKWQLQPKPSVTKQLNVIKRLLGDAEEVIHAGDPDREGQLLVDEVLDYLQLAPEKRQQVQRCLINDLNPQAVERAINRLRANSEFVPLCVSALARARADWLYGINMTRAYTLLGRNAGYQGVLSVGRVQTPVLGLVVRRDEEIENFVAKDFFDVKAHIVTPQEERFVATWVPSEACEPYQDEEGRLLHRPLAEHVVKRIEGQPAIVTGYNDKRDSEPAPLPFSLSALQIEAAKRFGFSAQNVLDICQKLYETHKLITYPRSDSRYLPEEHFAGRHAVLNAIAVHAADLLPQPVVDPEIRNRCWDDKKVDAHHAIIPTARSSQVKLTDNEAKVYTLIARQYLMQFCPDAVFRKCQIDLEIANGKFVAKARFLAEAGWRTLLGSKERDEENDGTPLPVVAKGDELLCERGEVVERQTQPPRHFTDATLLSAMTGIARFVQDKDLKKILRATDGLGTEATRAGIIELLFKRGFLSKKGRYIHSSEAGRALIHSLPEMAGRPDMTAHWESVLTQISEKQCRYQDFMQPLVGTLYQLIDQARSTPVRQFRGLVAPGGAKKSFSKGKGKPKGKKAADDTAPPPQ

SEQ ID NO: 59817 - protein, 122 aa, Klebsiella pneumoniae; identical to SEQ ID NO: 43410
  MISC_FEATURE (19)..(19): X=any amino acid
  MISC_FEATURE (25)..(25): X=any amino acid

SEQ ID NO: 59818 - protein, 374 aa, Klebsiella pneumoniae
MRGLRNIYNLGVKELRSLLGDKAMLALIVFAFTVSVYSSATVMPGSLHLAPIAVADMDKSQLSSRIINAFYRPWFLEPELITADEMDAGLDAGRYTFAINIPPNFQRDVLAGRQPEIQVNVDATRMSQAFTGNGYIQNIITGEVNSFIARYRDNSVLPVELAVRMRFNPNLEQERFGAVMAIINNITMLAIVLTGSALIREREHGTIEHLLVMPVTPFEIMLAKIWSMGLVVLVVSGLSLVLMVQGILQVPIEGSIPLFMLGVALSLFATTSIGIFMGTLARSMPQLGLLMILVLLPLQMLSGGSTPRESMPQLVQDIMLTMPTTHFVSLAQAILYRGASFAIVWPQFLTLLAIGGVFFTIALLRFRKTIGEMA

SEQ ID NO: 59819 - protein, 139 aa, Klebsiella pneumoniae
MLSGLNHLTLAVSQLAPSVAFYQQLLGMTLHARWDSGAYLSCGDLWLCLSLDPQRRVTPPEESDYTHYAFSISEADFASFAARLEAAGVAIWKLNRSEGASHYFLDPDGHKLELHVGSLAQRLAACREQPYKGMVFFDQ

SEQ ID NO: 59820 - protein, 62 aa, Klebsiella pneumoniae
MPGKDGGGFIVTVILGIIGAVVGGWISTLFGFGKVDGFNFGSFVVAVIGALVVLFIYRKVRS

SEQ ID NO: 59821 - protein, 370 aa, Klebsiella pneumoniae
MINPHQPRDIPQILLSVLFLALIIISCLWVVQPFILSFAWAGTVVIATWPVLLRLQRVLFGKRLLAVLAMTLLLFLLFVIPIALLVNSLVDNSVPLIKLISSGNVTLPDFAWLNSVPLVGDKLYSAWHGLLDMGGSAIMAKVRPYIGTTTSWFVGQAAHIGKLLVYCGLMLLFSALLYWRGEQVAYGFRYFATRLAAKRGDAAVLLAGQAVRAVALGVVVTALTQAVLGGIGLAVSGVPYAALLTVVMIFTCLVQLGPLLVLVPSIIWLYWSGDTTWGTVLLVWSCVVGTMDNVIRPVLIRMGADLPMILILTGVIGGLIAFGMIGLFIGPVLLAVSWRLYDAWVHEVPPPPKDPDVVLEELSELEAGRK

SEQ ID NO: 59822 - protein, 277 aa, Klebsiella pneumoniae
MESAVDRHVFYISDGTAITAEVLGHAVMSQFPVAISSVTLPFVENISRARAVKEQIDAIYQQTGIRPLVFYSIVIPEIRDIILQSEGFCQDIVQALVAPLQQELNLDPTPVAHRTHGLNPGNLIKYDARIAAIDYTLAHDDGISLRNLDQAQVILLGVSRCGKTPTSLYLAMQYGIRAANYPFIADDMDNLVLPASLKPLQHKMFGLTINPERLAAIREERRENSRYASLRQCRMEVTEVEALYRKNKIPCLNSTNYSVEEIATKIMDIMGLNRRMY

SEQ ID NO: 59823 - protein, 557 aa, Klebsiella pneumoniae
MKYIRTMTQQKLSFWLALYIGWFMNVAVFFRRFDGYAQEFTFWKGLSGVVELVATVFVTFFLLRLLSLFGRRIWRILATLIVLFSAAASYYMTFLNVVIGYGIIASVMTTDIDLSKEVIGWHLILWLVAVSAPPLLFIWSNRCRHTLLRQLRTPGQRVKNVLIVVLAGLIVWGPIRLLELRQHDVERHSEVDMPSYGGVIANSYLPSNWLSALGLYAWAQVDESSDNKSLINPAKKFTYVAPEGLDDTYVVFIIGETTRWDHMGILGYSRNTTPELEKEKNLVAFRGYSCDTATKLSLRCMFVREGGAEDNPQRTLKEQNVFAVLHQLGFSGNLYAMQSEMWFYSNTMANNIAYREQIGAEPRNRGKSVDDMLLVDEMKRGMAQGNASGKHLIILHTKGSHFNYTQRYPRSFAQWKPECVGVDNKCSKAELINSYDNSVTYVDHFIVSVLDQLRDKKAIVFYAADHGESINEREHLHGTPRKMAPPEQFRVPMMVWMSDKYLENPDHAAAFAHLQQQAAMKVPRRHVELYDTIMGCLGYTSPDGGINENNNWCRWKK

SEQ ID NO: 59824 - protein, 331 aa, Klebsiella pneumoniae
MQEKIHWITNLRGIACMMVVMIHSTSWYITHPHAITLLQWDIANLLNSASRVSVPLFFMISGYLFFGERSAQPRHFWRIGLCIAFYSALSLLYITLFTQINVELSLKNLLQKPVFYHLWFFFAITVIYLLSPLLQVKSTSSTMLLALMAILGILANPNMVSVKAAGIEWLPVNLYINGDTFYYVLYGVLGRAIGTLDTDKKWLTPLCAALFIAAVWVISRGTLHELRWRGDFGDTWYLYCGPAVFVCAVTLLTLAKNWLNARPLPGIACIARHSLGIYGFHALIVHALRASHLELSRWPLLDIVWIFSAALLGSLLLSGLVQRIDSRRLVS

SEQ ID NO: 59825 - protein, 70 aa, Klebsiella pneumoniae; identical to SEQ ID NO: 42639

SEQ ID NO: 59826 - protein, 689 aa, Klebsiella pneumoniae
MSENTFLVEIGTEELPPKALRSLAESFAANVTAELDNAGLAHGKVEWFAAPRRLALKVANLAAAQADREVEKRGPAIAQAFDAEGKPSKAAEGWARGCGITVDQAERLTTDKGEWLLYRAHVKGESTEALLPNMIASSLAKLPIPKLMRWGASDVHFVRPVHTVTLLLGDKVIPATILGIPSDRVIRGHRFMGEPEFTIDHADQYPQILLERGKVIADYEQRKAKIKADAQEAARKIGGQADLSESLLEEVTSLVEWPVVLTAKFEEKFLAVPSEALVYTMKGDQKYFPVYDNAGKLLPNFIFVANIESKDPQQIISGNEKVVRPRLADAEFFFNTDRKKRLEDNLPRLETVLFQQQLGTLRDKTDRIQALAGWIAEQIGADVNHATRAGLLSKCDLMTNMVFEFTDTQGVMGMHYARHDGEAEDVAVALNEQYQPRFAGDALPSNPVACAVAIADKMDTLAGIFGIGQHPKGDKDPFALRRAALGVLRIIVEKNLNLDLQTLTEEAVRLYGEKLTNANVVDDVIDFMLGRFRAWYQDEGYGVDTIQAVLARRPTRPADFDARMKAVSHFRTLEESSALAAANKRVSNILAKSDETLNDIVHASVLKEAAEIKLAGNLVVLRDKLQPYFAAGRYQDALIELAALREPVDEFFENVMVNAEDKDVRINRLTLLSKLRELFLQVADISLLQ

SEQ ID NO: 59827 - protein, 384 aa, Klebsiella pneumoniae
MAKHLFTSESVSEGHPDKIADQISDAVLDAILEQDPKARVACETYVKTGMVLVGGEITTSAWVDIEEITRNTVREIGYVHSDMGFDANSCAVLSAIGKQSPDINQGVDRADPLEQGAGDQGLMFGYATNETDVLMPAPVTYAHRLVQRQAEVRKNGTLPWLRPDAKSQVTFQYDDGKIVGIDAVVLSTQHAEDIDQKSLQEAVMEEIIKPILPTEWLNASTKFFINPTGRFVIGGPMGDCGLTGRKIIVDTYGGMARHGGGAFSGKDPSKVDRSAAYAARYVAKNIVAAGLADRCEIQVSYAIGVAEPTSIMVETFGTEKVPSEQLTLLVREFFDLRPYGLIQMLDLLHPIYKETAAYGHFGREHFPWEKTDKAALLREAAGLK

SEQ ID NO: 59828 - protein, 306 aa, Klebsiella pneumoniae
MSTLGHQYDNSLVSNAFGFLRLPMNFMPYESDADWVITGVPFDMATSGRAGGRHGPAAIRQVSTNLAWEHNRFPWNFDMRERLNVVDCGDLVYAFGDAREMSEKLQAHAEKLLAAGKRMLSFGGDHFVTLPLLRAHAKHFGKMALVHFDAHTDTYANGCEFDHGTMFYTAPNEGLIDPNHSVQIGIRTEFDKDNGFTVLDAGQVNDRSVDDVIAQVKQIVGDMPVYLTFDIDCLDPAFAPGTGTPVIGGLTSDRAIKLVRGLKDLNIVGMDVVEVAPAYDQSEITALAAATLALEMLYIQAAKKGE

SEQ ID NO: 59829 - protein, 107 aa, Klebsiella pneumoniae
MSWIGVCDAEQVQEDFPYSGNIDGKEIGIYLIDGEYYALEDVCPHAYALLSQGFVEDGKVECPLHEAVFDVKTGQCLHGPGGRNLNRYPVRVYDNQIQITFIEENVA

SEQ ID NO: 59830 - protein, 387 aa, Klebsiella pneumoniae
MSVIKMTDLDLAGKRVFIRADLNVPVKDGKVTSDARIRASLPTIELALKQGAKVMVTSHLGRPTEGEYNEEFSLLPVVNYLKDKLSNPVRLVKDYLDGVEVAAGELVVLENVRFNKGEKKDDEELSKKYAALCDVFVMDAFGTAHRAQASTHGIGKFADVACAGPLLAAELDALGKALKEPARPMVAIVGGSKVSTKLTVLDSLSKIADQLIVGGGIANTFVAAQGHNVGKSLYEADLVDEAKRLLGTCDIPVPTDVRVATEFSETATATLKSVNDIKDDEQILDLGDVSAQKLAEILKNAKTILWNGPVGVFEFPNFRKGTEIVANAIADSEGFSIAGGGDTLAAIDLFGIADKISYISTGGGAFLEFVEGKVLPAVAMLEERAKQ

SEQ ID NO: 59831 - protein, 264 aa, Klebsiella pneumoniae
MNAQIEGRVAVVTGGSSGIGFETLRLLLGEGAKVAFCGRNPDRLASAHAALQNEYPEGEVFSWRCDVLNEAEVEAFAAAVAARFGGVDMLINNAGQGYVAHFADTPREAWLHEAELKLFGVINPVKAFQSLLEASDIASITCVNSLLALQPEEHMIATSAARAALLNMTLTLSKELVDKGIRVNSILLGMVESGQWQRRFESRSDKSQSWQQWTADIARKRGIPMARLGKPQEPAQALLFLASPLASFTTGAALDVSGGFCRHL

SEQ ID NO: 59832 - protein, 308 aa, Klebsiella pneumoniae
MSITGIEKLEFGVDDLNHSAKFMRDFGLTGDASGRAFTTLSGARVELNPTDAANLPPAFEAGNTLRRMTWGVADRAALDALRPKLERQPAFREIDGALECRDPNGMTLRVQVSQQTAVELNVEPINQWGDVRRIDTPSPVYDRAQPINVGHVVFFVEELAAVESFYREVLGFQVSDRYINRAVFLRCGVRGGHHNLFLLQLPNRKRGLNHVAFTVRDIHEVIGGGIAMNKNAWSTFIGPGRHPVSSAYFWYVNSPTGGAFEYYTNDDYLTENWQPRELEHSLVSFTEWAVEGGIDHDTRRQQKKPEAV

SEQ ID NO: 59833 - protein, 245 aa, Klebsiella pneumoniae
VKLKVLALAATLGLTTMAAQASELPDGPHIVTSGTASVAAVPDIATLAIEVNVSAKDAASAKKQADDRVAQYLSFLEKSGIAKKDINSANLRTQPDYDYQNGKSILKGYRAVRTVEVTLRQLDKLNGLLDGALKAGLNEIRSVSLGVAQPDAYKDKARKAAIDDAVHQAQELAAGFHSKLGPVYSVRYHVSNYQPSPMVRMMKAADAAPVSAQETYEQATIQFDDQVDVVFELQPAQAAAPATPA

SEQ ID NO: 59834 - protein, 297 aa, Klebsiella pneumoniae
MKRPDYRTLQALDAVIRERGFERAAQKLCITQSAVSQRIKQLENMFGQPLLVRTVPPRPTEQGQKLLALLRQVELLEEEWLGDEQTGSTPLLLSLAVNADSLATWLLPALANVLSDSPIRLNLQVEDETRTQERLRRGEVVGAVSIQPQALPSCLVDQLGALDYLFVASKEFAQRYFPNGVTRSALLKAPVVAFDHLDDMHQAFLQQNFDLPPGSVPCHIVNSSEAFVQLARQGTTCCMIPHLQIEKELNSGELIDLTPGLFQRRMLYWHRFAPESRMMRRVTDALIDYGHKVLRQD

SEQ ID NO: 59835 - protein, 663 aa, Klebsiella pneumoniae
MSSRKELANAIRALSMDAVQKAKSGHPGAPMGMADIAEVLWRDFLNHNPNNPAWADRDRFVLSNGHGSMLIYSLLHLTGYDLPIEELKNFRQLHSKTPGHPEVGYTAGVETTTGPLGQGIANAVGMAIAEKTLAAQFNRPGHDIVDHYTYAFMGDGCMMEGISHEVCSLAGTLKLGKLVAFYDDNGISIDGHVEGWFTDDTAKRFEAYGWHVVRGVDGHDADAIKRAVEEARAVTDKPSLLMCKTIIGFGSPNKAGTHDSHGAPLGDAEIALTREALGWKHAPFDIPSDIYAQWDAKEAGQAKEAAWNEKFAAYAKAFPQEAAEFTRRMKGEMPSDFDAKANEFIAKLQANPAKIASRKASQNAIEAFGPLLPEFLGGSADLAPSNLTLWSGSKPINEDAAGNYIHYGVREFGMTAIANGIALHGGFLPYTSTFLMFVEYARNAVRMAALMKQRQVMVYTHDSIGLGEDGPTHQPVEQVASLRVTPNMSTWRPCDQVESAIAWKYGVERQDGPTALILSRQNLAQQERTAEQLANVARGGYVLKDCAGQPELIFIATGSEVELAVAAWDKLTAEGVKARVVSMPSTDAFDKQDAAYRESVLPKAVTARVAVEAGIADYWFKYVGLNGAIVGMTTFGESAPAEQLFEEFGFTVDNVVAKAKALL

SEQ ID NO: 59836 - protein, 198 aa, Klebsiella pneumoniae
MTIQPDTLLSRQHIRQQIRDRRRALSPEQQRLFAQQAAERMMAWPPIVLAHNVALFLSFDGELDTQPLIDQLWRAGKRVYLPVLHPFSPGNLLFLHYHPQSQLIVNRLKIREPKLDVRDVLPLAELDVLVTPLVAFDVSGQRLGMGGGFYDRTLQNWQQYRLQPVGYAHDCQQVDSLPSEEWDIPLPAVITPGKTWCW

SEQ ID NO: 59837 - protein, 445 aa, Klebsiella pneumoniae
MKTVIRTAETHPLTWRLRDDKQPVWLDEYRSKNGYEGARKALTGMAPDEIVTAVKDAGLKGRGGAGFSTGLKWSLMPKDESMNIRYLLCNADEMEPGTYKDRLLMEQLPHLLVEGMLISAFALKAYRGYIFLRGEYIEAAQHLRRAIAEATEAGLLGKNILGTGFDFELFVHTGAGRYICGEETALINSLEGRRANPRSKPPFPASSGVWGKPTCVNNVETLCNVPAILANGVEWYQNISTSKDAGTKLMGFSGRVKNPGVWELPFGTTAREILEDYAGGMRDGLKFKAWQPGGAGTDFLTEAHLDLPMEFESIGKAGSRLGTSLAMAVDHEINMVSLVRNLEEFFARESCGWCTPCRDGLPWSVKILRALERGEGQPGDIETLEQLCRFLGPGKTFCAHAPGAVEPLQSAIKYFREEFEAGIKQQFSNTHAINGIQPNLLKTRW

SEQ ID NO: 59838 - protein, 166 aa, Klebsiella pneumoniae
MHENQQPQTEAFELSAAEREAIEHEKHHYEDPRAASIEALKIVQKQRGWVPDGAIYAIADVLGIPASDVEGVATFYSQIFRQPVGRHVIRYCDSVVCHITGYQGIQAAIEKKLNIKPGQTTFDGRFTLLPTCCLGNCDKGPTMMIDEDTHSHLTPEAIPDLLEQYK

SEQ ID NO: 59839 - protein, 613 aa, Klebsiella pneumoniae
MNMLALTILLPLIGFVLLAFSRGRWSENLSAAVGMGSVGLAALVTAYVGVDFFANGKQAVSVPLWTWMSVGDFNIGFNLVLDGLSLTMLSVVTGVGFLIHMFASWYMRGEEGYSRFFAYTNLFIASMVVLVLADNLLLMYLGWEGVGLCSYLLIGFYYTDPKNGAAAMKAFVVTRVGDVFLAFALFILYNELGTLNFREMVELAPQHFANGSTTLQWATLMLLGGAVGKSAQLPLQTWLADAMAGPTPVSALIHAATMVTAGVYLIARTHGLFLMTPEVLHLVGIVGAVTLVLAGFAALVQTDIKRVLAYSTMSQIGYMFLALGVQAWDAAIFHLMTHAFFKALLFLSSGSVILACHHEQNIFKMGGLRKSIPLVYVCFLVGGAALSALPLITAGFFSKDEILAGAMANGHINLMVAGLVGAFMTSLYTFRMIFIVFHGKEQIHAHAGKGITHHLPLIVLLVLSTFVGALIVPPLEGVLPQTTELAHGSVMTLEIASGIIAIAGILIAAWLWLGKRTLVTSIANSAPGRFFGTWWFHAWGFDWLYDKVFVKPFLGIAWLLKRDPLNSLMNIPAILSRFAGKGLLVSENGYLRWYVASMSIGAVVVLALLMVLR

SEQ ID NO: 59840 - protein, 390 aa, Klebsiella pneumoniae
MINGLKPLDRTLRWGMVGGGGGSQIGYIHRSAALRDNTFTLLAGAFDIDAERGRQFGQRLGVDPDRCYADYQSLFRGEAARPDGIQAVSVATPNNTHYAICRAALEAGLHVVCEKPLCFSSEEADELVALSQRRRKIIGVTYGYAGHQLILQARQMIADGLLGDIRIVNMQFAHGFHAQPVEQENASTRWRVDPRFVGPSYVLGDLATHPLFLVETMAPQLKITRLMCARQSFVKSRAPLEDNAHVLMEYDNGAIGSMWSSAVNCGSMHGQKVRIIGEKASLEWWDEQPNQLRYEIQGEPVRILERGMDYLDPLARQDDRIGGGHPEGLFEAWSNLYRRFAIAMDAADRRDEALLADFWYPDARAGAFGVRWVENCVRSADNGACWVDFR

SEQ ID NO: 59841 - protein, 231 aa, Klebsiella pneumoniae
MIVPAFSQGLYGRLRQLAAADWQRYVAHPFVQQLASGTLAENAFRRYLTQDYLFLIHFARSYALLVSKLRTLPEMRAAAASMNAILNELPLHVGYCAQWGISEPEMAAQPEAPETLNYTRYVLDIGHSGDALDLLVALMPCVAGYAEIGLGLLQHPATRLDDNPYASWIRNYGDEGYLQGVSAALALLETVWQQRGSEARITELSEIFTTATRLEAQFWQMGLNAAAETRA

SEQ ID NO: 59842 - protein, 378 aa, Klebsiella pneumoniae
MIQSRSWQLLRACEFMLAPGDKSVTVAGIFHHLRTQEPAMAIFDGHNDLLLNLWLHHREDPVSAFFAGIENGHLDYPRMLQGGFAGGLFALFVPPQEYIARMTPQYASQRWDPIDILWQQLAILKQLIAHSAGRLRLCLSAADIERCREDKVLAMVAHIEGAGGFDGEGRDLQAFYAAGVRSIGPFWNIANRFGSGVNGSFPGSPDTGPGLTASGIDLIKQANALKMQIDVSHMNEKAFWDTAHHATSPLVATHSNAHALCPQPRNLTDQQLRAIRDSGGVVGVNFGNAFLRADGRRDSDTPLTTIVRHIDYLINIMGEDHVALGSDFDGITLPDELGDVAGLPRLINTLRASGYDQLVLDKLLWRNWLRVLKNVWQQ

SEQ ID NO: 59843 - protein, 308 aa, Klebsiella pneumoniae
MFIKVLGSAAGGGFPQWNCNCANCQGLRDDTIQAAPRTQSSIIVSDNGKEWVLCNASPDISQQIAHTPELNKAGVLRGTHIGGIILTDSQIDHTTGLLSLREGCPHQVWCTPEVHEDLSTGFPVFTMLQHWNGGLVHHPIAPQQPFTVDACPDLQFTAVPIASNAPPYSPYRDRPLPGHNVALFIENRRNGQTLFYAPGLGEPDETLLPWLQKADCLLIDGTVWQDDELQAAGVGRNTGRDMGHLALGDEHGMMALLASLPAKRKILIHINNTNPILNEQSPQRQALTQQGIEVSWDGMAITLQDTAC

SEQ ID NO: 59844 - protein, 282 aa, Klebsiella pneumoniae
MNCLTRIRQRYPTLAASDKKLADYILSQPDETRHLSSQQLAAEAGVSQSSVVKFAQKLGFKGFPALKLALSEALASSPDPHSVPVHNHIRGDDPLRLVGEKLIKDNVAAMHASLDVNTEETLREAVTLLRNARRVIVTGIGASGLVARNFSWKLMKIGINAVSEQDMHALLATVQAMSSDDLLLAISYSGERREINMAAGEALRVGCKILAITGFSPNALQQQATHCLYTIAEEQATRSAAISSTSAQMMLTDLLFMGLVQQDLERAPERIRHSEALVKKLV

SEQ ID NO: 59845 - protein, 473 aa, Klebsiella pneumoniae
MKRLSLFPRSLRQLVTLSFVLILLPLLVLAWQAWQSLNALSAQAAHINRTTLVDARRSEAMINAALEMERSYRQYCVLDDPTLARVYQNQRQRYSQMLDAHAGVLPDEKLWQALRQDVSDLAQLQCKNSGPDAQAAARLEVFASNNSDMVQATRAVVYSRGQQLQQEIAERGQFFGWQALVLFLLSLALVLLFTRMIIGPVKGIERMINQLGAGKSLDDAALFTGPRELRSVGKRIIWLSERLAWLESQRHQFLRHLSHELKTPLASMREGTELLADRVAGPLTPEQQEIVEILDSSSRNLQKLIEQLLDYNRKQADGPVAREAVDLVDLVENVVAAHSLPARAKLMHTELTLQARRCLAEPALLISVMDNLYSNAVHYGAESGNIRIHSYRHGEQVRIDVANSGEPIPAAEKNMIFEPFYQGSHQRKGAVKGSGLGLSIARDCVRQMQGELSLVDAPAGQVCFRITLPSAPE

SEQ ID NO: 59846 - protein, 86 aa, Klebsiella pneumoniae
MALLITKKCINCDMCEPECPNEAISMGDSIYEINSDRCTECVGHYDTPTCQKVCPIPNTILKDPAHVESEEQLWDKFVLMHHADKI

SEQ ID NO: 59847 - protein, 1295 aa, Klebsiella pneumoniae
MMEILRGSPALSAFRINKLLARFQAANLPVSAIYAEYIHFADLNAPLSADDRERLARLLQYGPSLSSHTPTGKLLLVTPRPGTISPWSSKATDIAHNCGLAQVVRLERGVAYYVEASTLTEAQWAAVAAELHDRMMESVFDALEAGEKLFAHHQPTPVTSVDLLGEGRQALIDANLRLGLALADDEIDYLQDAFTRLGRNPNDIELYMFAQANSEHCRHKIFNADWIIDGEQQPKSLFKMIKNTFEKTPDYVLSAYKDNAAVMEGSEVGRYFADHQTGRYDFHQEPAHILMKVETHNHPTAISPWPGAATGSGGEIRDEGATGRGAKPKAGLVGFSVSNLRIPGFEQPWEEDFGKPDRIVTALDIMTEGPLGGAAFNNEFGRPALNGYFRTYEEKVTSHNGEELRGYHKPIMLAGGIGNIRGEHVQKGEITVGAKLIVLGGPAMNIGLGGGAASSMASGQSDADLDFASVQRDNPEMERRCQEVIDRCWQLGDANPILFIHDVGAGGLSNAMPELVSDGGRGGKFQLRDILSDEPGMSPLEIWCNESQERYVLAVAPEQLPLFDELCRRERAPYAVIGEATAEQHLSLSDSHFNDQPIDLPLDVLLGKTPKMTRDVQTLKAQGSALDRQPITLADAVNRVLHLPTVAEKTFLVTIGDRTVTGMVARDQMVGPWQIPVANCAVTTASLDSYYGEAMAMGERAPVALLDFAASGRLAVGEALTNIAATQIGELNRVKLSANWMAAAGHPGEDAGLYEAVKAVGEELCPALGLTIPVGKDSMSMKTRWQEGSEQREMTSPLSLVISAFARVEDVRHTVTPQLSTEDNALLLIDLGKGHNALGATALAQVYRQLGDKPADVRDVAQLKGFWNAMQALVAQRKLLAYHDRSDGGLLVTLAEMAFTGHCGMEADIAALGDDHLAALFNEELGAVIQVRAADREAVEAILAVNGLADCVHYLGKAVEGDRFVLTAGGQTVFSESRTTLRMWWAETTWQMQRLRDNPACADQEHEAKANDADPGLNVKLSFDINDDVAAPYIATGARPKVAVLREQGVNSHVEMAAAFHRAGFDAIDVHMSDLLAGRTGLGDFHALVACGGFSYGDVLGAGEGWAKSILFNERVRDEFATFFHRPQTLALGVCNGCQMMSNLRELIPGSDLWPRFVRNQSDRFEARFSLVEVTQSPSLLLEGMVGSRMPIAVSHGEGQVEVRDSAHLAQLESKGLVALRFVDNFGKVTETYPANPNGSPNGITAVTSESGRATIMMPHPERVFRTVSNSWHPENWGEDSPWMRIFRNARKQLG

SEQ ID NO: 59848 - protein, 126 aa, Klebsiella pneumoniae
MAILGLGTDIVEIARIEAVIARSGDRLARRVLSDHEWSIWEQHQQPVRFLAKRFAVKEAAAKALGTGIRNGLAFNQFEVYNDELGKPKLRLWGEANLLAERMGVSAIHVTLADERHYACATVIVES

SEQ ID NO: 59849 - protein, 554 aa, Klebsiella pneumoniae
MTTIANKLPTGALLSRMPHIRRQPCVFSGHRLLRNLKLQKINSLKKLKINYLLIGIVTLLLAAALWPSIPWSGKPENRVAGIIARGELRISTINSPMTFATMNNKAFGLDYELAKQFADYLGVTLKITVRQNISQLFDDLDDGQADMLAAGLVYNQERVKNYQAGPTYYSVSQQLVYRVGNTRPRTLAALTAEQLTIAPGHVAINDLQTLKAEKYPDLAWRVDEKRGTTALMQAVIDGKLDYTIADSVAVSLFQRVHPELAVALDITDEQPVTWFSARDDDNSLSAAMLDFFNNINEDGTLARLEEKYLGHGNDFDYVDTRTFLRAVENILPEVQPLFEKYAREIDWRLLAAIAWQESHWDPQATSPTGVRGMMMLTRNTAQSLGLTDRTDAAQSIDGGMRYLQDMMDKVPDSIPKDERIWFALAAYNMGYAHMLDAMALTRKQKGNPNSWADVKLRLPLLSQKPYYSKLKYGYARGHEAYAYVENIRKYQISLVGYLSEKERQQQQTLALAEDYPAVLPNELEQPQETTLPFFKFRADKQMDNARMKLPGHLY

SEQ ID NO: 59850 - protein, 301 aa, Klebsiella pneumoniae
MSEEKSYCGFVAIVGRPNVGKSTLLNKLLGQKISITSRKAQTTRHRIVGIHTEGPYQAIYVDTPGLHMEEKRAINRLMNKAASSSIGDVELVIFVVEGTRWTQDDEMVLNKLRDAKAPVILAVNKVDNVQEKADLLPHLQFLASQMNFLDIVPISAETGTNVDTIAAIVRKHLPEAIHHFPEDYITDRSQRFMASEIIREKLMRFLGAELPYSVTVEIERFVSNERGGYDINGLILVEREGQKKMVIGNKGAKIKTIGIEARKDMQEMFEAPVHLELWVKVKSGWADDERALRSLGYVDDL

SEQ ID NO: 59851 - protein, 324 aa, Klebsiella pneumoniae
MANMFALILVIATLVTGVLWCLDKFIFAPKRRERQAAAQAATGEQLDKKTLKKVGPKPGWLETGASVFPVLAIVLVVRSFIYEPFQIPSGSMMPTLLIGDFILVEKFAYGIKDPIYQKTLIETGHPKRGDIVVFKYPEDPRLDYIKRAVGLPGDKVTYDPVAKQVTIQPGCSSGQACGNALPVTYSNVEPSDFVQTFSRSNGGEASSGFWQLPKGETKADGIRLTERQETLGDVTHRILMVPIAQDQVGMYYHQSGLPLATWIVPPGQYFMMGDNRDNSADSRYWGFVPEANLVGKATAIWMSFEKQEGEWPTGVRLSRIGGIH

SEQ ID NO: 59852 - protein, 133 aa, Klebsiella pneumoniae
MKEKPTETVRLDKWLWAARFYKTRALAREMIEGGKVHYNGQRSKPGKIVELDAMLTLRQGNDERTVRIIGITEQRRPASEAVNLYEETAESIEKREKMALARKMNALTMPHPDRRPDKKERRDLMRFKHGESE

SEQ ID NO: 59853 - protein, 75 aa, Klebsiella pneumoniae
MQFTPDSAWKITGFSRDISPAYRQKLLSLGMLPGSSFHVVRVAPLGDPVHIETRRVSLVLRKKDLALIELEAVAQ

SEQ ID NO: 59854 - protein, 257 aa, Klebsiella pneumoniae
MHIQQDSIAIVALLHERSHWALRRWWRIPLPPGLVRQGMVADVSALGSRLAAWRRELPAQHQVSIAFPAVRTLQKRLPYPQFALREREQATWVASAMSQQLAMPASALCIDYAPTSRDDGWQVTAAQRLDINVLRELAGRLRLRVAAIVPDASALGAFFPWMTAADQGLAWRDEKHWLWATREAWGSDACADVGSLSQLAGQLQIPLRLCIDAGDEASRFDVWQVIHRRQPPLPGDGDRYAIALGLALGGGRHDACR

SEQ ID NO: 59855 - protein, 451 aa, Klebsiella pneumoniae
MKRVRFSPRSSFARTLLLIVTLLFVSLVTTYLVVLNFAILPSLQQFNKVLAYEVRMLMTDKLQLEDGTQLVVPPAFRREIYRELGISLYSNEAAEDAGLRWAQHYEFLSQQMAHQLGGPTEVRVEVNKSSPVVWLKTWLSPNIWVRVPLTEIHQGDFSPLFRYTLAIMLLAIGGAWLFIRIQNRPLVDLEHAALQVGRGIIPPPLREYGASEVRSVTRAFNHMAAGVKQLADDRTLLMAGVSHDLRTPLTRIRLATEMMGEQDGYLAESINKDIEECNAIIEQFIDYLRTGQEMPMELADLNAVLGEVIAAESGYEREIATALQAGEIPVRMHPLSIKRALANMVVNAARYGNGWIKVSSGSEASRAWFQVEDDGPGIKPEQREHLFQPFVRGDSARSTSGTGLGLAIVQRIIDNHNGRLEIGSSERGGLLIRAWLPVHRMLAPMKPARES

SEQ ID NO: 59856 - protein, 176 aa, Klebsiella pneumoniae
MTTIVSVRRNGHVVIAGDGQATLGNTVMKGNVKKVRRLYNDKVIAGFAGGTADAFTLFELFERKLEMHQGHLVKAAVELAKDWRTDRMLRKLEALLAVADENASLIITGNGDVVQPENDLIAIGSGGPYAQAAARALLENTDMGARDIAEKALDIAGDICIYTNHFHTIEELPSKA

SEQ ID NO: 59857 - protein, 324 aa, Klebsiella pneumoniae
MGLVKQGARVAVIERYHNVGGGCTHWGTIPSKALRHAVSRIIEFNQNPLYSDHSRLLRSSFADILNHADSVINQQTHMRQGFYERNHCEILQGNAHFVDEHTLALECHDGTVETVTAEKFVIACGSRPYHPADVDFHHPRIYDSDSILSLQHEPRHVIIYGAGVIGCEYASIFRGMEVKVDLINTRDRLLAFLDQEMSDSLSYHFWNSGVVIRHNEEYEKIEGVDDGVIMHLKSGKKLKADCLLYANGRTGNTDTLALENIGLQTDSRGQLKVNSMYQTALPHIYAVGDVIGYPSLASAAYDQGRIGAQALVKGEASAHLIEDI

SEQ ID NO: 59858 - protein, 220 aa, Klebsiella pneumoniae
MELYLDTANVAEVECLARIYPLAGVTTNPSIIAAGKVPVWDVLPRLQKAVGPEGTLFAQTMSRDAQGMVEEAKRLSNAVPGIVVKIPVTAEGLAAIKLLKKEGIPTLGTAVYSASQGLLAALAGAKYVAPYVNRVDAQGGDGIRMVQELQSLLEMHAPESKVLAASFKTPRQALDCLLAGCEAITLPLDVAQQMLGTPAVESAIEKFEQDWNNAFGALNL

SEQ ID NO: 59859 - protein, 105 aa, Klebsiella pneumoniae
MAEWSGEYISPYAEHGKKSEQVKKITVSIPLKVLKILTDERTRRQVNNLRHATNSELLCEAFLHAFTGQPLPNDEDLRKERSDEIPEAAKAIMRELGIDPDTWEY

SEQ ID NO: 59860 - protein, 716 aa, Klebsiella pneumoniae
MKKITSVCPYCGAGCKLKLVVDNNKIIRAEAADGVTNQNQLCLKGYYGWDFLNDTQLLTPRLKQPMIRYQKGGAFTPVSWQEAIRYTASKLREIKEKHGPRAIMTTGSSRGTGNETNYVMQKFARAVLNTNNVDCCARVCHGPSVAGLQQALGNGAMSNSISDIENSKCLLVFGYNCADSHPIVARRVIKARDNGAKIIVCDPRRIETARIADRHLQLNNGSNMALVNAFGYVLLEEELYNKTYVERYTEGLDAYREAVKDYAPEAVEGIVGVSAREIREAMRMFAAAPSATIMWGMGVTQFGQAVDVVRGLASLALLTGNLGRPNVGVGPVRGQNNVQGACDMGVLPNLFPGYQEVTDPAVRAKFAAAWGIDPALMDDQVGTRITEVPHKALTGEIKAYYIMGEDPLQTEADLGLVRKGIEALDFVVVQDIFMTKTAEMADVLLPATSWGEHGGVFTCADRGFQRFEQAIPPAGNVKRDWEIISLLASELGYPMHYENNQQIWDEMRELCPLFYGVTWEKMGDMGHVQWPCPTLDHPGTPWLYKDNRFDTPSGKGQLFATAWRAPAERPDDEWPLVLCTVREVGHYSCRSMTGNCAALQSLADEPGRVQMNPADAQRLGIADKQLVWVSSRRGKVISRADLSDRINPGVVYMTYQWWVGACNELTQDNLDPISKTPETKYCAVKVEAIADQQWAERYAWTAYSDMKARLKAAADV

SEQ ID NO: 59861 - protein, 172 aa, Klebsiella pneumoniae
MLIRRARPSDAEELAILAERTFRKTFAAGNTQKDMDLHCQASYSTDIQLHEILRQDWITLVCEYESKLIGYAQLRWEEFPPCVNSIHAGEILCLYVDEPYHGKGFAQALMQKCFAEFAAQGSDIVWLGVWEHNPRAISFYRKLGFTEVGEHIFQVGTDPQRDIIMKRSMGVS

SEQ ID NO: 59862 - protein, 359 aa, Klebsiella pneumoniae
MPTGHRFLATDLHQFVVSLFTHLGSTPGEATLVADHLIAANLAGHDSHGVGMIPSYVKSHAGGFLQLNRHATVTKDAGAVVTLDGNAGFGQVVAHEAMQLGIEKAKQHGMAAIALRNAHHVGRIGYWAEQCAAAGLISIHFVSVIGDPMVAPFRGKDSRFGTNPLCVVFPRAGHPPLLLDYATSAIAFGKTRVAWHKGEAVAPGCLIDAEGRPTTDPAVMQTSPLGALLTFAQHKGYALATLCEVLGGALSGGQTTHQESLQTSVDAIFNCMTTVILRPDAFDAPDSQAQTEAFIAWCKQSPHDADAPVLAPGEWEAANREARLAQGIPLDAGSWQAICAAARDVGLSESHFDRCRPLA

SEQ ID NO: 59863 - protein, 219 aa, Klebsiella pneumoniae
MMRALLARELRLAWRSGAEILNPLWFFLIVITLFPFGVGAAPQLLAQIAPGVVWVAALLAALLVMDRLFRDDWQDGSLEQLMLLPTPLVAVVLVKVVAHWMMSGLPLLIVSPLAALLLGMSLHDAGVLALTLLLGTPTLSFLGAVGVGLTVGLKRGGVLLSLLVLPLAVPLLIFATAACQAAAAGLPVSGYLAMLAAFLTASATLCPFATAAALRLTVR

SEQ ID NO: 59864 - protein, 551 aa, Klebsiella pneumoniae
MSNDHLTDIAYRHFIESVKDYAIYMLSADGTVISWNEGARRAKGYLSDEIIGRYFGLFYSEAEQLSGVPAKNLEIALRSGQFEGEGWRYRKDGSRFWAHVMIDTIRDEQNTLLGFAKITRDISEQKAINDRIAWMARYDALTGLPNRVEFFERVEKLITGNDARRFAIFTIDLDKFKEINDLQGHLIGDQLLQRVAGAVLKTLQKEEMVARFGGDEFVAVKPFSDEGEVDAFAARLWHCFSGKQTFAATEVVLSASIGISVYPEDGTDINTILSNSDLAMYRAKSSLDHKICWYEREMDDKTRQRNMMAADIRRGIHAGEFSLHYQAIRNIKDRSITGYEALLRWQHPQLGTIPPDVFIPIAEESGAIVPLGYWVLEQVCNESLENGLNRKVSVNISPVQLRHRSFIEKVREILMRTAYPVSLLEFEVTETAFVINKQLAFSVLHHLQKMGISIALDDFGTGYSSLSMLRDFHFDVIKLDRSFMTDVESNPQVRSFVRAIISLGNSINTPLIAEGVETAGQLQILEEEGCDEMQGFLFGEPVDIKHLPDRR

SEQ ID NO: 59865 - protein, 307 aa, Klebsiella pneumoniae
MSPFSRFAHYFIAVARCGSLRRAAEQLHISASAINRQILQAEEAFGTPLFERLPEGLRMTTAGELLYDNLLRWQKEFRQTRQKFDELQGMKRGSVSVGMVQALAEGGFAAALAEIIASWPWLELDLQVADSHTVSQKVRQADLDVGLILDPQGQAGLSVLAFAELEVGIVMRPDHPLAGAKALSLGELSLERHIAPGAPLIVHERVALLYRHHDFAPENTISCNDIRLIKSLVLRGSGVTLLSLLDVLDEVQRGQLAFVPLRSTLLRPLTLALCTAPSRQLSRPAQMAIQTLSAVIESMATVSPAAR

SEQ ID NO: 59866 - protein, 352 aa, Klebsiella pneumoniae
MSNPLLSLLDIDYPLIQAPMAGVSTPALAAAVSNAGALGSLGLGASTVAQTEAMIVATRQLTDRPFNVNLFCHAPPRRDARREADWATTLRPHFARYGSTPPDSLSEIYQTFIGHAPMLELLLDLSPAVVSFHFGLPEGETIQRLRRQGIVTLATATSLQEALLIEQQGIDVVVAQGYEAGGHRGIFAPQAPDAQLSTFTLVQLLRRRLTIPVVAAGGIMDGAGIASVMQLGAQGVQLGTAFLLCPESAADAGYRAAIHNSLDGRTVLTSAISGRPARCLANAFCALGEGYPASAVPDYPLAYDIGKALAAAAKAQGVHEYGAHWAGQGVGLIRECDAASLVRQLAAESGWN

SEQ ID NO: 59867 - protein, 91 aa, Klebsiella pneumoniae; identical to SEQ ID NO: 43000

SEQ ID NO: 59868 - protein, 167 aa, Klebsiella pneumoniae; identical to SEQ ID NO: 56103

SEQ ID NO: 59869 - protein, 453 aa, Klebsiella pneumoniae
MPVDSEVTVRGWVRTRRDSKAGFSFLAVYDGSCFDPVQAVINNSLPNYNQEVLRLTTGCSVIVTGKVVASQGQGQSFEIQATSVEVTGWVEDPDTYPMAAKRHSIEYLREVAHLRPRTNLIGAVARVRHTLAQALHRFFNEQGFFWVSTPLITASDTEGAGEMFRVSTLDLENLPRNDQGKVDFDKDFFGKESFLTVSGQLNGETYACALSKIYTFGPTFRAENSNTSRHLAEFWMLEPEVAFANLNDVAGLAEAMLKYVFKAVLEERADDMQFFAERVDKDAIDRLQRFITADFAQVDYTDAVTILENCGKQFENPVYWGVDLSSEHERYLAEEHFKAPVVVKNYPKDIKAFYMRLNEDGKTVAAMDVLAPGIGEIIGGSQREERLDVLDARMAEMGLNKEDYWWYRDLRRYGTVPHSGFGLGFERLIAYVTGVQNVRDVIPFPRTPRNATF

SEQ ID NO: 59870 - protein, 505 aa, Klebsiella pneumoniae
MSEQQAQGADAAIDLNNELKTRREKLAALREQGVAFPNDFRRDHTSDQLHADFDGKENEELEALNVEVAVAGRMMTRRIMGKASFVTLQDVGGRIQLYVARDDLAEGVYNDQFKKWDLGDIIAARGKLFKTKTGELSIHCTELRLLTKALRPLPDKFHGLQDQEARYRQRYLDLISNDESRKTFKVRSQILAGIRQFMVGRGFMEVETPMMQVIPGGASARPFITHHNALDLDMYLRIAPELYLKRLVVGGFERVFEINRNFRNEGISVRHNPEFTMMELYMAYADYKDLIELTESLFRTLAQDILGNTEVPYGDQVFDFGKPFEKLTMREAIKKYRPETEMADLDNFDSAKAIAESIGIKVEKSWGLGRIVTEIFEEVAEAHLIQPTFITEYPAEVSPLARRNDVNPEITDRFEFFIGGREIGNGFSELNDAEDQAQRFQDQVDAKAAGDDEAMFYDEDYVTALEHGLPPTAGLGIGIDRMVMLFTNSHTIRDVILFPAMRPQK

SEQ ID NO: 59871 - protein, 320 aa, Klebsiella pneumoniae
MWNEPERAQALGKERSSLEAIVDTLDQMSQGLEDVAGLLDLAVEADDEETFNEAVAELDTLEEKLAQLEFRRMFSGEYDSADCYLDIQAGSGGTEAQDWASMLMRMYLRWAEARGFKTEIIEESEGEVAGIKSVTIKIIGDYAYGWLRTETGVHRLVRKSPFDSGGRRHTSFSSAFVYPEVEDDIDIEINPADLRIDVYRASGAGGQHVNRTESAVRITHIPTGLVTQCQNDRSQHKNKDQAMKQMKAKLYELEMQKKNAEKQAMEDNKSDIGWGSQIRSYVLDDSRIKDLRTGVETRNTQAVLDGSLDQFIEASLKAGL

SEQ ID NO: 59872 - protein, 577 aa, Klebsiella pneumoniae
MKQQIQLRRREAVDGVELPADLPPLLQRLYASRGVRSAQELERSVKGMLPWTQLTGVEKAVEMLHDAFQKGLHIVVVGDFDADGATSTALSVLALRALGYGNVSYLVPNRFEDGYGLSPEVVDQAHARGAQMIMTVDNGISSHAGVDHAHALGIPVLVTDHHLPGETLPAAEAIVNPNLRDCDFPSKSLAGVGVAFYLMLALRTFLRDKGWFDARGIPAPNLAELLDLVALGTVADVVPLDANNRILTWQGLSRIRAGKCRPGIKALLEIANRDPQKLAASDLGFALGPRLNAAGRLDDMSVGVALLLCDNIGEARVLANELDALNQTRKEIEQGMQAEALTLCQQLERSADTLPGGLAMYHPQWHQGVVGILASRIKERFHRPVIAFAPTGDGTLKGSGRSIQGLHMRDALERLDTLYPGLILKFGGHAMAAGLSLEEARFEEFQQRFGELVTEWLDPALLQGEVVSDGPLAAAEMSMEVAQMLRDAGPWGQMFPEPLFDGRFRLLQQRLVGERHLKVMVEPVDGGPLLDGIAFNVDTSIWPDNGVREVQLAYKLDINEFRGNRSLQLIIDHLWPN

SEQ ID NO: 59873 - protein, 237 aa, Klebsiella pneumoniae
MKKGLLMFTLLAASLSGTAHADSAAIKQSLAKLGVQSTDIQPSPVSGMSTVLTDSGVLYVTDDGKHIIQGPMYDVSGTQPVNVTNQLLLGKLNALSNEMIVYKAPKEQHVITVFTDITCGYCHKLHEQMSDYNALGITVRYLAFPRQGLQSQAEQDMKAIWCAKDRNKALDDAMNGKGVQPASCSVDIAKHYTLGVQMGVNGTPAMVLSNGMVLPGYQGPKELKAFLDEHKKQTSGN

SEQ ID NO: 59874 - protein, 762 aa, Klebsiella pneumoniae
MGVDTGRVPGMATLDSTACVPLTTLISEATTRFDVGQQRLYLTVPQAFMGNHARGYIPPELWDNGITAGLINYNFTGNNAHNTTGGSSRYAYLNLQSGLNIGAWRLRDNSTWSYSSGGSTSSNENRWQHVNSWLERDITPLRSRLTLGDSYTNGDVFDGINFRGAQLASDDNMLPDSQKGFAPVIHGIARGTAQVSIRQNGYEIYQSTVPPGPFTIDDLYAAGNGGDLQVTIKEADGSRQVFSVPWSTVPVLQREGHTRFALTAGEYRSGNSQQETPDFFQGTAMHGLPAGWTLYGGTQLADRYRAFNLGVGKNMGYFGALSLDITQANATLADDSEHQGQSVRFLYNKSLDETGTNLQLVGYRYSTRGYYNFADTTYRRMSGYSVETQDGVIQVKPKFTDYYNLAYSKRGKVQLSVTQQLGRTATLYLSGSHQTYWGTDDADEQLQAGLNAAVDDINWSLSYSLTKNAWQQGRDQMLAININIPFSHWLRSDSRSVWRHASASYSLSHDLNGRMTNLAGLYGTLLEDNNLSYSVQTGYAGGGNGDNGSTGYTALNYRGGYGNANVGYSRSDGFKQLYYGVSGGVLAHANGITLSQPLNDTVVLVKAPGAGGVKVENQTGVRTDWRGYAVLPYATEYRENRIALDTNTLADNVDLDDAVVSVVPTHGAIVRANFNAQVGMKILMTLTHRGKPVPFGALATGDSNQSGSIVADNGQVYLSGMALAGKVRVKWGDGPDAQCVADYRLPPESQQQALSQLSVACR

SEQ ID NO: 59875 - protein, 298 aa, Klebsiella pneumoniae
MKQDLALIEQFLDALWLERNLAENTLSAYRRDLTMLVEWLHHRGLSLASVGSDDLQALLAERQSGGYKATSTARLLSAVRRFFQHLYREKIRPDDPSALLASPKLPQRLPKDLSEAQVERLLQAPLVEQPLELRDKAMLEVLYATGLRVSELVGLTMSDISLRQGVLRVVGKGNKERLVPLGEEAVLWVENYLEYGRPWLLNGVASDVLFPSQRAQQMTRQTFWHRIKHYAVLAGIDSEKLSPHVLRHAFATHLLNHGADLRVVQMLLGHSDLSTTQIYTHVATERLRQLHQQHHPRA

SEQ ID NO: 59876 - protein, 109 aa, Klebsiella pneumoniae
MSLLPLQLFKNLADETRLGIVLLLKARGELCVCDLCTALAQSQPKISRHLAMLRESGLLLDRKQGKWVHYRLSPQMPAWAAQVIEQAWLSQQEDVRLMISRLAGGPGCR

SEQ ID NO: 59877 - protein, 136 aa, Klebsiella pneumoniae
MVLWQSDLRISWRAQWFSLLLHGVVAALVLLVPWPLSYTPIWLLLLSLVVFDCVRSQRRIHARRGEIKLLTDSRLRWQNAEWEILGTPWVINSGMLLRLRHVDTRRGQHLWLAADSMDAGEWRDLRRLVLQKPAQE

SEQ ID NO: 59878 - protein, 88 aa, Klebsiella pneumoniae
MDINNKARIHWACRRGMRELDISIMPFFEYEYDTLSDADKQLFIRLLENDDPDLFNWLMNHGKPADAELQRMVTLIQTRNRERGPVAI

SEQ ID NO: 59879 - protein, 327 aa, Klebsiella pneumoniae
MAFTPFPPRQPSSSARLPLTLMTLDDWALATISGPDSEKYLQGQITADVSHLTDAQHLLAAHCDAKGKMWSNLRVFRREGGFAWIERRSLRDAQLTELKKYAVFSKVTIAANDDLVLLGVAGFQARAALAPLFAALPDAATPVVSEGATSLLWFEHPGERFLLVTDVDTANRVTDALRGEAQFNNSQQWLALNIEAGLPVIDSANSGQFIPQATNLQALGGISFKKGCYTGQEMVARAKFRGANKRALWTLSGTASRVPEAGEDLELKMGDNWRRTGTVLAAVQLDDGSLMVQVVMNNDMEPDSVFRVRDDAGSLSIKPLPYSLEEN

SEQ ID NO: 59880 - protein, 219 aa, Klebsiella pneumoniae
MVRKPLITQGYSLAEEVANSISHGIGLVFGIVGLVLLLVQAADTNASATAIASYSLYGGSMIMLFLASTLYHAIPHQRAKQWLKKFDHCAIYLLIAGTYTPFLLVGLNSPLAKGLMIVIWSLALLGILFKLTIAHRFKILSLVTYLTMGWLSLIVVYQLAVKLAVGGVTLLAVGGVVYSLGVIFYVCKRIPYNHAIWHGFVLGGSVCHFLAIYLYIGQS

SEQ ID NO: 59881 - protein, 187 aa, Klebsiella pneumoniae
MSLINTKIKPFKNQAFKNGEFIEVTEKDTEGRWSVFFFYPADFTFVCPTELGDVADHYEELQKLGVDVYSVSTDTHFTHKAWHSSSETIAKIKYAMIGDPTGALTRNFDNMREDEGLADRATFVVDPQGIIQAIEVTAEGIGRDASDLLRKIKAAQYVASHPGEVCPAKWKEGEATLAPSLDLVGKI

SEQ ID NO: 59882 - protein, 202 aa, Klebsiella pneumoniae
MWQERLAQLVTTCHWIGAKGWAPATGGNMSVRQDDTWCWLSESGRDKGSLTTEYFLQVEIATNQAPSGRKPSAETGLHTLVYRLFPEANVVLHVHTVNATVLSRIEKSDTLALQGYEMQKTLSGQHSHLDTVPIAIFDNDQDIDALAARIADYAQTRPLRYGFLLRGHGLTCWGKDIQEARRQLEGLEFLFECELMRRRYEP

SEQ ID NO: 59883 - protein, 180 aa, Klebsiella pneumoniae
MSALTLFSVTDPQTPVWHSTDAKAIQAQLNAKGVRFERWQADRDLGANPSPETVIAAYQHAIDKLVAEKGYQSWDVISLRADNPQKEALREKFLNEHTHGEDEVRFFVEGAGLFCLHIGDEVFQVLCEKNDLISVPAHTPHWFDMGSEPNFTAIRIFDNPEGWIAQFTGDDIASAYPRLA

SEQ ID NO: 59884 - protein, 197 aa, Klebsiella pneumoniae
SLRSYDKAEKKYRAWKGRNGRAAANILSRNFGASKANEKWVTDVTEFPVQGKKLYLSSVLDLFNREVIAYSLSERPVMEMVNTMLDGAFPKLRPGDAPLLHSDQGWHYRMRSYQERLKAHGMTQSMSRKGNCLDNAVMENFFGTLKSECFYLREFRSVSALRKAVEDYIHYYNNERISLKLKGLSPVEYRTQALRAA

SEQ ID NO: 59885 - protein, 310 aa, Klebsiella pneumoniae
MANLYDLKKFDLNLLVIFECIYQHLSISKAAAMLFITPSAVSQSLQRLRQQLNDPLFVRVGKGMTPTTACVNLHYHLQQNLEQLEKTINLNNRSELRKRIVIYGPPLFCSVNSHVMINQLCHQANLQIEHHNLTTTESAEELLAYRQADLVFTRMPITNRATICQPYQTVQTLAVCRAGHPRRETLTSVESLAQEFFTHYITNDPVIQRVQQSSIAWLNPRNIAFRSDSFMTILNMINKTDLIGFLPSYLYDFISPTMQLHAINIDNLFPDITIYINYHHASSQNHFLTELITILMNDREASQPQFNHSE

SEQ ID NO: 59886 - protein, 323 aa, Klebsiella pneumoniae
MRVLIVKTSSMGDVLHTLPALTDAAQAIPGIRFDWVVEEGFAQIPSWHESVERVIPVAIRRWRKAWFSAPIKAERQTFREAVQAVKYDAIIDAQGLVKSAALVTRLAHGVKHGMDWQSAREPLASLFYNRRHHIAKQQHAVERTRELFAKSLGYAKPQTQGDYAIARHFLQHEASAAAPYLVFLHATTRDDKHWPETRWQELLDLLADSGVHIKLPWGAPHEEARAKRLAEGREYVEVLPRMSLEQVAQVLAGARAVVSVDTGLSHLTAALDKPNFTLYGPTDPGLIGGYGKNQHIVRPENSASTGDIAASRIHLLLQNQGLL

SEQ ID NO: 59887 - protein, 397 aa, Klebsiella pneumoniae
MRGDFYKQLTSNLETARAEGLFKEERIITSAQQADITVGDSHVINFCANNYLGLANHPELIAAAKSGMDSHGFGMASVRFICGTQDTHKQLEKKLADFLGMEDAILYSSCFDANGGLFETLLGPEDAIISDALNHASIIDGVRLCKAKRFRYANNDMQELEARLKEAREAGARHVLIATDGVFSMDGVIANLQGVCDLADKYDALVMVDDSHAVGFVGENGRGSHEYCDVMGRVDIITGTLGKALGGASGGYTAARKEVVEWLRQRSRPYLFSNSLAPAIVAASIKVLEMVEEGADLRDRLWANARLFREKMTAAGFTLAGADHAIIPVMLGEAVVAQNFARELQKEGIYVTGFFYPVVPKGQARIRTQMSAAHTPEQIERAVEAFTRIGKQLGVIA

SEQ ID NO: 59888 - protein, 143 aa, Klebsiella pneumoniae
MQEIMQFIGRHPVLSIAWIALLGAVVFTTFKGLMSKVKVITRGEATRLINKEDAVVVDLRQRDDFRKGHIAGAINLLPSDIKANNVGELEKHKSQPIIVVDGSGMQAQEPASALNKAGFEKVFVLKEGIAGWSGENLPLVRGK

SEQ ID NO: 59889 - protein, 83 aa, Klebsiella pneumoniae
MANIEIYTKATCPFCIRAKALLNSKGVTFHELPIDGDAAKREEMIQRSGRTTVPQIFIDAQHIGGCDDLYALDSRGGLDPLLR

SEQ ID NO: 59890 - protein, 198 aa, Klebsiella pneumoniae
MHNLARPTSRPLRLLSDMQAMMEETQAFENRVLERLNAGKTVRSFLIATVELLTEAVNILVLQVFRKDDYAVKYAVEPLLEGSGPLGDLSVRLKLIYGLGVISRAEYEDAELLMALREELNHDGNEYSFTDDEIIGPFGELHCVAALPPTPQFDDSDAELLAMQKLRYQQMVRSTMVLSLTELISRISLKKAFQKSTL

SEQ ID NO: 59891 - protein, 315 aa, Klebsiella pneumoniae
MLQFRAIALAVAGSLALAAPAFAGKLSIVIDDFGYRPQTENQVLALPATISVAVLPNAPHAREMATKAHNQGHEVLIHLPMAPLSKQPLEKDTLRPEMSSEEIERIIREAYGKVPYAVGLNNHMGSAMTSNLFGMQKVMQALERYNLYFLDSVTIGNTQAMRAAQGTGVKVIKRKVFLDDTQNEADIRNQFNRAIALARRNGSAIAIGHPHPTTVRVLQQMVYNLPPDITLVRPSSLLNEPQVDNSTPNYAQPPAQQTQQKPRNPFHGVKSCKPKRPLEPVNASRFFTILSDSISQSALIQYYRLKWQGWDNPGN

SEQ ID NO: 59892 - protein, 339 aa, Klebsiella pneumoniae
MNALNAAMTVIGAGSYGTALAITLARNGHHVVLWGHDPKHIATLQHDRCNAAFLPDVPFPDTLHLESDLATALAASRDILVVVPSHVFGQVLRQIKPLMRSDARLVWATKGLEAETGRLLQDVAREALGDDIPLAVISGPTFAKELAAGLPTAISLAATDPQFAEDLQRLLHCGKSFRVYINPDFIGVQLGGAVKNVIAIGAGMSDGIGFGANARTALITRGLVEMSRLGAALGADPETFMGMAGLGDLVLTCTDNQSRNRRFGMMLGQGMDVQSAQDKIGQVVEGYRNTKEVRVLAQRLGVEMPITEEIYQVLYCGKIAREAALTLLGRARKDERSSN

SEQ ID NO: 59893 - protein, 273 aa, Klebsiella pneumoniae
MPCEELDIVWNNIKAEARALADCEPMLASFYHATLLKHENLGSALSYMLANKLASPIMPAIAIREVVEEAYAADPEMIASAACDIQAVRTRDPAVDKYSTPLLYLKGFHALQAYRIGHWLWTQGRRALAIFLQNQVSVSFQVDIHPAAKIGRGIMLDHATGIVVGETAVIEDDVSILQSVTLGGTGKTSGDRHPKIREGVMIGAGAKILGNIEVGRGAKIGAGSVVLQPVPPHTTAAGVPARIVGKPESDKPAMDMDQHFNGIHHTFEYGDGI

SEQ ID NO: 59894 - protein, 157 aa, Klebsiella pneumoniae
MLNIVLFEPEIPPNTGNIIRLCANTGFSLHIIEPMGFTWDDKRLRRAGLDYHEFTAVQRHADYAAFVASAQPQRLFALTTKGTPAHSAVSYQDGDFLMFGPETRGLPASILDALPPEQKIRIPMMPDSRSMNLSNAVSVVVYEAWRQLGYPGAVLRS

SEQ ID NO: 59895 - protein, 202 aa, Klebsiella pneumoniae
MKLIGSYTSPFVRKISVILLEKRIPFEFVNESPYSESNGVSRYNPLGKVPALVTDDGECWFDSPVIAQYLELLGVAPPMIPADPRAALRMRQLEALADGVMEAAQALVREKARPAAQQSEQELLRQREKVARGLDRLEACAADGTLRGDEVNLATISTACAIAYLNFRRVAPGWCATRPQLVKLVDALFQRASFARTEPPRT

SEQ ID NO: 59896 - protein, 150 aa, Klebsiella pneumoniae
MTSNSVMNSFFIPRLGSQIYAMAGMQTQLHLIADEAGTYDGISASYSGPGFSGMKFKAIATPDRATFDQWVAKAKQSPNSMDSMAAFEKVAVPSEYNKVEYFSNVKPDLFKDVVNKFMSHESMNMSKPEGEHAAHDGMEGMDMSHAETAH

SEQ ID NO: 59897 - protein, 663 aa, Klebsiella pneumoniae
MFGKLTLDAVPYHEPIIVVTVAAIIIGGLALLAAITYFGKWSYLWNEWLTSVDHKRLGIMYVIVAIVMLLRGFADAIMMRSQQVLASAGEAGFLPPHHYDQIFTAHGVIMIFFVAMPFVIGLMNLVVPLQLGARDVAFPFLNNLSFWFTVVGVILVNLSLGVGEFAQTGWLAYPPLSGIEYSPGVGVDYWIWALQLSGIGTTLTGINFFVTIIKMRAPGMTMFKMPVFSWASLCANILIIASFPILTVTIALLTLDRYLGTHFFTNDMGGNMMMYINLIWAWGHPEVYILVLPVFGVFSEIAATFSRKRLFGYTSLVWATVCITVLSFIVWLHHFFTMGAGANVNAFFGITTMIIAIPTGVKIFNWLFTMYQGRIVFNSAMMWTIGFIVTFSVGGMTGVLLAVPGADFVLHNSLFLIAHFHNVIIGGVVFGCFAGLTYWWPKAFGFTLNETWGKRAFWFWIIGFFVAFMPLYVLGFMGMTRRLSQQIDPQFHPMLVIAACGAALIACGILCQLIQFYVSIRDRDQNRDLTGDPWGGRTLEWATSSPPPFYNFAIVPQVHERDAFWEMKEKGEAYKQPAHYEEIHMPKNSGAGIVIAAFATVFGFAMIWHIWWMAIASFIGIVATWIIKSFDEDVDYYVPVAEVEKLEKQHFDEINKAGLKNGN

SEQ ID NO: 59898 - protein, 392 aa, Klebsiella pneumoniae
MLNGLKPLSRSLRWGMVGGGGTSQIGYSHRCAALRDNVYTLLAGALDVDAERGRAFGEQLGIAPERCYADYQTLFREEAQRPDGIEVVSVTTPNNTHFAITKAALEAGLHVICEKPLCFTAEEARELVELSKKQNKIVGVTYGYAGYQMIQQARQMIADGLLGEIRIVNMQFAHGFHNQAVELQAESTRWRVTPKFAGPSYVLGDLATHPLFVAETMAPQLNIKRLMCSRQSFVPSRAPLEDNAFVLMEYDNGAVGSMWTSAVNSGAMHSQKVRIVGEKASIEWWDEHPNQLSYEVQGEPARILERGMPYLSPNALADDRIGGGHPEGLFEAWANLYRRYAQAIDATDRDDRAFLQDFWYPDVEAGLHGVYWVEQCVKSADAGSQWVDFTLP

SEQ ID NO: 59899 - protein, 558 aa, Klebsiella pneumoniae
MKSWDVIVIGSGAAGFAAAVTACCKGLSVLMLEKAGQFGGTSAISGGAVWLHDTDQARAEGKSGSAEAMKTYLRTIIGEGQYREDLAEAFVSAGREALAFLEREGAVKYSLRPLSPDYYPDEPGAVDVGRALEVVEYDGRELGDAFRDLRSPPPGMLLFGGMMVNRVDIQHFLDMRRSLRSLAHCTRLLLRYARDRVKYPRGTRLAMGNALIARMATTALRKGMNLRLNVNVLALCEAQGAVHGVEIEYQGQRETLHARRGVVLAAGGFAAGALAARYRPHTREHFTMSPPANDGAALHLAAALNAREGADRASNFFWAPVSVLTRADGSEERFPHLVTDRAKPGVIAVNQRAVRFVNESSSYHHFASAMQDAAENAPCFLLCDAQAMKRYGLGLARPAPVNNDALVAAGYLHKADTLAALAQQLGLDAQTLSETVARYNRDAAQGVDREFAKGGNSYNRAMGDPGHQPDACNAPLLSAPFYAIKLYTGDLGTSRGLVTTADAQVVNTEGHPIPGLYAVGNDMDSLMAGTYPGPGITLGPGLTFGYLAACHLAQHSTH

SEQ ID NO: 59900 - protein, 323 aa, Klebsiella pneumoniae
MACGEFSLIARYFDRVKSARLDVETGIGDDCALLHIPEKKTLAISTDTLVAGNHFLPDIDPADLAYKALAVNLSDLAAMGAEPAWLTLALTLPEVDEVWLEAFSDSLFVQLDYYDMQLIGGDTTRGPLSMTLGIHGFVPPGRAMKRAGAKPGDWIYVTGTPGDSAAGLAVLQNRLTVDEPSDADYLLARHLRPMPRVLQGQALRDLATSAIDLSDGLISDLGHILKASGCGARIDLDAMPYSDAMLRQVDSEQALRWALAGGEDYELCFTVPELNRGALDVALGHLGARFTCIGQIAPESEGLQFIRDGKPVALDLKGYDHFA

SEQ ID NO: 59901 - protein, 375 aa, Klebsiella pneumoniae; identical to SEQ ID NO: 43400

SEQ ID NO: 59902 - protein, 367 aa, Klebsiella pneumoniae
MQDEMYMARALKLAARGRFTTHPNPNVGCVIVKDGEIVGEGFHYRAGEPHAEVHALRMAGEKARGATAYVTLEPCSHHGRTPPCCDALIAAGVSRVVAAMQDPNPQVAGRGLYRLQQAGIEVSHGLMMNEAEALNKGFLKRMRTGFPWVQLKLGASLDGRTAMASGESQWITSPQARRDVQRLRAQSHAILTSSATVLADDPALTVRWQELSADTQALYPEENLRQPLRVVIDSQNRVTPEHRIVQQAGETLFARLRADERQWPESARTLLVPEHNGHLDLVLLMMLLGKQQINSVWVEAGATLAGALLQAGLVDELIVYIAPKLLGNAARGLCALPGLEELSQAPHFKFNEIRQVGPDVCLHLTTA

SEQ ID NO: 59903 - protein, 299 aa, Klebsiella pneumoniae
MDFPQQLQACVEQANEALRRFIAPQPFQNTPLVEAMHYGALLGGKRLRPFLVYATGEMFGVCRTTLDAPAAAVECIHAYSLMHDDLPAMDDDDLRRGLPTCHIKFGEANAILAGDALQTLAFSILSDAPMVDVPDRDRLAMVSELAQASGVAGMCGGQALDLQAEGQQVDLQALERIHRHKTGALIRAAVRMGALSAGERGRAALPALDRYAENIGLAFQVQDDILDVVGDTATLGKRQGADQQLGKSTYPALLGLEQARKKAHDLIADARRSLDELAAQSLDTSALEALANYIIQRDK

SEQ ID NO: 59904 - protein, 179 aa, Klebsiella pneumoniae
MTRRYLKLAIAGCLFTLTACAQQSEIRQMHQSVSTLSQEMTQLNQQTIKITQQNALNAKSTRGVYLLPEAKTPARLESQIGTLRMSVGSITPDGDGSRLTLRIQGESNDPLPAFTATVASGQITGTTHSYQEVNVQDQLISAPASTLAPSDVDIPLRLNVTPDKVGFIRVHDIQPAAAQ

SEQ ID NO: 59905 - protein, 284 aa, Klebsiella pneumoniae
MKQKVVSIGDINVANDLPFVLFGGMNVLESRDLAMRICEHYVTVTQKLGIPYVFKASFDKANRSSIHSYRGPGLEEGMKIFQELKQTFGVKIITDVHEASQAQPVADVVDVIQLPAFLARQTDLVEAMAKTGAVINVKKPQFVSPGQMGNIVDKFIEGGNDKVILCDRGANFGYDNLVVDMLGFGVMKKASNNSPVIFDVTHALQCRDPFGAASGGRRAQVSELARAGMAVGIAGLFIEAHPDPDHAKCDGPSALPLDKLEPFLKQMKAIDDLVKSFDELDTSK

SEQ ID NO: 59906 - protein, 363 aa, Klebsiella pneumoniae
MGFKCGIVGLPNVGKSTLFNALTKAGIEAANFPFCTIEPNTGVVPMPDPRLDKLAEIVKPQRILPTTMEFVDIAGLVKGASKGEGLGNQFLTNIRETEAIGHVVRCFENDNIIHVAGKVNPAEDIDVINTELALSDLDTCERAIHRVSKKAKGGDKDAKVELAALEKCLPQLENAGMLRALDLTKEEKEAIRYLSFLTLKPTMYIANVNEDGFENNPYLDQVRAIAEQEGSVVVPVCAAVEADIAELDDEERDEFMAELGLEEPGLNRVIRAGYALLNLQTYFTAGVKEVRAWTIPVGATAPQAAGKIHTDFEKGFIRAQTIAYEDFIAYKGEQGAKEAGKMRAEGKDYIVKDGDVMNFLFNV

SEQ ID NO: 59907 - protein, 315 aa, Klebsiella pneumoniae
MPDMKLFAGNATPELAQRIANRLYTSLGDAAVGRFSDGEVSVQINENVRGGDIFIIQSTCAPTNDNLMELVVMVDALRRASAGRITAVIPYFGYARQDRRVRSARVPITAKVVADFLSSVGVDRVLTVDLHAEQIQGFFDVPVDNVFGSPILLEDMLQLNLDNPIVVSPDIGGVVRARAIAKLLNDTDMAIIDKRRPRANVSQVMHIIGDVAGRDCVMVDDMIDTGGTLCKAAEALKERGAKRVFAYATHPIFSGNAIQNIKNSVIDEFVVCDTIPLAPEIKALDKVRTLTLSGMLAEAIRRISNEESISAMFEH

SEQ ID NO: 59908 - protein, 829 aa, Klebsiella pneumoniae
MTKPVLVLVGHGMVGHHFLEQCVSRNLHQQYRIVVFGEERYPAYDRVHLSEYFAGRSAESLSLAAGDFFIEHGIELRLGEAVATIDRDARLVRDAEGHEIHWDKLVLATGSYPFVPPIPGNDLAGCFVYRTLDDLDRIAAHAAAAKSGVVIGGGLLGLEAANALKQLGLETQVVEFAPNLMAVQLDNGGAAMLREKIVALGVGVHTSKATTAIVREADGLRLNFADGGALRTDMVVFSAGIRPQDALARGCALQVGERGGIHIDDQCRTSDPNVLAIGECALWDNKIYGLVAPGYQMARIAAATLAGEDACFSGADMSTKLKLLGVDVASFGDAQGRTPGCQSYQWTDGPQQIYKKIVVSQDGKALLGGVLVGDASDYATLLQMMLNGMALPPRPESLILPALEGAAPKALGVAALPDSAPICSCHNVSKGDICQAVNNGAGDMSAIKSCTRAATGCGGCSALVKQVMEYQLAEQGVEVKKDVCEHFPWSRQEIYHLVRVNHIHTFEQLISRYGQGHGCDVCKPLVASVLASCWNEYLLKPAHLPLQDTNDRYFANIQKDGSYSVVPRMAAGEVTPDGLIAIGQIAKRYQLYSKVTGGQRIDLFGARLEQLPAIWRELADAGFETGHAYGKSLRTVKSCVGSTWCRYGVQDSTGLAVRLEHRYKGLRAPHKIKMAVSGCTRECAEAQGKDIGVIATDKGWNLYVCGNGGMKPRHADLFASDLDEATLIRSIDRLLMFYIRTADRLQRTSTWMDNLEGGVTYLRQVVLEDSLGIGEELEQEMARIVDSYQCEWQTTLNDPQRLALFRSFVNSDQPDEAVQRRDLRGQPQP

SEQ ID NO: 59909 - protein, 418 aa, Klebsiella pneumoniae
MTLLALGINHKTAPVALRERVTFSPETLDKALESLLAQPMVQGGVVLSTCNRTELYLSVEEQDNLQEALIRWLCNYHGLNEEDLRKSLYWHQDNDAVSHLMRVASGLDSLVLGEPQILGQVKKAFADSSRGHLNVSELERMFQKSFSVAKRVRTETDIGASAVSVAFAACTLARQIFESLSSVTVLLVGAGETIELVARHLREHHVRKMVIANRTRERAQALAEEVGAEVIALSDIDERLKEADIIISSTASPLPIIGKGMVERALKARRNQPMLLVDIAVPRDVEPEVGKLANAYLYSVDDLQNIIQHNLAQRKAAAVQAESIVEQETSEFMAWLRAQSASETIREYRSQSEQVREELTAKALAALEQGGDAQEIMQDLARKLTNRLIHAPTKSLQQAARDGDDERLHILRNSLGLE

SEQ ID NO: 59910 - protein, 360 aa, Klebsiella pneumoniae
MKSSIVAKLEALYERHEEVQALLGDAATIADQDKFRALSREYAQLSDVARCYTDWRQVQEDIETAQMMLDDPEMREMAQEELRDAKEKGDQLEQQLQVLLLPKDPDDERNAFVEVRAGTGGDEAALFAGDLFRMYTRYAESRRWQVEILSANEGEHGGFKEVIAKISGDGVYGRLKFESGGHRVQRVPATESQGRIHTSACTVAVMPELPEAEMPDINPADLRIDTFRSSGAGGQHVNTTDSAIRITHLPTGIVVECQDERSQHKNKAKALSVLGARIRAAEVAKRQQAEASTRRNLLGSGDRSDRNRTYNFPQGRVTDHRINLTLYRLDEAMEGKLDMLIEPIVQEHQADQLAALSEQE

SEQ ID NO: 59911 - protein, 282 aa, Klebsiella pneumoniae
MTFQAWLQQAIARLAESDSPRRDAEILLGHVTGRARTWILAFGETTLSADEAAKLEALLVRRQRGEPIAHLVGQREFWSLPLFVSPATLIPRPDTECLVEQALARLPTAPCRILDLGTGTGAIALALASERPDCEVTAVDVMPDAVALALRNAEHLGIANVTISQSDWFSALAGQRFATIVSNPPYIDAADPHLAEGDVRFEPLTALVAGDQGLADLAHIIREGRQYLQPGGWMLLEHGWTQGEAVRALFREAGYLDVATCRDYGDNERLTLGRLPDMENVG

SEQ ID NO: 59912 - protein, 130 aa, Klebsiella pneumoniae
MNLFTAVLYLHIATVAVSVGLFVLRYWWMYHQSPLLNQRWVRIAPHCSDTLLFLSGAGLMAITHYLPFTEDGAWLTEKLFGVIIYIALGFIALGRRRPRSQQSRFIAFLLALVVLFIIIQLAITRIPILG

SEQ ID NO: 59913 - protein, 462 aa, Klebsiella pneumoniae
MSQSSLPEKANRSVITDWRPEDPEFWQQRGHRVASRNLWISVPCLLLAFCVWMLFSAVAVNLNKVGFQFTTDQLFMLTALPALSGALLRVPYAFMVPLFGGRRWTAFSTGIMIVPCVWLGFAVQDTSTPFSIFVIISLLCGFAGANFASSMANISFFFPKAKQGGALGVNGGLGNMGVSVMQLVAPLVVSISIFAVFGGNGSEQPDGSMLYLENAAWIWVPFLIIFTLAAWFFMNDLSASKASLSEQLPVLKRLHLWIMALLYLATFGSFIGFSAGFAMLSKTQFPDVQILHYAFFGPFIGALARSMGGAISDRLGGTRVTLVNFVVMAVFCALLFLTLPTNGQGGNFIAFFAVFMVLFLTAGLGSASTFQMISVIFRKLTMDRVKAQGGSEAQAMREAATDTAAALGFISAIGAIGGFFIPKAFGISLDLTGSPAGAMKVFLVFYIACVVITWAVYGRKRQ

SEQ ID NO: 59914 - protein, 229 aa, Klebsiella pneumoniae
EARKPENLPLLLTDHMVCELKAAQNAMLLVRRYVADKADADELVACLKPYEDFTYRRGPEPDLVALHKRINKSAMPQTDDPWGRQLLDSMILLIKEELHHFWQVREMMLARDIPYVKITASNYARGLRREVRSHEPVMLIDKLICGAYIEARSCERFAALAPWLDDDLQKFYLSLLRSEARHYQDYLDLAQKIAGEDISERVRQLGEAEAALILRPEAEFRFHSGVPVA

SEQ ID NO: 59915 - protein, 489 aa, Klebsiella pneumoniae
MNIKSAHFLPGTNKRLGDKYLLLECLGDGSHGWVWRAERLQDGKIVAVKIPKDITREDRQLAEGKELLDVEPHENIVQIFDMGRIDNEWFYIEMEYFPSQTLAQKLDDRQRNFGQTYERLFRIYRQVLCAVHYLTELPVPISHGDIKPHNILVGERDLVKLTDFGSSALPEEIYVRTRENGGTVLYSAPEFSNVDSRRGSLEELLLGDIYSLGVLLYQLLTGKLPHDTPAQVQRHAPFKLPTEINSSIHTDLEQVVLTCLQKRAEDRFSTISDLIYAFDAATTKQLKAGAIAPVFQTKLDQDWSSAVLEAMSNQSYQKAAQLASQEYGRSKDLQALHQQLIALYRANRLFDFEKVVEDNKAILLEDKLTQPAALFELIVKTNLQLRNISQAKFWLLQRKQVEAENATTMYLESSILGLEAKYTEARALLEKVNQTTPMKFHVLSQLILVCEQMRDYSGAAAYLKAALRVAPLDNSMKEKKELYAKLGVI

SEQ ID NO: 59916 - protein, 391 aa, Klebsiella pneumoniae
MVLLVHPNGSKYWRLRYRFGGKEKMLALGKYPEVSLADARNRRDEARKLLANGVDPSENKKAVKVEHEQEAITFEVVAREWHASNQKWSASHSARVLKLEDNLFAAIGKRNIADLKTRDLLVPIKAVESSGRLEVAARLQQRTTAIMRFAVQSGLIDYNPAQKIAGAVVTAKRQHRAALELNCIPELLHRIDHYSGRPLTRLAVELTLLVFIRSSELRFARWSEVDFETAMWTIPGEREPLEVVKHSQRGSKMRTPHLVSLSRQALSILEKIKSMNGNRELIFVGDHDPRKNTVNKALRVMGYDTKVEVCGHGFRTMACSSLIESGLWSKDAVERQMSHQERNTVRAAYIHKAEHLGERRLMLQWWADYLDANKMAAITPFDYAKINSPFR

SEQ ID NO: 59917 - protein, 503 aa, Klebsiella pneumoniae
MEFSVKSGSPEKQRSACIVVGVFEPRRLSPIAEQLDKISDGYISALLRRGELEGKPGQTLLLHHVPNILSERILLIGCGKERELDERQYKQVIQKTINTLNDTGSMEAVCFLTELHVKGRNNYWKVRQAVETAKETLYSFDQLKTNKSEPRRPLRKMVFNVPTRRELTSGERAIQHGLAIAAGIKAAKDLGNMPPNICNAAYLASQARQLADTYSKNVITRVIGEQQMRELGMNAYLAVGNGSQNESLMSVIEYKGNPAEDARPIVLVGKGLTFDSGGISIKPAEGMDEMKYDMCGAAAVYGVMRMVAELQLPLNVIGVLAGCENMPGGRAYRPGDVLTTMSGQTVEVLNTDAEGRLVLCDVLTYVERFEPEAVIDVATLTGACVIALGHHITGLMSNHNPLAHELIGASELAGDRAWRLPLADEFQDQLESNFADMANIGGRPGGAITAGCFLSRFTRKYNWAHLDIAGTAWRSGKAKGATGRPVALLSQFLLNRAGFNGEE

SEQ ID NO: 59918 - protein, 147 aa, Klebsiella pneumoniae
MKNATFYLLDNDATVDGLSAVEQLVCDIAAERWRNGKRVLIACEDEQQAIRLDEALWSRPPESFVPHNLAGEGPRGGAPVEIAWPQKRNSSPRDILISLRLNFADFATAFTEVIDFVPYEDNLKQLARERYKAYRMAGFNLNTATWK

SEQ ID NO: 59919 - protein, 931 aa, Klebsiella pneumoniae
NLEIMEKTYNPQDIEQPLYEHWEKQGYFKPNGDESQESFCIMIPPPNVTGSLHMGHAFQQTIMDTMIRYQRMQGKNTLWQAGTDHAGIATQMVVERKIAAEEGKTRHDYGRDAFIDKIWQWKAESGGTITRQMRRLGNSVDWERERFTMDEGLSNAVKEVFVRLYKEDLIYRGKRLVNWDPKLRTAISDLEVENRESKGSMWHIRYPLADGAKTADGKDYLVVATTRPETLLGDTGVAVNPEDPRYKDLIGKFVVLPLVNRRIPIVGDEHADMEKGTGCVKITPAHDFNDYEVGRRHQLPMINILTFDGDIRESAEVYDTKGNESDVYSSEIPAEFQKLERFAARKAVVAAVDALGLLEEIKPHDLTVPYGDRGGVVIEPMLTDQWYVRADVLAKPAVEAVENGDIQFVPKQYENMYFSWMRDIQDWCISRQLWWGHRIPAWYDNDGNVYVGRSEDEVRQENNLSADVALRQDEDVLDTWFSSALWTFSTLGWPENTDALRQFHPTSVMVSGFDIIFFWIARMIMMTMHFIKDENGKPQVPFKTVYMTGLIRDDEGQKMSKSKGNVIDPLDMVDGITLPELLEKRTGNMMQPQLAEKIRKRTEKQFPNGIEPHGTDALRFTLAALASTGRDINWDMKRLEGYRNFCNKLWNASRFVLMNTEDQDCGFNGGEMVLSLADRWIIAEFNHTVKAYREALDNFRFDIAAGILYEFTWNQFCDWYLELTKPVMNGGSEAELRGTRHTLVTVLEGLLRLAHPIIPFITETIWQRVKAICGITADTIMLQPFPQYDASQVDDAALADTEWLKQAIVAVRNIRAEMNIAPGKPLELLLRGCSKEAERRVNDNRSFLLNLARLESITVLPADDKGPVSVTKIVDGAELLIPMAGLINKEDELARLAKEVAKIEGEIGRIESKLASEGFVARAPEAVIAKE

SEQ ID NO: 59920 - protein, 482 aa, Klebsiella pneumoniae
  MISC_FEATURE (94)..(94): X=any amino acid
NFKLAPALTLVCGSWGGNSISENVGPKHLINKKTVAKRAENMLWHNLPKSIYFRRGSLPIALDEVITDGHKRALIVTDRFLFTTAMPIRSLPYXKLRVLRTEVFFEVEADPTLTIVRKGADLANSFKPDVIIALGGGSPMMRRKSCGSCTNIRKPTFEELALRFMDIRKRIYKFPKMGVKAKMVAITTTSGTGSEVTPFAVVTDDATGQKYPLADYALTPDMAIVDANLVMDMPKSLCAFGGLDAVTHALEAYVSVLASEFSDGQALQALKLLKEYLPASYHEGSKNPVARERVHSAATIAGIAFANAFLGVCHSMAHKLGSQFHIPHGLANALLICNVIRYNANDNPTKQTAFSQYDRPQARRRYAEIADHLGLSAPGDRTAAKIEKLLAWLESIKAELGIPKSIREAGVQEADFLAHVDKLSEDAFDDQCTGANPRYPLISELKQILLDTYYGREFVEGEAGAKAEVAPVKAEKKAKKSA

SEQ ID NO: 59921 - protein, 233 aa, Klebsiella pneumoniae
MTTLSCKVTSVEAITDTVYRVRLVPEAAFSFRAGQYLMVVMDERDKRPFSMASTPAEQEFIELHIGASELNLYAMAVMDRILKEREIEVDIPHGEAWLRDDEDRPLILIAGGTGFSYVRSILLSALARNPDRDIAIYWGGREAKHLYDLAELEALSIKHPNLRIEPVVEQPEEGWRGRSGTVLTAVLQDYGTLAEHDIYIAGRFEMAKIARDLFCNERGAREDRLFGDAFAFI

SEQ ID NO: 59922 - protein, 330 aa, Klebsiella pneumoniae
MFGQKKDWETRENAFAAFSMGPLTDFWRQREEAEFKGVDDVPVRFVRFCAQHNDRLVLICPGRIESYVKYAEVAYDLFHCGFDVMIIDHRGQGRSGRLLSDTHRGHVVNFSDYVDDLAALWQQQVVPGHWRKRFILAHSMGGAIATLFLQRYRAHCDAIALCAPMFGIIIRLPDWMVRHILDWAEGHQRIREEYAIGTGRWRALPFAVNVLTHSRQRYRRNLRFYADEPRLQVGGPTWHWVREGMLAGDEVLANVEKDTAPTLLLQAEEERVVDNLMHDRYCELRAAAGHPCEGGKPLVIEGAYHEILFEKDAMRSVALNAIVEFFNRHT

SEQ ID NO: 59923 - protein, 266 aa, Klebsiella pneumoniae
MYQVVASDLDGTLLSPDHFLTPYAKETLKLLTARGINFVFATGRHYIDVGQIRDNLGIRSYMITSNGARVHDSDGQQIFAHNLDRDIAADLFEIVRNDPKIVTNVYREDEWYMNRHRPEEMRFFKEAVFNYKLYEPGELDPQGISKVFFTCEDHEHLLPLEQAMNARWGDRVNVSFSTLTCLEVMAGGVSKGHALEAVAKMLGYTLSDCIAFGDGMNDAEMLSMAGKGCIMANAHQRLKDLHPELEVIGSNADDAVPHYLRKLYLD

SEQ ID NO: 59924 - protein, 453 aa, Klebsiella pneumoniae
  MISC_FEATURE (452)..(452): X=any amino acid
TKARADQIRADLIEERRELDIELSAARQQLAQEAHWREECELLNNELRSLRDINTSLEADLREVTTRLESTQLHAEDKIRQMMNSEQRLSEQFENLANRIFEHSNRRVDEQNRQSLHGLLTPLREQLDGFRRQVQESFGQEARERHTLAHEIRNLQQLNAQMAQEALNLTKALKGDNKTQGNWGEVVLTRVLEASGLREGYEYQTQVSIETDNRSRMQPDVIVRLPQGKDVVIDAKMTLVAYERYFNAEDDYTREVALQEHLASVRNHIRLLGRKDYQQLPGLRSLDYVLMFIPVEPAFLLAIDRQPELISEALQNNIMLVSPTTLLVALRTIANLWRYEHQSRNAQKIAERAGRLYDKMRLFVDDMSAIGQSLDKAQESYRQAMKKLASGRGNLLAQAEAFRGLGVEVKRGINPDLVEQATAQDEQYRLEDEDNLPENDAFSPDSAETGAXP

SEQ ID NO: 59925 - protein, 251 aa, Klebsiella pneumoniae
MVEDSQETTHFGFQTVAKEQKADMVAHVFHSVAAKYDVMNDLMSFGIHRLWKRFTIDCSGVRRGQTVLDLAGGTGDLTAKFSRLVGETGRVMLADINDSMLKMGREKLRNIGIVGNVEYVQANAEALPFADNTFDCITISFGLRNVTDKEKALRSMYRVLKPGGRLLVLEFSKPIIEPLSKAYDAYSFHILPKVGELVAKDGDSYRYLAESIRMHPDQETLKGMMQDAGFENVDYYNLTAGIVALHRGYKF

SEQ ID NO: 59926 - protein, 300 aa, Klebsiella pneumoniae
MTDSPLFSAVARFLRHLGVERQLSPITLLNYQRQLDALIALADEAGLKSWSQCDAAQVRSFAVRSRRAGLGPASLALRLSALRSFFDWLVGQGELSANPAKGIAAPKIPRHLPKNIDVDDVNRLLDIDLNDPLAVRDRAMLEVMYGAGLRLSELVNLDIKHLDLESGEVWVMGKGSKERRLPIGRNAVVWIEHWLDLRGLFGTDDDALFLSKLGKRISARNVQKRFAEWGIKQGLNSHVHPHKLRHSFATHMLESSGDLRGVQELLGHANLSTTQIYTHLDFQHLASVYDAAHPRAKRGK

SEQ ID NO: 59927 - protein, 238 aa, Klebsiella pneumoniae
MRFYRPLGQISALTFDLDDTLYDNRPVIDRTMHESLAFVRSYHPSLSQFDAHELNQLRQTLLAAEPEIYHDVTVWRHRALELGMRNAGLSAEAAKAGADAAMEHFAHWRSRVDVPQETHDTLAKLAKKWPLVAITNGNARPELFGLSDYFRFVLRAGPDGRSKPFADMYHLAAERLNVPLGQILHVGDDLTTDVAGAIRCGMQACWIKPQGADLMHTADSRLLPHIEISRLASLTSLI

SEQ ID NO: 59928 - protein, 722 aa, Klebsiella pneumoniae
MPMDVSYLLDSLNDKQREAVAASRTNMLVLAGAGSGKTRVLVHRIAWLLSVENCSPYSIMAVTFTNKAAAEMRHRIGQLMGTTQGGMWVGTFHGLAHRLLRAHHLDANLPQDFQILDSEDQLRLLKRLIKAMNLDEKQWPPRQAMWYINSQKDEGLRPHHIQSYGNPVEQTWQKVYQAYQEACDRAGLVDFAELLLRAHELWLNKPHILQHYRERFTNILVDEFQDTNNIQYAWIRLLAGDTGKVMIVGDDDQSIYGWRGAQVENIQRFLNDFPGAETIRLEQNYRSTSNILSAANALIENNNGRLGKKLWTDGADGEPISLYCAFNDLDEARFVVNRIKTWQENGGALEQCAILYRSNAQSRVLEEALLQASMPYRIYGGMRFFERQEIKDALSYLRLIANRNDDAAFERVVNTPTRGIGDRTLDVVRQTSRDRQLTLWQASRELLKEKALAGRAASALQRFMELIDALAQETTDMPLHVQTDRVIKDSGLRAMYEQEKGEKGQTRIENLEELVTATRQFSYNEEDEDLMPLQAFLSHAALEAGEGQADTWQDAVQLMTLHSAKGLEFPQVFIVGVEEGMFPSQMALDEGGRLEEERRLAYVGVTRAMQKLTLTYAETRRLYGKEVYHRPSRFIGELPQECVEEVRLRATVSRPVNHQRLGAPIAESDTGYKLGQRVRHPKFGEGTIVNLEGSGEHSRLQVAFQGQGIKWLVAAYARLEAV

SEQ ID NO: 59929 - protein, 608 aa, Klebsiella pneumoniae
MAQAEVLNQESLAKQVLQETFGYQQFRPGQETIIETALEGRDCLVVMPTGGGKSLCYQVPALVMGGLTVVVSPLISLMKDQVDQLLANGVAAACLNSTQSREQQQEVMAGCRSGQVRLLYIAPERLMLDNFLEHLANWNLAMLAVDEAHCISQWGHDFRPEYAALGQLRQRMPQIPFMALTATADDTTRRDIVRLLGLNDPLIQVSSFDRPNIRYMLMEKFKPLDQLMRYVQDQRGKSGIIYCNSRSKVEDTAARLQSRGISAAAYHAGLENDVRAEVQEKFQRDDLQIVVATVAFGMGINKPNVRFVVHFDIPRNIESYYQETGRAGRDGLPAEAMLFYDPADMAWLRRCLEEKPAGPLQDIERHKLNAMGAFAEAQTCRRLVLLNYFGEGRQEPCGNCDICLDPPKQYDGLMDARKALSTIYRVNQRFGMGYVVEVLRGANNQRIREMGHDKLPVYGIGREQSHEHWVSVIRQLIHLGLVTQNIAQHSALQLTEAARPVLRGEVPLQLAVPRIVALKPKAMQKSFGGNYDRKLFAKLRKLRKAIADEENIPPYVVFNDATLIEMAEQSPLTAGEMLSVNGVGTRKLERFGKPFMALIRAHVDGDDE

SEQ ID NO: 59930 - protein, 167 aa, Klebsiella pneumoniae
MSTAKLVKSKASNLVYTRNDVADSEKKATIELLNRQVIQFIDLSLITKQAHWNMRGANFIAVHEMLDGFRTALTEHLDTMAERAVQLGGVALGTTQVINSKTPLQSYPLDIHHVQDHLKALADRYAVVANDVRKAIDEAKDEDTADIFTAASRDLDKFLWFIEANIE

SEQ ID NO: 59931 - protein, 154 aa, Klebsiella pneumoniae
MAQVDLTGALFALGAGACWAVYILTGQRAGEEHGPATVAMGSLIASLVFVPLGMAQATDTLWQWSLLPLGLGIAILSTALPYSLEMMALTRLPTRTFGTLMSLEPALAALSGMIFLGETLKLSQTLALGAIIIASMGATLTMQRQSKVEQVDIN

SEQ ID NO: 59932 - protein, 330 aa, Klebsiella pneumoniae
MSQSQPRLKTSAMIASIADEGQATVPAPFGVALSKLAAQRPDIVGMTADLSKYTDLHIFAQAFPDRFFQMGMAEQLLMAAAGGMAKEGFIPFATTYAAFATRRAYDFIHQVIAEEHLNVKICAALPGLTTGYGPSHQATEDLAIMRGIPGMVIVDPCDALEIEQAVPAIADHQGPVYMRLLRGKVPLVLDKYDYQFELGKAKLLEDGNDVLIISSGLMTMRALEAVEKLRADNIGVAVLHVPTIKPLDEKAIIEQASKPGRLVVTAENHTAVGGLGEAVAALLMRKGVRCELDSVGLPDAFLLAGALPTLHDRYGISTAKIVEKIKYRLR

SEQ ID NO: 59933 - protein, 301 aa, Klebsiella pneumoniae
MRNRTFADLDRVVALGGGHGLGRVMSSLSSLGSRLTGIVTTTDNGGSTGRIRRSEGGIAWGDMRNCINQLIAEPSVASAMFEYRFGGNGELSGHNLGNLMLKALDHLSVRPLEAINLIRNLLKVDAFLIPMSEQPVDLMALDHEGHEVYGEVNIDQLDKMPQELMLTPPVPATREAVEAIAEADLILIGPGSFYTSLLPILLLDEMAQALRRTPAPMVFIDNLGKEHSPAARLSLAERIAIMERYVGKRVVDAVIAGPKADISGIDDRLVIQRPLEASDVPYRHDRALLRGALEKAIQLPG

SEQ ID NO: 59934 - protein, 329 aa, Klebsiella pneumoniae
MASQLTDAYARKFYYLRLSITDVCNFRCTYCLPNGYKPGAVNNNGFLSVDEVRRVTRAFSALGTEKVRLTGGEPSLRRDFTEIIAAVRENPAIRQIAVTTNGYRLARDVERWRDAGLTAINVSVDSLDARQFHAITGQDKFHQVMDGIDAAFAAGFDKVKVNTVLMRDVNHHQLDTFLAWIQPRRIQLRFIELMETGEGSDLFRRHHLSGMVLRDELLRRGWIHQIRQRSDGPAQVFCHPDYAGEIGLIMPYEKDFCATCNRLRVSSVGKLHLCLFGEGGVDLRDLMAEDQQQAALEARIAEALTHKKQTHFLHQGNTGITQNLSYIGG

SEQ ID NO: 59935 - protein, 170 aa, Klebsiella pneumoniae
MSQASAEFIPTRIAILTVSSRRGEEDDTSGHWLREAAQEAGHQVVEKAIVKENRYAIRAQVSAWIASDNVQVVLITGGTGFTDGDQAPEALLPLFDREVEGFGEVFRMLSFEEIGTSTLQSRAVAGVANRTLIFAMPGSTKACRTAWDNIIAPQLDARTRPCNFIPHLKK

SEQ ID NO: 59936 - protein, 204 aa, Klebsiella pneumoniae
MYFYQPSQGHGLPHDPLNAIIGPRPIGWIASQDAEGQRNLAPYSFFNCFNYRPPIIGFASSGWKDSVRNIVETKEFVWNLATRPLAMAMNETSASIPHHEDEFVRAGLNAAASRLVSAPRVAESPVNFECRLSQCIQLTTADGNPVDTWLVLGEVVAVHIDESLLDNGIYQTARAQPILRAGGPSAYYGIDDSLRFDMIRPDAR

SEQ ID NO: 59937 - protein, 579 aa, Klebsiella pneumoniae
MSETVIALNGLSRRFPGMDRPAVAPLTCTIRAGYVTGLVGPDGAGKTTLMRMLAGLLKPDEGRASVIGFDPLKDDSALHAVLGYMPQKFGLYEDLTVMENLTLYADLRSVTGEARKKIFDRLLEFTSLGPFTERLAGKLSGGMKQKLGLACTLVGDPKVLLLDEPGVGVDPISRRELWQMVHELAGDGMLILWSTSYLDEAEQCRDVLLMNEGKLLYQGEPTALTQTMAGRSFLVSSPQENNRRLLQRALKLPQVSDGVIQGKSVRLILKKDARIEEVQQHGDMPPLQVADTAPRFEDAFIDLLGGAGTAESPLGAIIHRVDGSKEETVIEAQSLTKKFGDFAATDHVDFQVKRGEIFGLLGPNGAGKSTTFKMMCGLLVPTSGKALVLGMDLKISSGKARQHLGYMAQKFSLYGNLSVEQNLRFFSGVYGLRGRGQNEKIARMSDAFGLKSIARHAADELPLGYKQRLALACSLMHEPDILFLDEPTSGVDPLTRREFWLHINSMVDKGVTVMVTTHFMDEAEYCDRIGLVYHGKLIASGTPDALKAQAADDSQTDPTMEQAFITLINRWDKENSHGQ

SEQ ID NO: 59938 - protein, 240 aa, Klebsiella pneumoniae
MIEFKNVSKHFGPTQVLHDISLKINQGEVVVIIGPSGSGKSTMLRCINKLEEITSGDLIVDGLKVNDPKVDERLIRQEAGMVFQQFYLFPHLTALENVMFGPLRVRGASKQAAEKQAKELLAKVGLAERAHHYPSELSGGQQQRVAIARALAVKPKMMLFDEPTSALDPELRHEVLKVMQDLAEEGMTMVIVTHEIGFAEKVASRLIFIDKGRIAEDGNPQELVKNPPSPRLREFLQHVA

SEQ ID NO: 59939 - protein, 219 aa, Klebsiella pneumoniae
MQFDWSAIWPAIPILLEGAKMTLWISVLGLAGGLIIGLVAGFARCFGGWIANHIALVFIEIIRGTPIVVQVMFIYFALPMAFSDLRIDPFSAAVVTIMINSGAYIAEITRGAVLSIHKGFREAGLALGLSRRETIRHVILPLALRRMLPPLGNQWIISIKDTSLFIVIGVAELTRQGQEIIAGNFRALEIWSAVAVIYLIITLVLSFILRRLERRMKIL

SEQ ID NO: 59940 - protein, 236 aa, Klebsiella pneumoniae
MITLPARPESLTFAPQQSALIVVDMQNAYASQGGYLDLAGFDVSATRPVIDNINTAVAAARAAGMLIIWFQNGWDDQYVEAGGPGSPNYHKSNALKTMRQRPELQGKLLAKGGWDYQLVDELTPQEGDIVLPKPRYSGFFNTPLDSILRSRGIRHLVFTGIATNVCVESTLRDGFFLEYFGIVLEDATHQAGPAFAQQAALFNIETFFGWVSDVESFCHALSPATPLALAKEKRYA

SEQ ID NO: 59941 - protein, 440 aa, Klebsiella pneumoniae
MALFDFPRWKLTSPAAESGVVAPDERLSAGQTLVMGVQHAVAMFGATVLMPLLMGLDPNLSILMSGVGTLLFFVVTGGRVPSYLGSSAAFVGVVIAITGFNGQGLNPHLSVALGGIIACGLVYTLIGLVVMKIGTRWIERLMPPVVTGAVVMAIGLNLAPIAVRSVSASAFDSWMAVLTVLCIGIVAVFTRGMLQRLLILVGLIVACALYALLANGLGLGKPLDFSPLAQAAWFGLPHFTPPSFNGQAMMLIAPVAVILVAENLGHLKAVAGMTGRNMDPYMGRAFVGDGLATMLSGSVGGSGVTTYAENIGVMAVTKVYSTLVFVAAALIAMLLGFSPKFGALIHTIPGPVIGGASIVVFGLIAVAGARIWVQNRVDLSQNSNLIMVSVTLVLGAGDFALSLGGFTLGGIGTATFGAILLHALLHRGTREAKEARVTPV

SEQ ID NO: 59942 - protein, 110 aa, Klebsiella pneumoniae
MQRIIIPTHYVHTRSTPLWTKETAPASIWRRHLDAGTRQGVYPRLSVMQGAIRYLGYADETSPEPVETLTIEAGQFGVFPPEKWHCIEALSEDTVFNVDFYVDPKILIEG

SEQ ID NO: 59943 - protein, 83 aa, Klebsiella pneumoniae
MVLYIPQQAVEAVNDLLSKLPDDREEGEFLLTVTNNNNGVSVDKTFSSLAALRDPLTAADAVKDLINIVRGYESDEETNVCGW

SEQ ID NO: 59944 - protein, 700 aa, Klebsiella pneumoniae
MPRPIPLERYRNIGISAHIDAGKTTTTERILFYTGMSHKLGEVHDGAATTDWMAQEQERGITITSAAVSCFWPGMDRSFEPHRINIIDTPGHVDFTIEVERSMRVLDGAVMVYDSVGGVQPQSETVWRQANKYHVPRLAFVNKMDRPGADFFRVVQMMIDRLKANPVPIVIPIGAEEHFTGVVDLVKMRAILWDDATQGMTFSYGPVPDDLLATAQQWREKMVSAAAEASDELMDKYLETGELDEAEIVAGLRQRTVKGEIQAVLCGSAFKNKGVQRMLDAVVELMPSPLDIPAIQGVDEQGQPAERHPSDDEPLSALAFKLMTDPYVGQLTFIRVYSGTLKKGDAVWNPVKGKKERIGRIVLMQANDRHEVDELHAGDIAACVGLKDVTTGDTLCDPDAVITLERMEFPEPVISLAIEPKTKADQEKMGIALQRLAAEDPSFRLHTDEESGQTIISGMGELHLEIIVDRMKREFGVEANIGRPQVTYRETLRKKVTDVEGKFVRQSGGKGQYGHVVLTLEPLEPGSGFVFEDATKGGVVPREYIPSVEKGLREAMGTGVLAGYPVVDVKATLTFGSYHDVDSSEMAFRMAAIFGFREGARKADPVILEPVMHVEVETPEEYAGNIMGDLSSRRGMVQGMEERFGSQIIRADVPLAEMFGYSTTLRSMSQGRATYSMEFHHYAEAPRNVADEIIASRAKS

SEQ ID NO: 59945 - protein, 394 aa, Klebsiella pneumoniae
MKRHKNFNLLLMLVLLVAVGQMAQTIYIPAIADMAVALNVREGAVQSVMAAYLLTYGISQLFYGPLSDRVGRRPVILVGMSIFMLATLVAITTHSLPVLIVASAMQGMGTGVGGVMARTLPRDLYEGAQLRHANSLLNMGILVSPLIAPLLGGILDTLWSWRACYAFLLVLCAGVTFSMAKWMPETRPEGAPRTKLLASYKTLFGTGAFNCYLLMLIGGLAGIAVFEACSGVLMGAVLGLSSMAVSILFILPIPAAFFGAWFAGRPNKRFPTLMWQSVICCLLAGLMMWIPGLLGIMTVWTLLVPAALFFFGAGMLFPLATSGAMEPFPFLAGTAGALVGGLQNIGSGVLAWLSAMMPQTGQGSLGLLMMLMGLLILLCWLPLASRFTHHQQPV

SEQ ID NO: 59946 - protein, 500 aa, Klebsiella pneumoniae
MKAVVSRLLSVIGCAFIFAAAWFCLWSISLHLVERADLAVLLFPFGLRLGLMLQCPRGYWPVLLGTEWLLILWLAQEVALAHPIILMTGSLLTLLPVALISRYRQQRDWLTLLRQGGALMAAALLQSLPWLAEGDEGLNALLLTLTGGLTLAPTCLVFWHYLTSTVWRPLGPALVAQPVNWRGRHLIWYLLLFTISLWLQLGLPAELSRFTPFCLALPIIALAWHYGWQGALIATLMNAIALIASQTWHDHPVDLLLSLLAQSLTGLLLGAGIQRLRELNQSLQSELARNRRLAERLLETEESVRRDVARELHDDIGQTITAIRTQAGIVQRLAPDNASVRQSGQLIEQLSLGVYDSVRRLLGRLRPRQLDDLPLEQAVRSLMREMELEDRGIVSHLDWRINEAGLSENQRVTLFRVCQEGLNNIVKHASASAVTLQGWQQDERLMLVLEDDGCGLPPGSNLQGFGLTGMRERVTALGGTLTISCTHGTRVCVNLPLRYA

SEQ ID NO: 59947 - protein, 519 aa, Klebsiella pneumoniae
  MISC_FEATURE (461)..(461): X=any amino acid
  MISC_FEATURE (471)..(471): X=any amino acid
  MISC_FEATURE (472)..(472): X=any amino acid
  MISC_FEATURE (491)..(491): X=any amino acid
  MISC_FEATURE (492)..(492): X=any amino acid
  MISC_FEATURE (510)..(510): X=any amino acid
SYLLALDAGTGSIRAVIFDLNGRQLAVGQAEWKHLSVDNVPGSMEFDLTTNWQLACQCIRQALDAARLSAADIQSVACCSMREGIVLYDRDGEAIWACANVDARASREVAELKEIHDYRFESEVYEVSGQTLALSAMPRLLWLAHHRPDIYRKAATITMISDWLAAKLSGELAVDPSNAGTTGMLDLFSRDWRPALLDMAGLRADMLSPVKETGTLLGAVTEAAAQQSGLRAGTPVVMGGGDVQLGCLGLGVVRAGQTAVLGGTFWQQVVNLPQVRTDPQMNIRVNPHVIPGMAQAESISFFTGLTMRWFRDAFCAEEKLIAERLGVDAYSLLEEMASRVPAGSHGVMPIFSDAMHFKQWYHAAPSFINLSIDPEKCNKATLFRALEENAAIVSACNLAQISQFSGVTFESLVFAGGGSKGALWSQILSDVTGLPVRVPVVREATALGCAHRRRNRRRAVXRYGQHRRAVXXAGTASSPQIRSIASCIRRXXASGRRCTPISLALSIAGXQRRCGRRRV

SEQ ID NO: 59948 - protein, 329 aa, Klebsiella pneumoniae
MIRFAVVGTNWITKQFVDAAHETGKYKLTAIYSRSLEQAQAFAKDYPVEHLFTSLDELAQSPDVDAVYIASPNSLHFPQTRLFLSHKKHVICEKPLASNLQEVEAAIALAKENNVVLFEAFKTASLPNFLLLKETLAKVGKLRKAFINYCQYSSRYQRYLDGENPNTFNPAFSNGSIMDIGFYCLASAVALWGEPRAVLATASLLDSGVDAQGTVVLSYGDFDVTLHHSKVSDSAIPSEIQGEDGALVIEKISECQKLAFVPRGGKAQDLTQPQHINTMLYEAETFARLVETQDVDHPGLAVSRITAKLSSEIRRQTGVIFPADTQPLA

SEQ ID NO: 59949 - protein, 323 aa, Klebsiella pneumoniae
MNTVGTPLLWGGFAVVVAIMLAIDLLLQGRRGSHSMTMKQAAGWSILWVTLSLLFNAAFWWYLVQTQGRAVADPQALAFLTGYLIEKALAVDNVFVWLMLFSYFAVPPALQRRVLVYGVLGAIVLRTIMIFAGSWLISQFDWLLYVFGAFLLFTGVKMALAKEDDSGIGDKPLVRWIRSHLRMTDKIESERFFTRKNGVLFATPLLLVLILVELSDVIFAVDSIPAIFAVTTDPFIVLTSNLFAILGLRAMYFLLAGVAERFSMLKYGLSVILVFIGVKMLIVDFYHIPVAISLGVVGGILAVTLLINAWVNRQHDKQRKLPE

SEQ ID NO: 59950 - protein, 466 aa, Klebsiella pneumoniae
MQQYQFPQGFLWGAAASGPQTEGVTNKRHRSIWDSWFAEQPERFYQQVGPQTVCDTYHQYPQDVALMKQTGFNSFRTSIQWSRLIADLETGAPDPDAVRFYHAYLDEMIANGIEPMINLYHFDMPEALQKQYGGFESAHVTELFARFARTAFSLFGHKVKYWITFNEPIVPVEGGYLYDFHYPCKKDGRLAAQVAFNIMLAHAKAVTAYRELALAGEIGVVLNLTPSYTLTDSDADKKAAGYADLFFNRSFLDPLVKHEFPKALCEILAAHDCLPTTSKDDAALILSADIDFLGVNYYVPRRVKARESEYDLDYFTPEYYFENAVNPQGRFNPYRDNNEILPQAIYDIAANIRDNYGNIKWYLAEIGIAMDRQSEGEPGADGVIDDTFRIQLMEEHLVQLHRAIADGANCFGVHQWTFIDNWSWINAFKRRYGFWRLDLETGERQIKRNALWFAELATSNGFTSDK

SEQ ID NO: 59951 - protein, 561 aa, Klebsiella pneumoniae
GSSAVANSSAVTTGRGARKSSSGCITFAQIVAVVTEQIQNRVSNNVDYDLLCHERDNFRILVAITNAVLSRLDIDELVSEVAKEIHRYFRIDAISVVLRSDRKGKLNIYSTHYLDASHPVHDQSEVDEAGTLTERVFKSKEMLLLNLHEHDTLAPYEKMLFEMWGNKIQTLCLLPLMSGNTLLGVLKLAQCDEQVFTTTNLKLLRQIAERVSIAIDNALAYREIQRLKERLVDENLALTEQLNNVESEFGEIIGRSEAMNNVLKQVEMVAQSDSTVLILGETGTGKELIARAIHNLSGRNGRRMVKMNCAAMPAGLLESDLFGHERGAFTGASAQRIGRFELADKSSLFLDEVGDMPLELQPKLLRVLQEQEFERLGSNKLIQTDVRLIAATNRDLKQMVIDREFRSDLYYRLNVFPIHLPPLRERPDDIPLLVKAFTFKIARRMGRNIDSIPAETLRTLTRMEWPGNVRELENVIERAVLLTRGNVLQLSLPERDIVEAPRTPAVLPEEGEDEYQLIVRVLKESNGVVAGPKGAAQRLGLKRTTLLSRMKRLGINKDELV

SEQ ID NO: 59952 - protein, 373 aa, Klebsiella pneumoniae
MRYVDEYRAPEQVMQLVAHLQQRARLLPHTAARPLRIMEVCGGHTHAIFKFGLDQLLPENIEFIHGPGCPVCVLPMGRIDACIEIACRPGVIFCTFGDAMRVPGKNGSLLQAKARGADVRIVYSPMDALRLAQQNPQREVVFFGLGFETTMPATALTLRQARERNVDNFYFFCQHITLLPTLRSLLDQPENGIDAFLAPGHVSMVIGTEAYGFIASDYHRPLVVAGFEPLDLLQGAVMLVEQTIAQRSDVENQYRRVVPDEGNPLAQAAMADVFRLDGDSEWRGLGVISDSGVQLTPAYQRFDAEAHFRPAPQRVCDDPRARCGEVLTGRCKPHQCPLFASTCNPQSAFGALMVSSEGACAAWYQYRSQENEV

SEQ ID NO: 59953 - protein, 337 aa, Klebsiella pneumoniae
MATMLEVAKRAGVSKATVSRVLSGNGYVSQETKDRVFKAVAESGYRPNLLARNLATKTTQTLGLVVTNTLYHGVYFSELLYHVARMTEDKGRQLILADGKHSAQEEREAIQYLLDLRCDAIIIYPRFLTVDEMDEIVENHSQPIMVLNRRLRRHASHCVWSDQKASAMRVVERLIALGHRDIAFITGSLDSPTGVERLAGYKDALAGHGIALNEALIAEGRWTPETGAAGVESLRQRGVTYSALVASNDDMAIGAMKQLHQLGVMVPEQVSVVGFDDIALAPYMVPSLASVRVPVTEMIKESINRLIFMLDGGEFNFQQSFPGALIERESLVAGPCA

SEQ ID NO: 59954 - protein, 119 aa, Klebsiella pneumoniae
MVTALIIVAAIAWLTQLAFGGWQIRRFNRAFDSLCQQGRVGVGRSAGRFQPRAIVAIAVDDNDRISDTLLMKGFTIFASPQKIPALAGKHIAELQPDVIFPHDPRCQNALSLALNPKHG

SEQ ID NO: 59955 - protein, 334 aa, Klebsiella pneumoniae
MSAFYQKHFLKLLDFTPAEITALLELAAKLKADKKNGIEVQKLAGKNIALIFEKDSTRTRCSFEVAAYDQGARVTYLGPSGSQIGHKESIKDTARVLGRMYDGIQYRGHGQEVVETLAQYAGVPVWNGLTNEFHPTQLLADLLTMKEHLPGKAFNQMTLVYAGDARNNMGNSMLEAAALTGLDLRLVAPSACWPEAALVETCTALAKQQGGNITLTEDIAAGVKGADFIYTDVWVSMGEAKEKWAERIALLRDYQVNSAMLALTGNPQVKFLHCLPAFHDDQTTLGKQMAADYGLHGGMEVTDEVFESAASVVFDQAENRMHTIKAVMVATLSK

SEQ ID NO: 59956 - protein, 636 aa, Klebsiella pneumoniae
MRFPNQRLAQLFTLLRNETLPQDELAQRLSVSTRTVRADITALNTLLAQYGAQFILNRGSGYQLKIDNPTSFQALEETAPKAQHVPRTAQDRITFLLVRFLTSAFSIKLEDLADEWFVSRATLQNDMVEVRERFQRYQLTLETRPRHGMKLFGSEVSIRACLTDLLWELTQQGDIAPPIGAEAFAAEVPALLEPVLQETLTRHHIRLTDAGERFVCLYGAVVVRRVSEGYPLADFSAEDVAQNVRDAARELTGELQRLAGKPLSPAEEEWLCVHIAARQVQDVDPETISADDDEALVNYILRYINSQYNYNLLDDAQLHADLLTHIKTMITRVRYQIMIPNPLLDNIKQHYPMAWDMTLAAVSSWGKYTPYTISENEIGFLVLHIGVGLERHYNIGYQRQPQVLLVCDTSNAMVRMIEAILQRKYPQLEIAATISQREYEQRDAIEADFVISTVRIGEKDKPVVTIAPFPTDYQLDQIGKLVLVDRTRPWMLNKYFDAAHFRVVDKPMDQQTLFAELCQQLLEEGFVDAEFHASVVEREAIVSTMLGDGIALPHSLGLLAKKTVVYTVIAPQGIAWGDETAHLIFLLAISKREYEEAMAIYDIFVTFLRERAMSRLAATRSFDEFKTVAMECVSRF

SEQ ID NO: 59957 - protein, 154 aa, Klebsiella pneumoniae
MNYHQYYPVDIVNGPGTRCTLFVSGCVHECPGCYNKSTWRVNSGMPFTAEMADRIIADLNDTRIKRQGLSLSGGDPLHPQNIADILKLVQRVRAECPGKDIWVWTGYKIDELNAEQMEVVNLINVLVDGKFVQDLKDPALIWRGSSNQVVHHLR

SEQ ID NO: 59958 - protein, 445 aa, Klebsiella pneumoniae
MLNSILVILCLIAVSAFFSISEISLAASRKIKLKLLADEGNVNAQRVLKMQENPGTFFTVVQIGLNAVAILGGIVGDAAFSPAFHSLLSGYLSPELSEQLSFIISFTLVTSLFILFADLTPKRIGMIAPETVALRIINPMRFCLLVFRPLVWLFNGMANMIFRIFKLPMVRKDDITSDDIYAVVEAGALAGVLRKQEHELIENVFELESRTVPSSMTPRESVIWFDLHEDEQSLKNKVAEHPHSKFLVCNEDIDHIIGYVDSKDLLNRVLANQSLVLTGGVQIRNTLIVPDTLTLSEALESFKTAGEDFAVIMNEYALVVGIITLNDVMTTLMGDLVGQGLEEQIVARDENSWLIDGGTPIDDVMRVLDIDEFPQSGNYETIGGFMMFMLRKIPKRTDAVKFSGYKFEVVDIDNYRIDQLLVTRIDNKPTVLVPKQAETAESQNA

SEQ ID NO: 59959 - protein, 341 aa, Klebsiella pneumoniae
MMPRSLSQTGPEKRRFTWPKGTPQIIALLLVLLVDSLVAPHFYQVVLQDGRLFGSPIDILNRAAPVALLAIGMTLVIATGGIDLSVGAVMAIAGATAASMTVAGHSLPVVLLAALAAGALAGLWNGILVAVLKIQPFVATLILMVAGRGVAQLITAGQIVTFDSPALAWLGSGSFLLFPTPVIVAAATLLLFWLFTRKTALGMFIEAVGINIRAAKNAGVNTRIVVMLAYVLSGVCAAIAGIIVAADIRGADANNAGLWLELDAILAVVIGGASLMGGRFNLQLSVVGALIIQGMNTGILLSGFPPELNQVVKAVVVLCVLIVQSPRFIGLLKGVRGRDKT

SEQ ID NO: 59960 - protein, 1258 aa, Klebsiella pneumoniae
MSLWKKISLGVLIVLVLLLGTVGFLVGTTTGLHLVFKAADRWVPGLEIGKVTGGWRDLTLDNVRYEQPGVAVTAGQFHLSVRLRCLWDSSLCVNDIALRDIYVAVDTKKMPPSAPVEEEDSGPLNLSTPYPITLSRVALHNVNVKIDDTAVSVRDFSTGLNWQEKNLTLTPTSLQGLLIALPKVAKVAQEQVVEPKIDNPQPQEKPLGETMTDLFSQPVLPAMTDVHLPLNLNIQAFRGEQLRLTGDTDITVYNLLLKVSSIDGQMKLDALDIDSDQGKVSASGSAQLQDNWPVDITLAGTLNVDPMKGEKVQLKVGGEVRKTLKVGVDLSGPVAATLRADAQLAEAGLPLNMELKSKQLAWPFSGEKQFQADDVQLKFSGKMTDYALAFSTAVKGQSLPPAKIALNAKGNERQINLDKLTVNALEGKTELKALLDWQQAISWRGELTLDGINTAKEVPDWPSKLNGRIKTQGSLYGGSWQMSVPELKITGNVKQNKVDVAGSLQGNSYLQWKIPGLHLALGPNSADIKGELGVKDLNLDATIDAPHLDNALPGLGGTAKGLVKVRGTVDAPQLLADITARALRWQELTIAQVNVKGDVKSTDQIGGNLDVRVDRISQPGVNISLVQLNAKGTEKQHELRLRVQGDPVSGQLALAGSFDRQAERWKGSLSDTRFQTPVGPVALTRSIALDYRNLEQKISIGPHCWTNPNAELCVPETIDAGASGRARVNLNRFDLAMLKPFMPEVTQASGVFTGNADVSWDTTKEGLPQGKVTLSGRNVKVTQVVNDAPLPVAFDTLNLSADLHNNRAELGWLIRLTNNGQLDGQVQVTDPQGRRNLGGNVNISNFSLAMINPIFARGEKAEGRLNARLRLGGNVKSPQLFGQMQLSGVDIDGNFMPFDMQPSQLAMNFNGTRSTLQGTVNTRQGQIALSGNADWTQIDNWRAQIAAKGSRVRITVPPMVRLDVSPDVVFTATPSLFNLDGKVDVPWARIVVNEVPESAVGVSSDEVMLDKNLKPIKQQSASIPINSNLTIHVGNNVRLEAFGLKARLTGDLKVAQDKQGLGLNGQINIPDGRFHAYGQDLIVRKGELLFSGPPDQPLLNIEAIRNPDATEDDVIAGVRVTGSADQPKAEIFSDPVMSQQEALSYLLRGQGLSSGQSDSAAMTSMLIGMGVAQSGQVVGKIGETFGVSNLALDTEGVGDSSQVVVSGYVLPGLQVKYGVGIFDSLATLTLRYRLMPKLYVEAVSGIDQALDLLYQFEF

SEQ ID NO: 59961 - protein, 315 aa, Klebsiella pneumoniae
MQNRLTIKDIARLSGVGKSTVSRVLNNESGVSERTRERVEAVMQQHGFSPSRSARAMRGQSDKVVAIIVTRLDSLSENLAVQTMLPAFYEQGYDPIMMESQFSPALVEEHLGMLARRNIDGVVLFGFTGIDEAMLAPWRDTLVLMARDAPGFASVCYDDEGAITLLMQRLYDRGHRHISFLGVPHSDVTTGERRHLAYLAFCKKHRLTPTAALPGLGMKQGYDTVASVLTAETSALVCATDTLALGASKYLQQQGRDALQLASVGSTPLMKFLHPEILTVDPGYAESGRRAARQLIEQIAGNVDPRQIVIPAALN

SEQ ID NO: 59962 - protein, 183 aa, Klebsiella pneumoniae
MTKQPEDWLDDVPGDDVEDEDDEIIWVSKSEIKRDAEELKRLGAELVDLGKNALDKIPLDTDLRDAIELAQRIKKEGRRRQLQLIGKMLRNRDVDPIRQALDKLKNRHNQQVALFHKLEQIRDRLIDDGDDAVAEVLNLWPEADRQQLRSLIRNAKKEKEGNKPPKSARLIFQYLRELAENEG

SEQ ID NO: 59963 - protein, 902 aa, Klebsiella pneumoniae
MLKNYTRQLFAQLSRHLPRRLVQRDPLPDARHLASGPIPESLGQHCLNVAAMDDQEIWRAFDSHPEGLNEGEVAAKILKHGDNQIPAQKPSPWWVHLWTCYRNPFNLLLTVLGIVSYSTEDLFAAGVIALMVGISTLLNFIQEARSTKAADALKAMVSNTATVLRVVNEQGESRWLELPIDQLVPGDIIRLSAGDMIPADLRILQARDLFVAQASLTGESLPVEKVARSRDPLQQNPLECDTLCFMGTNVVSGSAQAIVFATGGRTWFGQLAGRVSEQESEPNAFQKGISRVSMLLIRFMLVMAPVVLLINGYTKGDWWEAALFALSVAVGLTPEMLPMIVTSTLARGAVKLSKQMVIVKHLDAIQNFGAMDILCTDKTGTLTQDKIVLENHTDVSGKVCERVLHAAWLNSHYQTGLKNLLDTAVLEGVELDAARGLAERWQKVDEIPFDFERRRMSVVVKEDDAAHQLICKGALQEILNVSTQVRYNGDIVPLDDTMLRRIRRVTDTLNRQGLRVVAVATKYLPAREGDYQRADESDLILEGYIAFLDPPKETTAPALKALKASGITVKILTGDSELVAAKVCHEVGLDAGEVVIGSQIEAMSDDELAALAKRTTLFARLAPLHKERIVTLLKREGHVVGFMGDGINDAPALRAADIGISVDGAVDIAREAADIILLEKSLMVLEEGVIEGRRTFANMLKYIKMTASSNFGNVFSVLVASAFLPFLPMLPLHLLIQNLLYDVSQVAIPFDNVDDEQIRKPQRWNPADLGRFMVFFGPISSIFDILTFGLMWWVFHANTVEMQTLFQSGWFIEGLLSQTLIVHMIRTRRIPFVQSRAAWPLFAMTLVVMAVGIALPFSPLASYLQLQALPLSYFPWLVAILAGYMVLTQAVKGFYSRRYGWQ

SEQ ID NO: 59964 - protein, 135 aa, Klebsiella pneumoniae
MELRNEAFHLLRQLFQQHTARWQQALPDLTKPQYAVMRSVAEHPGIEQVALIEAAVSTKATLAEMLSRMEARGLVRREHDPADKRRRFVYLTDEGEALLNRSIPQGNEVDDEFLGRLSDDEREQFSRLVHKMMAP

SEQ ID NO: 59965 - protein, 121 aa, Klebsiella pneumoniae
MMSTTLFKDFTFEAAHHLPHVPEGHKCGRLHGHSFMVRLEITGEVDPHTGWIMDFAELKAAFKPTYDRLDHYYLNDIPGLENPTSEVLAKWIWDEMKPRVPLLSAVMVKETCTAGCVYRGE

SEQ ID NO: 59966 - protein, 345 aa, Klebsiella pneumoniae
MIIPNAHPDLWQRYQATKAASTAKYARDIAAEMGISEAELTAARLGHDAVRLSDDARALIAALERVGETKCICRNEYAVHEQVGQFTHQHLSGHAGLVLNPRALDLRLFLSQWASAFHLNDNGRQSIQFFDHHGDALLKVYATTQTDMAAWETLIAEYRVAAPAPLTLRPLEPVKYADTADGAALENDWRAMTDVHQFFGLLRKYQLSRQQAFRLVSDDLACRVDRHALPSLLETVRQEGNEIMIFVGNRGCVQIFTGALEKLAPMRGWLNIFNTTFTLHLREESLDEVWVTRKPTSDGHVTSVELFAKDGTQIAQLYGQRSEGHPEQTQWRQQVDRLTREGQPA

SEQ ID NO: 59967 - protein, 236 aa, Klebsiella pneumoniae
MAATFPGVCAVVPAAGFGRRMQTECPKQYLSIGNKTILEHAVAALLADARVQRVVIAVSPGDRRFSQLPLAQHPQITVVDGGAERADSVLAGLQALPEAQWVLVHDAARPCLHQDDLSRLLSLCETSRVGGILAAPVRDTMKRAEPDKTAIAHTVDRNDLWHALTPQFFPRELLVDCLTRALNEGATITDEASALEYCGFHPQLVAGRADNIKVTRPEDLALAEFYLTRSRHQEKA

SEQ ID NO: 59968 - protein, 853 aa, Klebsiella pneumoniae
MSTIDNLDAHTPMMQQYLKLKAQHPDILLFYRMGDFYELFYDDAKRASQLLDISLTKRGASAGEPIPMAGIPHHAVENYLAKLVNQGESVAICEQIGDPATTKGPVERKVVRIVTPGTISDEALLQERQDNLLAAIWQDSKGFGYATLDISSGRFRLSEPADRETMAAELQRTNPAELLYAEDFAESSLIEGRRGLRRRPLWEFEIDTARQQLNLQFGTRDLVGFGVENAPRGLCAAGCLLQYVKDTQRTSLPHIRSITMERQQDSIIMDAATRRNLEITQNLAGGTDNTLASVLDCTVTPMGSRMLKRWLHMPVRDTAVLVERQQTIGALQERYTELQPVLRQVGDLERILARLALRTARPRDLARMRHALQQLPLLRELLADVDSQPVQKLREKMGEFNELRELLERAVIDAPPVLVRDGGVIAPGYSEELDEWRALADGATDYLDKLEIRERERLGLDTLKVGYNAVHGYYIQISRGQSHLAPIHYVRRQTLKNAERYIIPELKEYEDKVLTSKGKALALEKQLYDELFDLLLPHLADLQTSASALAELDVLVNLAERAETLNYCCPTFSDKPGIRISEGRHPVVEQVLKEPFIANPLRLAPQRRMLIITGPNMGGKSTYMRQTALIALLAYIGSYVPAQKVEIGPIDRIFTRVGAADDLASGRSTFMVEMTETANILHNATEHSLVLMDEIGRGTSTYDGLSLAWACAENLANKIKALTLFATHYFELTQLPEKMEGVANVHLDALEHGDTIAFMHSVQDGAASKSYGLAVAALAGVPKEVIKRARQKLRELESISPNAAATQVDGTQMSLLAAPEETSPAVEALENLDPDSLTPRQALEWIYRLKSLV

SEQ ID NO: 59969 - protein, 218 aa, Klebsiella pneumoniae
MLPLTDGLLKMMNFKYVFRWHVPFLLLFLFTCRAMAADTLLILGDSLSAGYRMAANAAWPALLNEQWQAKTPVVNASISGDTSQQGLARLPALLKQHQPRWVLVELGGNDGLRGFPPQQTEQTLRTIIKDIKAANAEPLLMQIHLPANYGRRYNEAFGAIYPALAKEFAIPLLPFFMEEVYLKPQWMQDDGIHPNRDAQPFIADWMAKRLAPLVNHDS

SEQ ID NO: 59970 - protein, 624 aa, Klebsiella pneumoniae
MKGQETRGFQSEVKQLLHLMIHSLYSNKEIFLRELISNASDAADKLRFRALSQPDLYEGDGELRVRVSFDKDNRTLTIADNGIGMNREEVIDHLGTIAKSGTKAFLESMGSDQAKDSQLIGQFGVGFYSAFIVADKVTVRTRAAGDKPENGVFWESAGEGEYTVADITKADRGTEITLHLREGEDDFLNDWRVRSIISKYSDHIALPVEIEKREEKDGETVISWEKINKAQALWTRSKSEVNDDEYKEFYKHIAHDYSDPLTWSHNRVEGKQEYTSLLYIPSQAPWDMWNRDHKHGLKLYVQRVFIMDDAEQFMPNYLRFVRGLIDSNDLPLNVSREILQDSSVTRNLRTALTKRALQMLDKLAKDDAEKYQTFWKQFGLVLKEGPAEDPSNQEAIAKLLRFATTHTDSSAQTVSLEEYVSRMKEGQEKIYYITADSYAAAKSSPHLELLRKKGIEVLLLSDRIDEWMMSYLTEFDGKAFQSVAKADESLDKLADEVDESTKEAEKALEPFVERVKNLLGDRVKEVRLTHRLTDTPAIVTTDADEMSTQMAKLFAAAGQAAPEVKYIFELNPAHQLVKRAADTQDDAQFGEWVELLLDQALLAERGTLEDPNQFIRRMNQLLAS

SEQ ID NO: 59971 - protein, 214 aa, Klebsiella pneumoniae
MRIILLGAPGAGKGTQAQFIMEKYGIPQISTGDMLRAAVKSGSELGKQAKDIMDAGKLVTDELVIALVKERIAQEDCRNGFLLDGFPRTIPQADAMKEAGITVDYVLEFDVPDELIVDRIVGRRVHAPSGRVYHIKFNPPKVEGKDDVTGEELTTRKDDQEETVRKRLVEYHQMTAPLIGYYTKEAQAGNTKYAKVDGTKAVADVRAELEKILG

SEQ ID NO: 59972 - protein, 434 aa, Klebsiella pneumoniae
MKFPGKRKSKHYFPVNARDPLLQQIQPENESSVSWVVGIDQTLVDIEAKVDEAFIVRYGLSAGHSLVIEDDVAEALYQELVRNNLITHQFAGGTIGNTMHNYSVLADDRSVLLGVMCSNIEIGGYAYRYLCNTSSRTDLNYLQGVDGAIGRCFTLIGDSGERTFAISPGHMNKLRPESIPEAVIAGASALVLTSYLVRCKPGEPMPDATMKAIEYAKKHDVPVVLTLGTKYVIADNPAWWQEFLQEHVSILAMNEEEGEALTGFADPLSAANKALDWVDLVLCTAGPAGLYMAGFTEEEAKRKTQHPLLPGAIPEFNQFEFSRAMRHQDCVNPLRIYSHIAPYMGGPEKIMNTNGAGDGALAALLHDITANNYHRNNVPNSSKHKCKWLTYSSLAQVCKYANRVSYQVLNQHSPRLTRGLPEREDSLEEAYWDR

SEQ ID NO: 59973 - protein, 117 aa, Klebsiella pneumoniae
MLKIFNTLTRQKEEFKPIHAGEVGMYVCGITVYDLCHIGHGRTFVSFDVVARYLRFLGYKLKYVRNITDIDDKIIKRANENGESFVALVDRMIAEMHQDFDALNILRPDSEPRATHH

SEQ ID NO: 59974 - protein, 57 aa, Klebsiella pneumoniae
IRTDRVIEIDGETFPYVTIDVSSKSHPYYTGKQKTFANEGSAARFRQRFGGFIDAKR

SEQ ID NO: 59975 - protein, 1137 aa, Klebsiella pneumoniae
MLFCALATTPGILRHLHSFILTMLHTISRQRATFIFIITLLCFIGLFSPVQGRAADLPDRAEVQSQLNTLNKQKELTPQDKLVQQDLTQTLETLDKIERIKSETAQLRQQVEQAPAKLRQAVESLNNLSDVPNDDATRKTLSTLSLRQLESRVTQTLDDLQNAQNDLATYNSQLVSLQTQPERVQNAMFNASQQLQQIRNRLNGTSVGDETLRPTQQVLLQAQQALLNAQIEQQRKSLEGNTILQDTLQKQRDYVTAWSNRLEHQLQLLQEAVNSKRLTLTEKTAQEAVTPDETARIQANPLVKQELDINHQLSEKLIQATENGNQLVQRNIQVKNWLDRALQSERDIKEQISVLRGSLLLSRILYQQQQTLPSADELQDMTNRIADLRLEQFEVNQQRDALFQSDAFVAKLEEGHSSEVNDEVHAALLEVIDMRRELLDQFNKQLGNQLMMAINLQINQQQLMSVSSSLKEILTQQIFWVNSNKPMDWEWIKAFPEALKGQFKAMKITVNWEKAWPAVFVAFLAGLPLLLIAGLIRWRLQWLKDYQAKLASQVGQLRNDTQLHTPKAILIDLIRALPVVLLILAIGLILLTMQLNISGLLWAYSKKLAMFWLVFGLCWKVLEKNGVAVNHFNMPAQLTSHWRRQIVRVSLALLPLNFWSVISELSPLNLMDDVLGQLVIFFNLLLIAVLVWPMCRESWRDKESHSLRLLTITVLSIVPVALMVLTATGYFYTTLRLAGRWIETVYLVMIWNLLYQTVLRGLSVAARRIAWRRALARRQHLVKEGAEGAEPQEEPTIALEQVNQQTLRITMLVMVALFAVMFWAIWSDLITVFAYLDSITLWHYNGTEAGASVVRSVTMGSLLFAIVASMVAWALIRNLPGLLEVLVLSRLNMRQGTSYAITTILNYAIIAIGAMTVFGALGVSWDKLQWLAAALSVGLGFGLQEIFGNFVSGLIILFERPVRIGDTVTIGTFSGTVSKIRIRATTITDFDRKEVIIPNKAFVTERLINWSLSDTVTRVVIRLGVAYGSDLDKVKEVLLKAAHDHPKVMQEPAPAVFFTTFGASTLDHELRLYVRELRDRSYTVDELNRAIDRLCRENDINIAFNQLEVHLRNEKGDEVTEVKRDGKGDDLAPTTAS

SEQ ID NO: 59976 - protein, 188 aa, Klebsiella pneumoniae
MSEEKRKMIAGELYLSGDPTLRADRLRARQLLHRYNHSAPDDQEQRQHILAELFARAGDAYIEPSFRCDYGYNIFLGAGFYANFDCVMLDVCPIHIGDNCMLAPGVHIYTATHPLDADARNSGQEYGKPVTIGHNVWIGGRAVINPGVTIGDNAVIASGAVVTKDVPACTVVGGNPAQIIKRLPPTNP

SEQ ID NO: 59977 - protein, 57 aa, Klebsiella pneumoniae
MSLENASDEVKLAVDLIMLLESHQIPAQTVLSALEIVRRDYANKLKNAESGSQNPEK

SEQ ID NO: 59978 - protein, 175 aa, Klebsiella pneumoniae
MKTAQLLQTLNDQLSELAALVAPLAEHATLSPRFDRQLFHTRSTLMQAYLAEAQHNFNQLRQAVERQQMPQVVWIAERLAAQIAALRRETATWSLRSWDHASPTLSRWQRRRLQHQEYERRLVAMRDQRQRQLAQATSLDEQQRLGKEVEAYSGRLARCRQALDKIENVLARLTR

SEQ ID NO: 59979 - protein, 1048 aa, Klebsiella pneumoniae
MPNFFIDRPIFAWVIAIIIMLAGGLSILKLPVAQYPTIAPPAISITAMYPGADAETVQNTVTQVIEQNMNGIDHLMYMSSNGDSTGTATITLTFESGTDPDIAQVQVQNKLALATPLLPQEVQQQGISVEKASSSFLMVVGVINTNGTMNQDDISDYVAANMKDPISRTSGVGDVQLFGSQYAMRIWMDPNKLNNFQLTPVDVISALKAQNAQVAAGQLGGTPPVKGQQLNASIIAQTRLTNTEEFGNILLKVNQDGSQVRLRDVAKIELGGESYDVVAKFNGQPASGLGIKLATGANALDTANAIRAELAKMEPFFPSGMKIVYPYDTTPFVKISIHEVVKTLVEAIILVFLVMYLFLQNFRATLIPTIAVPVVLLGTFAVLAAFGFSINTLTMFGMVLAIGLLVDDAIVVVENVERVMAEEGLPPKEATRKSMGQIQGALVGIAMVLSAVFIPMAFFGGSTGAIYRQFSITIVSAMALSVLVALILTPALCATMLKPIQKGSHGATTGFFGWFNRMFDKSTHHYTDSVGNILRSTGRYLVLYLIIVVGMAWLFVRLPSSFLPDEDQGVFLSMAQLPAGATQERTQKVLDEMTNYYLTKEKDNVESVFAVNGFGFAGRGQNTGIAFVSLKDWSQRPGEENKVEAITARAMGYFSQIKDAMVFAFNLPAIVELGTATGFDFELIDQGGLGHEKLTQARNQLFGMVAQHPDVLTGVRPNGLEDTPQFKIDIDQEKAQALGVSISDINTTLGAAWGGSYVNDFIDRGRVKKVYIMSEAKYRMLPEDIGKWYVRGSDGQMVPFSAFSTSRWEYGSPRLERYNGLPSLEILGQAAPGKSTGEAMALMEELAGKLPSGIGYDWTGMSYQERLSGNQAPALYAISLIVVFLCLAALYESWSIPFSVMLVVPLGVVGALLAATFRGLTNDVYFQVGLLTTIGLSAKNAILIVEFAKDLMEKEGKGLIEATLEAVRMRLRPILMTSLAFILGVMPLVISSGAGSGAQNAVGTGVMGGMVTATILAIFFVPVFFVVVRRRFSKKSEDIEHSHQVEHH

SEQ ID NO: 59980 - protein, 635 aa, Klebsiella pneumoniae
MSYQVLARKWRPQTFADVVGQEHVLTALANGLSLGRIHHAYLFSGTRGVGKTSIARLLAKGLNCETGITATPCGVCDNCREIEQGRFVDLIEIDAASRTKVEDTRDLLDNVQYAPARGRFKVYLIDEVHMLSRHSFNALLKTLEEPPAHVKFLLATTDPQKLPVTILSRCLQFHLKALDVEQIRHQLEHILGEEQIAFEPRALQLLSRAADGSLRDALSLTDQAIASGEGQLTAASVSTMLGTLDDDQALSLIEALVAADGERVMAGVNDAAARGVEWEALLVEMQSLLHRDAMVQLSPSALGADMAAVEVRMRELARTVPPGDVQLYYQTLLIGRKELPYAPDRRMGVEMTLLRALAFHPRKPLPEPEVQPAQAAAPAPRQPVAPAAPPPQSPQSLPPTTSQVLAARSHLQRSQGATTPKKSEPAAASRARPVNNAALERLSSITERVQARPAAAALEQAPAKKEAYRWKATTVVEESKVEVATPKALKKALEHEKTPELAAKLAEEAVERDSWAAEVSQLAVPKLVEQVALNAWKEQEGSRVCLHLRPSQRHLNSASAQQKLAEALGVLYGTPVELTIVEDDNPAMRTPLEWRQAIYEEKLAQAREAIIADNNIQTLRRFFDADLDEESIRPI

SEQ ID NO: 59981 - protein, 110 aa, Klebsiella pneumoniae
MFGGKGGLGNLMKQAQQMQEKMQKMQEEIAQLEVTGESGAGLVKVTINGAHNCRRVEIDPSLLEDDKEMLEDLVAAAFNDAARRIEETQKEKMASVSAGMQLPPGFKMPF

SEQ ID NO: 59982 - protein, 191 aa, Klebsiella pneumoniae
MEALRCLPGVGPKSAQRMAFTLLQRDRSGGMRLAQALTRAMSEIGHCADCRTFTEQEVCNICSNPRRQENGQICVVESPADIYAIEQTGQYSGRYFVLMGHLSPLDGIGPDDIGLDRLEQRLEAESITEVILATNPTVEGEATANYIAELCAQYGVDASRIAHGVPVGGELEMVDGTTLSHSLAGRHKITF

SEQ ID NO: 59983 - protein, 273 aa, Klebsiella pneumoniae
MNNRVHQGHLARKRFGQNFLNDQFVIDSIVSAINPQKGQAMVEIGPGLAALTEPVGERLDQLTVIELDRDLAARLQTHPFLGPKLTIYQQDAMTMNFGELAEKMGQPLRVFGNLPYNISTPLMFHLFSYTDAIADMHFMLQKEVVNRLVAGPNSKAYGRLSVMAQYYCQVIPVLEVPPSAFTPPPKVDSAVVRLVPHSTMPYPVKEIRVLSRITTEAFNQRRKTIRNSLGNLFSVEVLTELGIDPAMRAENISVAQYCLMANWLSDNLPTKES

SEQ ID NO: 59984 - protein, 255 aa, Klebsiella pneumoniae
MDTYMTNAVTVKNITFQEGETLICVPLIGKTLDEILGNAHGLVDAGADIIEWRVDHFAQVREMAQVMAALAEIRGALKALPLLFTFRSKKEGGETELSDEAYFALNREAARSGLVDVIDIELFNDEAQIRALVDDAHAAGVKVIMSNHDFHKTPAQEDIIYRLRRMQDLGADLPKIAVMPQSPQDVLTLLAATLTMKEKYATRPLITMSMGKSGGVSRVTGRLFGSAMTFGTVGQASAPGQIAIAKLREVMDILS

SEQ ID NO: 59985 - protein, 551 aa, Klebsiella pneumoniae
MSSGRLQQQFIRLWQCCDGKSQETTLNELAEMLSCSRRHMRTLLNMMESRGWLTWEAEAGRGKRSRLTFLYTGLALQQQRAEDLLEQDRIDQLVQLVGDKAAVRQMLVSHLGRSFRQGRHILRVLYYRPMKNLLPGSALRRSETHIARQIFSALTRVNEENGELEADIAHHWQQLTPTHWRFFLRPGIHFHHGRELEMADVIASLQRSNALPLYSHIERIESPTAWTLDIHLRQPDRWLPWLLGQVPAMVLPQEWQTMNHFSSMPVGTGPYAVVRNNQNQLKIHAFEDYFGYRALIDEVNVWVLPEISEEPNGGLTLQGNTESEKAVESRLEEGCYYLLFDSRSPLGANDAVRRWLSYLFQPANLLYHAGEHYQGNWFPAYGLLPRWHHASNHACEKPAGLETVTLTYYRDHVEHRVIGGIMRDLLAAHQVKLEIQELEYDAWHRGEVVSDIWLNSVNFTLPIEFSLFAYLYEVPLIQRCIPIDWQADACRWRAGEFNPATWSQRLLAGQHIVPLIHHWLMIQGQRSMRGVRMNTLGWFDFKSAWFAPPEP

SEQ ID NO: 59986 - protein, 327 aa, Klebsiella pneumoniae
MLKKLLPLLALVAMPALAKPVLTVYTYDSFSADWGPGPAVKKAFEAECGCELKFVALEDGVSLLNRLRMEGKNSKADVVLGLDNNLLEAAAQSKLFAKSNVPASAVSVPGGWDNETFVPYDYGYFAFVYDKNKLANPPKSLKELVEGPQKWRVIYEDPRTSTPGLGLLLWMQKVYGDQAPEAWQKLAAKTVTVTKGWSEAYGLFLKGESDLVLSYTTSPAYHIIEEKKDNYAAASFAEGHYLQVEVAARTAASKQPELAEKFLKFMVSPGFQNAIPTGNWMYPVTQVALPAGFDTLVKPQTTLSFTPQQVASERQTWISAWQRAVSR

SEQ ID NO: 59987 - protein, 287 aa, Klebsiella pneumoniae
MSWSIDIISCITDRFVELTATEKRIAQFILDDVAAAAELPIAEIARLTQTSQASVTRFARALGCKDVRELKMKLAQSLAVGQRFILDVPDLEGVQGIYESIISVLETNRRALDIEALKRAVSWLSDARQILALGMGGGSTICAQEIQYRLFRLGLPVVSQSDGLLVRMMSSAVTPQDVVIVLSLGGYTREIIESAAIASQYGAKVIAITPAGTPLAEQVDLVLPLLVRENDYIFKPSTSRYAMLAMVDVLATELAMANKTQAKGKLRRIKLALDSHRGGVDRQPLGD

SEQ ID NO: 59988 - protein, 582 aa, Klebsiella pneumoniae
  MISC_FEATURE (566)..(566): X=any amino acid
PGFTMDTKKLFKHIPWVILGIIGAFCLSVVALRRGEHVSALWIVVASVSVYLVAYRYYSLYIAQKVMKLDPTRSTPAVINNDGLNYVPTNRYVLFGHHFAAIAGAGPLVGPVLAAQMGYLPGTLWLLAGVVLAGAVQDFMVLFISSRRNGASLGEMIKQEMGPVPGSIALFGCFLIMIIILAVLALIVVKALAESPWGVFTVCSTVPIALFMGIYMRFLRPGRVGEVSVIGIVLLVASIWFGGVIAHDPYWGPALTFKDTTITFTLIGYAFISALLPVWLILAPRDYLATFLKIGVIVGLALGIVILNPDLKMPAVTQYIDGTGPLWKGALFPFLFITIACGAVSGFHALIASGTTPKLLANETDARFIGYGAMLMESFVAVMALVAASIIEPGLYFAMNTPPAGLGIVMPNLHEMGGENAAMIAAQLKEVTVHAAATVSSWGFVISPEQILQTAKDIGEPSVLNRAGGAPTLAVGIAHVFHKIIPMADMGFWYHFGILFEALFILTALDAGTRAGRFMLQDLLGNFVPFLKKTDSLVAGIIGTAGCVGLWGYLLYQGVVDPLGAXRACGRCSVSLTRCWPP

SEQ ID NO: 59989 - protein, 67 aa, Klebsiella pneumoniae
MFGNLGQAKKYLGQAAKMLIGIPDYDNYVTHMQTNHPDQPYMTYEEFFRERQQARYGGDGKGGVRCC

SEQ ID NO: 59990 - protein, 318 aa, Klebsiella pneumoniae
MAPIAVTLLTGFLGAGKTTLLRHILNEQHGFKIAVIENEFGEVSVDDQLIGDRATQIKTLTNGCICCTRSNELEDALLDLLDSRDRGEIEFDRLVIECTGMADPGPIIQTFFSHQVLCERYLLDGVIALVDAVHADQQMDQFTIAQSQVGYADRILLTKTDVAGDTEKLRERLARINARAPIYTVIHGDIDLSQLFNTSGFMLEEKVVSATPRFHFVAEKQNDVSSIVVELDYPVDISEVSRVMENLLLSFAEQLMRYKGMLWIDGEPNRLLFQGVQRLYSADWDRPWGDETPHSTLVFIGIQLPEEEIRAAFAGLRR

SEQ ID NO: 59991 - protein, 763 aa, Klebsiella pneumoniae
MSELLSIALFLASVVLYAWKAGRNTWWFAATLTVLGLFVVLNITLYASDYFTGDGINDAVLYTLTNSLTGAGIGKYILPGVGVAVALVAVFGALGWVLRRRRHHPHHVGYSLAALLLALASVDASPAFHQISELVKSQSREGDPDFAAYYKEPSKQIDNPQLNLVYIYGESLERTYFDNDAFPNLTPELGRIKDEAIDFSNTMQLPGTDYTIAGMVASQCGIPLFAPFEGNASASVSSFFPQNICLGDILKNSGYENYFVQGANLRFAGKDVFLKSHGFDHLYGAEELKTTVADPTYRNDWGFYDDTVLDETWKKFEELSQSGKRFSLFALTVDTHHPDGFISRTCERKRYDVDGKKNLSFSAVSCSQEHIAALIEKIKASPYFKNTVIVVSSDHLAMKNSAWDYLNKHDRSNLFFVLRGDKPQQETLAVKRNTMDNGATVLDILGGDNYIGLGRSSLSGQSLSGIFMNMKEKVLAWKPDVIRLWNFPKEMKNFTIDSQKNMIAFSGSHFRLPLLLRVSDQRVEPLPESEYSAPLRFQLADFAPRDNFVWVDRCYKMGQLWSPELALSTDWCVSQGQLGGEQKVQHVDKPQWHGKTAFRDTLIDMERYKGNVDTLKIVDNDIRYKADSFVFNVAGAPEEVKQFSGISRPESWGRWSNAQLGSDVKIEYKEPLPEKFDLVITAKAYGPNANKPIPVRVGESEQVLTLDNDVTTTTLHFDNPTRSNTLIITPPDPQTTNEGNILGHSPRQLGIGMVEIKVVKSEG

SEQ ID NO: 59992 - protein, 457 aa, Klebsiella pneumoniae
MKGTIFAVALNHRSQLDAWREAFQQAPYKTPPKTAVWFIKPRNTVIGDGEAIPSPQGETVQSGATVALIVGKTARKVAAEEAANYIAGYALANDVSLPEESFYRPAIKAKCRDGFCPIGTLSAVRNVDDLTIITEINGREADSWHTGDLQRNAAQLLSALSEFATLNPGDAILIGTPHSRVTLRPGDRVRILADGFPALENPVVAERRAGMKQARIEWQGQVRDVLVNERDQVRLDDGTVLKEGEFRWLPPADGTLFALGLNYADHASELEFKPPTEPLVFIKAPNTFTGHQQQSVRPDNVEYMHYEAELVVVIGKTARRVSEAEAMDYVAGYTVCNDYAIRDYLENYYRPNLRVKSRDTLTPIGPWIVSKEAIPDPHNLALRTWVNGELRQQGTTADLIFSIPFLIAYLSEFMTLQPGDMIATGTPKGLSDVVPGDEVIVEVEGVGRLVNHIISQQ

SEQ ID NO: 59993 - protein, 285 aa, Klebsiella pneumoniae
MGKLALAAKITHVPSMYLSELPGKNHGCRQGAIDGHKEIGKRCREMGVDTIIVFDTHWLVNSAYHINCADHFQGVYTSNELPHFIRDMTYDYDGNPELGHLIADEAVKLGVRAKAHNIPSLKLEYGTLVPMRYMNSDKHFKVVSISAFCTVHDFADSRRLGEAILKAIEKYDGTVAVLASGSLSHRFIDDQRAEEGMNSYTREFDHQMDERVVKLWREGKFKEFCTMLPEYADYCYGEGNMHDTVMLLGLLGWDKYDGKVEFITELFASSGTGQVNAVFPLPAQA

SEQ ID NO: 59994 - protein, 126 aa, Klebsiella pneumoniae
MPHFIAECTDNIREQADLPGLFAKVNEALAATGIFPIGGIRSRAHWLDTWQMADGRQDYAFVHMTLKIGAGRSLESRQDVGDMLFALIKSHFATLMESRYLALSFAMEELDPTLNYKQNHVHALFK

SEQ ID NO: 59995 - protein, 345 aa, Klebsiella pneumoniae
MTDQPQRHRRWVLASRPHGEPTAENFRLEESEVPTPGPGQVLLRTVYLSLDPYMRGRMSDAPSYSPPVAIGAVMVGGTVSRVVSSNHADYQPGDWVLGYSGWQDYELSDGSGLVKLGDNPQHPSWSLGVLGMPGFTAYMGLLDIGQPKAGETLVVAAATGPVGATVGQIGKIKGCRTVGIAGGAEKCRYAVETLGFDLCLDHRADDFAEQLAQACPQGIDVYYENVGGKVFDAVLPLLNTAARVPVCGLVSGYNATGLPDGPDRLPLLMATILKKRIRMQGFIIGQDYGHRIAEFQQQMGRWVQEGKIKYREQLIDGLDQAPQALIGLLKGENFGKVVIRVAADD

SEQ ID NO: 59996 - protein, 311 aa, Klebsiella pneumoniae
MALPIMIDCDPGHDDAIALVLALASPELEVKAVTASAGNQTPEKTLRNVLRMLTLLNRPDIPVAGGAWKPLMRDLIIADNVHGESGLDGPSLPEPAFAPQNCTAVELMASVLRESQEPVTLVATGPQTNVALLLASHPELHAKIARIVIMGGAMGLGNWQPAAEFNIYVDPQAAEMVFQSGIPVVMAGLDVTHKAQILPADIERFRQIGNPVSTIVAELLDFFMAYHKDEKWGFDGAPLHDPCTIAWLLKPEIFTTIERWVGVETEGKYTQGMTVVDYYHLTGNRPNTTLMLDVDREAFVDLLAQRLAFYA

SEQ ID NO: 59997 - protein, 353 aa, Klebsiella pneumoniae
MSLRHFAAPRLRHSLLVTSLLLAGSFSAHAAEEMLRKAVGKGAYEMAYSQQENALWVATSQSRSLDKGGVVYRLDPTTLDVTQIIHNDLKPFGATINHATGTLWFGNTVDSTVTAIDAKTGAVKGRLVLDERQRSETVRPLQPRELAVNEQTNTVYITGLGKESVIWVVDGATLKLKTTITGTGAMATGLAIDPQAKRLYTTNADGELLTIDSESNTIASRKKLQDDGKAHFYLNLSLDTAGHRAFITDSKQPEVLVVDTRDGKVLEKIAAPESLAVLFNPARNEAYVTHRKAGEVSVIDGKSYKVVKTFKTPTHPNSLALSEDGKTLYVSVKQASSREKEATAPDDVIRIAL

SEQ ID NO: 59998 - protein, 452 aa, Klebsiella pneumoniae
AFPHNFLWGAATAAYQVEGGHDADGKGPSIWDIYSHLPGTTFEGTTGDIAVDHYHRFREDVALMAEMGLQSYRFSISWPRLLPAGRGKVNEAGVQFYSDLIDELLAHNIEPMITLYHWDLPQALQDEGGWEARTTAEAFAEYARLCYARFGSRVKLWATFNETIVFIGHGYINGLHPPAVRDPARAIQACHHVFIAHALAVKAFREMAVAGEIGFVNVLQPHTPLTDSEADIKATELADAIHTHWLYDPVLKGTYPADLLAQTQALWGVPRFAPGDDALLRDNRCDFIGLNYYRRETVSAQPPEIATGGEPGVEGLFYFVRNPQSTYTEWGWEIWPQGLTDGIMMIKARYGDIPIYITENGLGAKDPIIDGEVVDDPRIDYLSSHIGALEKALALGADVRGYYPWSFIDLLSWLNGYKAYGFVYVDHQRNLARKRKKSFYWYKSVIASHGEQ

SEQ ID NO: 59999 - protein, 470 aa, Klebsiella pneumoniae
MKKYQQLAQQLTEQIALGVWLPGDRLPSLREQVISSGMSFMTVSHAYQLLESQGRIVARPQSGYYVAPQPVKLRQPAPPAQVTRDEAVDINTYIFEVLQASRQASMLPFASAFPDPRLFPLQQLNRSLAQVSKTATAMSVIENLPPGNAELRHAIARRYALQGMNVSPDEIVITAGALEALNLSLQAVTEPGDWVVVENPCFYGALQALERLRLKALSVATDVREGIDLTALEAALQNYPVKACWLMTNGQNPLGFTLSAEKKAALVALLARYNVMLIEDDVYSELYFGREKPLPAKFWDRQEMTLHCSSFSKCLVPGFRIGWVAAGKQARRIQQLQLMSTLSTSSPMQLALVDYLSTKRYDAHLRRLRRQLAERKQQAWQALLRHLPPEVVVHHSDSGYFLWIELPEGADASALSARALASHISIAPGKMFSTSDSWTSFFRFNTAWGWGEREEQGVKRLGKLIREQLA

SEQ ID NO: 60000 - protein, 324 aa, Klebsiella pneumoniae
QVLNLPAGYFGMVLGTIGMGFAWRYASTLWPVSRSIGDGLVTLAMAMWVLLSMAFISRAIRFPASVLREMRHPVSSSFVSLFPATTLLVAIGLAPWCRPLAIGLFVPGVALQLAYAAWQSGGLWRGNHPREATTPGLYLPTVANNFISAMACGALGFSDAGLVFLGAGVFSWLSLEPAILQRLRSAGELPTPLRTSLGIQLAPALVACSAWLSVNGGEADTFAKLLFGYGLLQLLFMLRLMPWYLRQPFNASFWSFSFGISALATTGLHLGQARGDGFFHHLAMPLFIFSNLVVGLLLLRTAVLLVSGKLLLQVDRETLLNKKE

SEQ ID NO: 60001 - protein, 331 aa, Klebsiella pneumoniae
MNTEATQDHQEANTTGARLRHAREQLGLSQQAVAERLCLKVSTVRDIEDDKAPADLASTFLRGYIRSYARLVHIPEDELLPMMAKQAPIRAAKVAPMQSFSLGKRRKKRDGWLMSFTWLVLFVVIGLSGAWWWQDHKAQQEEISTMADQSSAELNGGDANSQNVPLDTSAPAAPTADSAANSAPNDTASAPTTSAPVQTPADNNAVVAPSQANVDTAGTTPAAPATTPASPLPTDQANVTTPAASAQDLVMNFSADCWLEVSDATGKKLFSGLQRKGGNLNLSGQAPYKLKIGAPAAVQIQYLGKPVDLSRFIRTNQVARLTLNAESSPAQ

SEQ ID NO: 60002 - protein, 398 aa, Klebsiella pneumoniae
MQRTGFNNARVRQANKSIFLSHLWREKQLSKSQLSQLTGLSIPAVSNILAELLSEGLIGHSTEHLSKRGVNSGSYQIPEHGAWTLCMNITPTSIEYQLADARLLAVDGHQHLPVNAPTPQALLEAIVECWRHIHRRYPQHSINLALGVHGQVDPITGVSQTMPQARWKTPIEIKYLLEERLGVQVRVDNDCVMLALAEKWQHQGTQQDFCVINVDYGIGSSFVINDHIYRGSLYGSGQIGHTIVNPDGNACDCGRYGCLETVASLSALKKQARMWLKTQPEATLAPEQLTTASLIEAWKEGDVQIRAWVDNAANAIGLSLYNFLNILNINQIWLYGRSCAFGEQWLESIVKQTGFNPFDHRDTPRAHATQIGFGQLTRAQQLMGIGYLYVEEQLQTLV

SEQ ID NO: 60003 - protein, 553 aa, Klebsiella pneumoniae
  MISC_FEATURE (551)..(551): X=any amino acid
NILLITCDQERYFERYPFPVPGRERLMKTGITFTNHQNTANVCTPSRSVMYTGLHMPHTRMFDNLGFPWMNYDLDPELRTVGHMMRELGYYTAYKGKWHLTREIDQPVAGKSVEEMDLGEIPTPRLHEIMEKYGFSDYHGIGDVIGKSKGGYFFDSVTTGQTISWLRNTGRPLNDENKPWFAAVNLVNPHDVMFIDTDEHGEQVQWKGPMDKENHTLLPTQPPHNQIYQQSWPDYPLPANRHQSLDEPGRPAAHKEYQNARAVMEGQFPDEDRRWRKLLDYYFNCIRDNDQHLEAILNELDNLQLTQNTIIVFTADHGELGGSHQMHGKGSSVYKEQIHVPMIIRHPAYPGNICCNSLTNHLDLVPTLIGLTGRDRSLREKVLKGRKGRDMSPLLAHPEQAGLNALRPGSLYCYGMILYMDAQYTAKFRKLAGEKLPHDQFKKAIASLHPDFSHRSGIRMINDGHYKFARYFSLKQHHIPASLAELLENNDVELFDLVNDPEENHNLAREPEKYRDLLMTMNDKLNQLTAAEIGEDDGSYMPPFEGSSGIXRR

SEQ ID NO: 60004 - protein, 463 aa, Klebsiella pneumoniae
MLPSQSPAIFTVSRLNQTVRLLLEREMGQVWISGEISNFSQPSSGHWYFTLKDDNAQVRCAMFRNSNRRVTFRPQHGQQVLVRANITLYEPRGDYQIIVESMQPAGEGLLQQKYEQLKAQLTAEGLFEQKHKQALPSPAHCVGVITSKTGAALHDILHVLRRRDPGLPVIIYPTAVQGDDAPGQIVRAIALANARQECDVLIVGRGGGSLEDLWSFNDERVARAIFASQIPIVSAVGHETDVTIADFVADLRAPTPSAAAEIVSRNQQELLRQLQSGQQRLEMAMDYFLASRQRRFTQLFHRLQQQHPQLRLARQQTALERLRQRMRIAVESQLKRAEQRQKRTVQRLNHYNPQPRIHRAQSRIQQLEYRLAEIMRGRLSERRERFGNAVTHLEAVSPLATLARGYSVTSVSDGTVLKQTKQVKTGDLLTTRLKDGWVESEVKQIAPVKKTRARKPSPTKPAE

SEQ ID NO: 60005 - protein, 413 aa, Klebsiella pneumoniae
MKSYLVGGAVRDALLGLPVKDRDWVVVGATPQQMLDAGYQQVGRDFPVFLHPQSREEYALARTERKSGAGYTGFTCYAAPDVTLEADLLRRDLTVNALAQDADGAIIDPYGGQNDLRQRLLRHVSPAFSEDPLRVLRVARFAARYAHLGFRIAEETQALMAAMVEAGELAHLTPERVWKETESALTTRNPQVFFQTLRDCQALKVLFPEIDALYGVPAPAKWHPEIDTGLHTLMTVTMAAMLSPDVDVRFATLCHDLGKGLTPKALWPRHHGHGPAGVKLVEQLCARLRVPNDIRDLAKLVAEYHDLIHTLPILQPKTLVKLFDSIDAWRKPQRVQQIALTSEADVRGRTGFEASDYPQGRLLLEAWEVAQSVSTKEVVAAGFKGAEIREELTRRRIAAVAQWKEQRCPQPQG

SEQ ID NO: 60006 - protein, 205 aa, Klebsiella pneumoniae
MSAIAPGLVLLAYLCGSISSAILVCRLAGLPDPRDSGSGNPGATNVLRIGGKGAAVAVLIFDVLKGMLPVWGAWALGLTPFWLGLVAIAACVGHIWPVFFHFRGGKGVATAFGAIAPIGLDLTGVMAGTWLLTILLSGYSSLGAIVSALIAPFYVWWFKPQYTFPVSMLSCLILLRHHDNIQRLWRRQESKIWTRVKKKKTPEQK

SEQ ID NO: 60007 - protein, 567 aa, Klebsiella pneumoniae
MSNISRQAYADMFGPTVGDKVRLADTELWIEVEDDLTTYGEEVKFGGGKVIRDGMGQGQMLAADCVDLVLTNALIVDHWGIVKADIGVKDGRIFAIGKAGNPDIQPNVTIPIGAATEVIAAEGKIVTAGGIDTHIHWICPQQAEEALVSGVTTMVGGGTGPAAGTHATTCTPGPWYISRMLQAADSLPVNIGLLGKGNVSQPDALREQVAAGVIGLKIHEDWGATPAAIDCALTVADEMDIQVALHSDTLNESGFVEDTLAAIGGRTIHTFHTEGAGGGHAPDIITACAHPNILPSSTNPTLPYTLNTIDEHLDMLMVCHHLDPDIAEDVAFAESRIRRETIAAEDVLHDLGAFSLTSSDSQAMGRVGEVILRTWQVAHRMKVQRGALAEETGDNDNFRVKRYIAKYTINPALTHGIAHEVGSIEVGKLADLVVWSPAFFGVKPATVIKGGMIAIAPMGDINASIPTPQPVHYRPMFGALGSARHHCRLTFLSQAAAANGVAERLNLRSAIAVVKGCRTVQKADMVHNSLQPNITVDAQTYEVRVDGELITSEPADVLPMAQRYFLF

SEQ ID NO: 60008 - protein, 224 aa, Klebsiella pneumoniae
MSTAEQRLRLMQLASSNLPVGGYSWSQGLEWAVEAGWVPDVAAFERWQRRQMTEGFFTVDLPLFARLYRACEQGDIAAAQRWTAYLLACRETRELREEERNRGAAFARLLSDWQPDCPPPWRSLCQQSQLAGMAWLGVRWRIALPEMALSLGYSWIESAVMAGVKLVPFGQQAAQQLILRLCDHYAAEMPCALAAPDGDIGSATPLAAIASARHETQYSRLFRS

SEQ ID NO: 60009 - protein, 205 aa, Klebsiella pneumoniae; identical to SEQ ID NO: 43403

SEQ ID NO: 60010 - protein, 535 aa, Klebsiella pneumoniae
MSSLDLNSELPATTRTSGSRETLEDYTLRYAPLSFRRWGPGVVAVTALGGIAYLADFSIGASIGMAWGTSNAIYSILVAALVIFLTGIPLAITAARYNIDLDLITRSAGFGYFGSVITSIIFAGFTFIFFALEGSIMAQGLLVGLGIPLWMGYLIATLMVLPLVVYGMKALTRLQVWTTPLWLVLMVVPVVWLIVKDPQLVDGFLHFAGKNSASTVDITAIMLGAGVCLSLIMQIGEQIDYLRFMPPKTAENRKSWWLAVFSAGPGWVVLGAIKQIIGAFLGFYLLTRFPAVHNTEPVQQFVSVFDNLVPGWLALTLAVVLVVISQIKINVTNAYSGSLAWTSAWTRTTKRYPGRIIFVVVNLAIALALMEGDMFSALSWILGFYSNFAIAWVVVVATDITFNKGLLKLAPAQPEYRRGMIYNVNPVGVVSFGLAAGLSICAFFGLLGATLAPFSPLIALVVAFVMTPLMGLLTRGRYYIKQVDDGIAEPRYDAAGNASTTVYQCVSCEEEYERPDVMHSHKHQGAICSLCKSME

SEQ ID NO: 60011 - protein, 477 aa, Klebsiella pneumoniae
MKKTTLAMSALALSLGLALSPLSASAAETASSATNAQQMPSLAPMLEKVMPSVVSINVEGSTTVNTPRMPRNFQQFFGDNSPFCQDGSPFQSSPFCQGGGQGGQPDGGQQQKFMALGSGVIIDAAKGYVVTNNHVVDNATTIKVQLSDGRRFDAKVVGKDPRSDIALIQIQDPKNLTAIKLADSDALRVGDYTVAIGNPFGLGETVTSGIVSALGRSGLNVENYENFIQTDAAINRGNSGGALVNLNGELIGINTAILAPDGGNIGIGFAIPSNMVKNLTEQMVKYGQVKRGELGIMGTELNSELAKAMKVDAQRGAFVSQVMPGSAAAKAGIKAGDVITSLNGKAISSFAALRAQVGTMPIGSKVELGLLRDGKPVTVTVELQQSNQTQVDSSTIFNGIEGAEMSNKGQDKGVVVNNVKAGTPAAQIGLKKGDVIVGANQQPVKNIADLRKIFDAKPSVLALNIQRGDASIYLLLQ

SEQ ID NO: 60012 - protein, 403 aa, Klebsiella pneumoniae
MQRDDDSFMLVPSKGEDYMAGWHLDTKMAQDIVARTMRIIDTNINVMDARGRIIGSGDRERIGELHEGALLVLSQGRVVDIDDAVARHLHGVRQGINLPLRLEGEIVGVIGLTGEPESLRKYGELVCMTAEMMLEQSRLMHLLAQDSRLREELVMNLIQAEEHTPALNEWAQRLGIDLNQPRVVAMIEVDSGQLGVDSAMAELQQLQNALTTPDRNNLVAIVSLTEMVVLKPALNSFGRWDADDHVRRVEQLIARMKENGQLRFRVALGNFFTGPGSIARSYRTARTTMMVGKQRMPESRSYFYQDLMLPVLLDSLRGGWQANELARPLARLKAMDNNGLLRRTLQAWFRHNVQPLATSKALFIHRNTLEYRLNRISELTGLDLGSFDDRLLLYIALQLDEQR

SEQ ID NO: 60013 - protein, 275 aa, Klebsiella pneumoniae
MQQLQNVIESAFERRADITPANVDTVTREAVNQVIALLDSGALRVAEKIDGQWVTHQWLKKAVLLSFRINDNQVIDGAESRYFDKVPMKFADYDEARFQKEGFRVVPPAAVRQGAFIARNTVLMPSYVNIGAYVDEGTMVDTWATVGSCAQIGKNVHLSGGVGIGGVLEPLQANPTIIEDNCFIGARSEVVEGVIVEEGSVISMGVYLGQSTKIYDRETGEVFYGRVPAGSVVGSGNLPSHTDGTYSLYCAADVQDSDAKTRGKVGINELLRTID

SEQ ID NO: 60014 - protein, 151 aa, Klebsiella pneumoniae
MQEGQNRKTSSLSILAIAGVEPYQEKPGEEYMNEAQLAHFKRILEAWRNQLRDEVDRTVSHMQDEAANFPDPVDRAAQEEEFSLELRNRDRERKLIKKIEKTLKKVEDEDFGYCESCGVEIGIRRLEARPTADLCIDCKTLAEIREKQMAG

SEQ ID NO: 60015 - protein, 809 aa, Klebsiella pneumoniae
MSSLPVAAVLPELLSALQHAPQVLLNAPTGAGKSTWLPLQILAEGNIAGRIILLEPRRLAARNVAQRLAELLGEKPGETVGFRMRAETCVGPQTRLEVVTEGILTRMIQRDPELTGVGLVILDEFHERSLQADLALALLLDVQQGLRDDLKLLIMSATLDNDRLQRLLPEAPVVVSEGRIYPVERRFSPLSAHQRFDEAVAVAAAELLRHEQGSMLLFLPGVGEIQRVQEQLTERVAEDVILCPLYGALPLSEQRKAILPAPAGKRKVVLATNIAETSLTIEGIRLVVDSAQERVARFDPRTGLTRLVTQRISQASMTQRAGRAGRLSPGICLHLLGKEQAERAAAQSEPEILHSDLSALLLELLQWGCHDPVALAWLDQPPAVNLAAARRLLEALSALDGERLSAFGRKMAALGNEPRLAAMLTAAQTDDEAATAAKLAAILEEPPRGGLVDLGAVFSRQQANWQQRAQQLMKRLARRGGQPDVGLMAGLLASAFADRIARRRGQEGRYQLANGMGAMLDADDALGRHEWLIAPLLLQGSASPDARMLLALSVDIGELIAARPELAKSSDTVEWDEAQGTLKAWRRTVIGQLVIKTQPLAKPSEAELHQAMLNGIREKGLGVLNWTPEAEQLRLRLHCAAQWLPEEAWPAVDDASLLASLETWLLPQMNGVHSLRALKALDLRQALQDWLPWPLRQKLDRELPTHYTVPTGSRLAIRYHAENPPALAVRMQEMFGEATTPVIAEGRVPLVLELLSPAQRPLQITRDLSAFWQGSYREVQKEMKGRYPKHVWPDDPANAAPTRRSKKYS

SEQ ID NO: 60016 - protein, 852 aa, Klebsiella pneumoniae
MAGDDREPIGRKGRPSRPTKQKVTRRRVREEDYDDEYDDDDYEDEKPVPRKAKGKGGKPRRKRSWLWLLVKLGIVFAVLIAAYGVYLDQKIRSRIDGKVWELPAAVYGRMVNLEPDMQISKNEMVRLLNATQYRQVSAMTRPGEYTVQANSIEMIRRPFDFPDSKEGQVRARLTFDGDHLETIENMDNNRQFGFFRLDPRLITMLQSPNGEQRLFVKRSGFPDLLVDTLLATEDRHFYEHDGISLYSIGRAVLANLTAGRTVQGASTLTQQLVKNLFLSSERSYWRKANEAYMALIVDARYSKDRILELYMNEVYLGQSGDNEIRGFPLASLYYFGRPVEELSLDQQALLVGMVKGASVYNPWRNPKLALERRNLVLRLLQQQQVIDQELYDMLSARPLGVQPRGGVISPQPAFMQMVRQELQAKLGDKVKDLSGVKIFTTFDSVAQDAAEKAASEGIPVLKKQRKLADLETAMVVVDRFTGEVRAMVGGAEPQFAGYNRAMQARRSIGSLAKPATYLTALSQPNQYRLNTWIADAPVTIRLSNGQTWSPQNDDRRFSGQVMLVDALTRSMNVPTVNLGMALGLPAVVDTWTKLGAPKNQLNAVPSMLLGALNLTPIEVAQAFQTIASGGNRAPLSALRSVIAEDGTVLYQSYPQAERAVPAQAAYMTLWTMQQVVQRGTGRQLGAKYPGLHLAGKTGTTNNNVDTWFAGIDGSQVTITWVGRDNNQPTKLYGASGAMSIYQRYLANQTPTPLVLTVPEDVVDMGVDSNGNFVCSGGMRSLPVWTTQPDALCRQGEMMQQQQLQQQEAKNPFNQSGQQPPPQQQQQQQQQPPKQQEKSDGVAGWIKDMFGSN

SEQ ID NO: 60017 - protein, 735 aa, Klebsiella pneumoniae
MARPKTAQPNHSLRKVAAVVATAVSGMSVYAQAAEQPKQEETITVVAAPAAQESAWGPAPTIAAKRSATATKTDTPIEKTPQSVSVVTRQEMEMRQPTTVKEALSYTPSVFSTRGSSTTYDVVTIRGFTTSTTVNTNQYLDGMKLQGNNYSEVSMDPYFLERVEVMRGPTSVLYGNSNPGGIVSMVSKRPTTEPLKEVQFKMGTDNLWQTGFDFSDAIDDAGVWSYRLTGLGRSQDAQQQMAKSTRYAVAPSFSWRPDDKTDFTFLSNFQNDPDAGYYGWLPREGTVVPYYDANGKAHKLPTDFNEGESDNKISRRQKMVGYSFSHQFDDTFTVRQNLRYADVHTLYRSVYGNGYVAPGYMNRAYVRSDEHLNTFTVDTQLQSDFATGAVSHTLLTGVDYSRMRNDVDADYGTADPISMSNPQYGNPNIQVTFPYAVLNRMEQTGLYAQDQMEWDKWVMTLGGRYDYATTSTLTRATNSLAENHDQQFSWRGGINYLFDNGISPYFSYSESFEPVSGSNSRGQPFDPSRGKQYEAGVKYVPKDMPVVVTAAVYQLTKDKNLTADPANQAFSIQTGEIRSRGLELEAKAAVNANINVTAAYSYTDAEYTHDTVFNGKRPAEVPRNMASLWADYTFHETALSGLTIGAGARYIGSTVSYYKNDTSTGKKNDAFSVAGYALMDATVKYDLARFGLPGSSVGVNVNNLFDREYVSSCYSEYACYWGAGRQVVATATFRF

SEQ ID NO: 60018 - protein, 265 aa, Klebsiella pneumoniae
MQEQTPHAETTFALDRVTFRVPGRTLLHPLSLTFPTGKVTGLIGHNGSGKSTLLKMLGRHQPPSAGEVLLDGQPLESWGSKAFARKVAYLPQQLPPAEGMTVRELVAIGRYPWHGALGRFGAADREKVEEAIALVGLKPLAHRLVDSLSGGERQRAWIAMLVAQDSRCLLLDEPTSALDIAHQVDVLALVHRLSQQRGLTVIAVLHDINMAARYCDYLVALRGGEMIAQGTPAELMRSDTLEQIYGIPMGILPHPAGAAPVSFVY

SEQ ID NO: 60019 - protein, 296 aa, Klebsiella pneumoniae
MMNPTLITRRRLLIAMALSPLLWQMRGAQAADVDPQRVVALEWLPAELLLALGVTPYGVADIPNYRLWVNEPALPDSVIDVGLRTEPNLELLTQMKPSFIVWSAGYGPSPEKLARIAPGRGFTFSDGKRPLAMAQRSLLEMADLLGKTQQAKRHLAEFDALMESLRPRFAGRGDRPLLMISLLDPRHVLVFGENCLFQEVLDRFGIKNAWHGEAAFWGSVSVGIDRLAAFNEADVICFDHGNERDMAQLLATPLWQAMPFVRAGRFQRVPAVWFYGATLSAMHFARVLADAQGRPA

SEQ ID NO: 60020 - protein, 660 aa, Klebsiella pneumoniae
MNTRLSPLAIILLAGLLGVAFALSIVNLNVALPYAQWRQALWQPDVDDIAQMLFHYSLLPRLAVALLVGAGLGLVGVLFQQVLRNPLAEPTTLGVATGAQLGITVTTLWAIPGVLASQFAALAGACLVGALVFGVSWGKRLSPVTLILAGLVVSLYCGALNQLMVIFHHDQLQSMFLWSTGTLTQTDWSVAQRLWPQLLGGAILTLLLLRPLTLMGLDDGVARNLGLALSLARLGALTLAIVISALLVNAVGIIGFIGLFAPLLAKMLGARRLLARLLLAALIGALLLWLSDQVILWLSRVWREVSTGSVTALIGAPLLLWLLPRLRSISAPVMNGGDNVQPERYHVQWFVLAGVALLLLAVSVALAFGRDAHGWLWAHGDLLEQLLPWRWPRVLSALFAGVMLAVAGCIIQRLTGNPMASPEVLGISSGAAFGVVLMLFFVPGDAFGWLLPAGSLGAAATLLIIMLAAGRGGFSPHRMLLAGMALSTAFTMLLMMLQASGDPRMAQILTWISGSTYSATPERVVRSGAVMLALLALAPLCRRWLTILPLGGEAARAVGMALTSSRIVLLLLAACLTAAATLTIGPLSFVGLMAPHIARMMGFRRTLPHMVISGLTGGLLLVFADWCGRMMMFPYQIPAGLLSTFIGAPYFIYLLRKQSR

SEQ ID NO: 60021 - protein, 259 aa, Klebsiella pneumoniae
MNHSAECTCEESLCETLRAFSAQHPESVLYQTSLMSALLSGVYEGSTTIADLLKHGDFGLGTFNELDGELIAFSSQVYQLRADGSARKAQPEQKTPFAVMTWFQPQYRKTFDHPVSRQQLHEVIDQQIPSDNLFCALRIDGHFRHAHTRTVPRQTPPYRAMTDVLDDQPVFRFNQREGVLVGFRTPQHMQGINVAGYHEHFITDDRKGGGHLLDYQLDHGVLTFGEIHKLMIDLPADSAFLQANLHPDNLDAAIRSVES

SEQ ID NO: 60022 - protein, 293 aa, Klebsiella pneumoniae
MDKQYPVRQWAHGADLVVSQLEAQGVRQVFGIPGAKIDKVFDSLLDSSIRIIPVRHEANAAFMAAAVGRITGKAGVALVTSGPGCSNLITGMATANSEGDPVVALGGAVKRADKAKQVHQSMDTVAMFSPVTKYAVEVTAPDALAEVVSNAFRAAEQGRPGSAFVSLPQDVVDGPVSGKVLPASGAPQMGAAPDDAIDQVAKLIAQAKNPIFLLGLMASQPENSKALRRLLETSHIPVTSTYQAAGAVNQDNFSRFAGRVGLFNNQAGDLFQHSGDDIRSAGLPIVSRTNYSE

SEQ ID NO: 60023 - protein, 405 aa, Klebsiella pneumoniae
MSLRSLRALCLTSFFIADVRDGLGPFLGIFLTQRHWQAEDIGLLMSVGGIAGLLATLPAGFITDSSRHKRLLLAGVCLVITLTTLLLWFSQKTSVVALSQVASGICAAFVGPLIAGITLGLARQRGFSAQMGKNEAFNHAGNFFTALMAGAIAWYWGIGGIFILMACTTLLTLVALLAIRGGDIDDDAARGIEAASTPSLPGFAILFRHTPLLIAGVTLMLFHLANAALLPMLSMRIAAAPGHLNPGLFAAATVIISQVVMIPVAIRVAGSIDKYGYWRCILLALLIMPIRAALAASSDAPAMMVPVQILDGLAAGILGVAVPSFIVSLLRGSGHVNAGQSVVMLMQGAGAAMSPALTGSIAGHYSYATAFGVLSVIAIVALMIWWRSAPLLTVSASPPVGESGQ

SEQ ID NO: 60024 - protein, 472 aa, Klebsiella pneumoniae
MLLIIKNAHAILSGLPGEAARLAGPDIRIRDGKIAAIGSLTPLPEERQIDARDCVIYPAWVNTHHHLFQSLLKGEPQGLNQSLTAWLSATPYRFRAAFDEHTFRLAVRIGLVELLRSGCASVADHNYLYWPDMPFDTSEIVFNEGEALGMRIVLCRGGATQGRAVEQDLPVALRPETFDGYMADVERLVSRYHDPRPESLRRVVMAPTTVLHSAPGAQLREMAKLARQLGIRLHSHLSETVDYLDAARQKFAMTPVQFCAEHDWLGNDVWFAHLVKLLPEEIALLGRTGTGIAHCPQSNGRLGSGIADLLALEQAGVPVSLGVDGAASNEAADMQSEAHAAWLLQRARKGMLAQPRYAGGTFEGGADAATVEDVVRWGSAGGAQILGLAQSGTLQVGMQADLAIYRLDDPRYFGLHDMAIGPVACGGRAALKALLLNGRPIVEDDAIPGLDLDAMRHDALAAVRTLQQRAAV

SEQ ID NO: 60025 - protein, 668 aa, Klebsiella pneumoniae
MRVSRSLTIKQMAMVASVSMAFVLVFCTILLFHFVQQSRFTTATQLESIARSVREPLSAAILKADIPEAEAILSRIQPAGIVSRADVVLPNQFQALRMRFIPERPVPVTVTRLFELPVQISLPIYSLERPANPQPLAYLVLQADSYRMYKFVMSALATLVTAYLLLVLMLTVALTWCINRLMVRPLRRIARELNDLSQQERLGHQLTLPRLHHDDEIGMLVRSYNRNQQSLVRQHDELSIQSTRFPVSELPNKAFLLAMLEQTVARPQSAALIVVACETLQDAAGVLKESQREMLLLTLVEKLRAAIPPQMVLAQVSGYDFAILADGLAEPWQAVTLSKQVLTIINERLPLHGLQLRPYASVGIAMFHAGLSAEQFYRRAVSAAVTARRKGKNQIEFFDPEQMEKAQRRLMEEHDIMTALDNQQFAIWLQPQVACASGEICGAEVLLRQRQADGSWSLPPALIERIESCGLIIPVGYWVMEEACRQLAAWQSQGIMLSLSVNVSLLQLLEHDRGEEMLKLIARYRIAPGTLILEVTESCRMDDPQDVMARLRPLREAGVQIALDDFGMGYAGLHQLQQMKALPVDILKIDKVFIDMLPEDVSMVPAMIQLARGLSLRIVAEGVENDAQRRWLQAAGVEVLQGHLFGCALPQEAFSARYLSPVQEDENL

SEQ ID NO: 60026 - protein, 436 aa, Klebsiella pneumoniae
MVIPKGHPMKTSIFKSLYVQVLTAIAIGILLGHFYPELGAQMKPFGDAFVKLIKMVIAPVIFCTVVTGIAGMESMKAVGRTGAVALLYFEVVSTIALIIGLIIVNVVQPGAGMNVDPSTLDAKAVAVYAEQAKDQGVVAFLLDVIPGSVIGAFASGNILQVLLFAVLFGFALHRLGSKGQLIFNVIESFSQVIFGIINMIMRLAPIGAFGAMAFTIGKYGVGTLVQLGQLIICFYITCILFVVVVLGSIARATGFSIFKFIRYIREELLIVLGTSSSESALPRMLDKMEKLGCRKSVVGLVIPTGYSFNLDGTSIYLTMAAVFIAQATNSHMDIFHQITLLVVLLLSSKGAAGVTGSGFIVLAATISAVGHLPVAGLALILGIDRFMSEARALTNLVGNGVATVVVAKWVKELDAKQMDDVLNNRVPANKTHELSS

SEQ ID NO: 60027 - protein, 546 aa, Klebsiella pneumoniae
MQTTSQFWSRIMSISLKKSGMLKLGLSLVAMTVAASVQAKTLVYCSEGSPEGFNPQLFTSGTTYDASSVPIYNRLVEFKTGTTEVIPGLAEKWEVSADGKTYTFHLRQGVKWQDNKDFKPTRDLNADDVVFSFDRQKNTNNPYHKVSGGSYEYFEGMGLPDLISEVKKVDDNTVQFVLTRPEAPFLADLAMDFASILSKEYADNMLKAGTPEKVDLNPIGTGPFQLLQYQKDSRILYKAFPGYWGTKPKIDRLVFSITPDASVRYAKLQKNECQVMPYPNPADIARMKEDKNITLLEQPGLNVGYLSFNTEKKPLDDVKVRQALTYAVNKEAIIKAVYQGAGQAAKNLIPPTMWGYNDDVKDYTYDPEKAKQLLKEAGLEKGFTIDLWAMPVQRPYNPNARRMAEMIQADWAKIGVQAKIVTYEWGEYLKRAKAGEHQSVMMGWTGDNGDPDNFFATLFSCAAAKDGSNYSRWCYKPFEDLIQPARATDDHNKRIELYKQAQVVMHDQAPALIIAHSTVYEPVRKEVKGYVVDPLGKHHFDNVSVE

SEQ ID NO: 60028 - protein, 314 aa, Klebsiella pneumoniae
MLQFILRRLGLVIPTFIGITLLTFAFVHMIPGDPVMIMAGERGISPERHAQLLAEMGLDKPLWQQYAHYIWGVLHGDLGISLKSRIPVWQEFVPRFKATLELGVCAMIFAVAVGIPVGVLAAVKRGSIFDHTAVGLALTGYSMPIFWWGMMLIMLVSVQLNLTPVSGRISDTVFLDDTLPLTGFMLIDTAIWGEQGDFIDALMHMILPAIVLGTIPLAVIVRMTRSSMLEVLGEDYIRTARAKGLTRMRVIVIHALRNAMLPVVTVIGLQVGTLLAGAILTETIFSWPGLGRWLIDALQRRDYPVVQGGCCWWR

SEQ ID NO: 60029 - protein, 337 aa, Klebsiella pneumoniae
MSTQKAATPQPLLQAIDLKKHYPVKKGLFAPERLVKALDGVSFTLERGKTLAVVGESGCGKSTLGRLLTMIEIPTGGELYYQGQDLLKHDPQAQKLRRQKIQIVFQNPYGSLNPRKKVGQILEEPLLINSSLSKEQRREKALAMMAKVGLKTEHYDRYPHMFSGGQRQRIAIARGLMLDPDVVIADEPVSALDVSVRAQVLNLMMDLQQDLGLSYVFISHDLSVVEHIADEVMVMYLGRCVEKGTKDQIFNNPRHPYTQALLSATPRLNPDDRRERIKLTGELPSPLNPPPGCAFNARCRRRFGPCTQLQPQLKDYGGQLVACFAVDQDENPQKSHA

SEQ ID NO: 60030 - protein, 369 aa, Klebsiella pneumoniae
MMKVLCGAVLSALLLAAGQVGAACQWPAWEQFKQAYVSPEGRVIDPSDARKISTSEGQSYGLFFALAANDRVGFDKLLTWTQNNLAEGDLKQHLPGWLWGKKDDEQWTLLDSNSASDSDLWIAWALLEAGRLWQQPQYTETGKALLARIVAEETVAVPGLGTMLLPGKVGFADDSGWRFNPSYLPPQLATYFVRFGAPWPALRDSNLRLLLETAPKGFTPDWVRYDKGKGWQLKTEKPPIGSYDAIRVYLWVGMLHDGDKQKARLLQRFTPMAAQTTKQGVPPEKVNIATGKTSGQGPVGFSAAMLPFLQDDEARSVQRQRVADNYPGADAYYSAVLTLFGQGWDQHRFRFTASGELQPDWNQECASSH

SEQ ID NO: 60031 - protein, 1167 aa, Klebsiella pneumoniae
NYNLTGTRNAQALTKFLTLSLGVALLPLAQAATTPAQEHLLEQVRLGEASNREDLVRQSLYRLELIDPNNPELIAARMRYLLRQGDAAGAQKELERLTKLAPDSPELKASRNEMKSNTGEGRQALQQARLLGVAGKVDEAIAAYEKLYGGVPDDVDVAIEYWTLVARLPARHSEGVSQLKQLNASAPGNVSLLTSLAKQMFADNKPQEGFAYLAEMARSASGRGIAADMWFSEVKSMPVSKASVQALQQFLLQFPTGSVAANARVLLDQQQAQLQDPTFRARSEGLAAVKSGNTTQAVADLQKAVQADSRDSDAVGALGQAYSQRGDRARAVAQLSKAIAMDPDSPNRGKWDSLLQTNRYWLLIKQGDNALKAGQLSQAQNYYAQAQRVDRTDSYAVLGLGDVAAARKEAAAAERYYQQALRLDRGNNLAVRGLANLYRAESPEKASAWIAGLPPAQRRSIDDIERSLTNDRLEKQAQALESQGNWAQAAEVQRRRLALDPDSVWITYRLARDLVSAGERQEADALMRTMVNRQPQDAERVYASGLYLSGNDQDDLALAQIAALPRSAWTDNIRELEARLQSDRVLRQANQLRDSGDEAQAIALIKRQPASVRYDLTLADWAQQRGDSQTAIADYQRVLRQEADNGDARLGLAEVYLAEGDKPAARAQVMQLKGAETESMNMQRRVALARAGLGDTADAQRIFNQIVPQAKAQPPSMESALVLRDAARFATQSGAPQQALTHYREAMVASGITPAQPQDNDTFTRLTRNDSHDDWLKRGIRSDAADLYRQQDLNVTLEHNFWGSSGTGGYSDLKAHTTMLQVDAPLADGRMFFRTDLVNMDAGSFSTHSDGSYSPSWGTCGEIACTSGSKNQTDSGASVAVGWKNDTWSGDIGTTPMGFNVVDVVGGLSYSSDVGPVGYTVNVHRRPISSSLLSFGGQKDSSSHTGATWGGVRADGGGLSLSYDRGEAHGIWSSLGADSLTGKNVADNWRVRWMTGYYYKVINENNRRVTVGLNNMIWHYDKDLSGYTLGQGGYYSPQEYLSFAVPVTWRQRTENWSWELGGSVSWSHSRTQTQARYPLLNLIPSDYRQRASELTEEGSSSHGFGYTARALVERRVTSNWFVGAAVDIQQAKDYTPSHALLYVRYSAAGWQGDLDMPPQPLVPYADW

SEQ ID NO: 60032 - protein, 318 aa, Klebsiella pneumoniae
MNQLDSIKQFTTVVADSGDIESIRHYHPEDATTNPSLLLKAAGLASYSGLIDDAIAWAKKQGGGREAQVTHACDKLAVNFGAEILKSIPGRVSTEVDARLSFNREKSIEKARHLVALYQEMGIDKSRILIKLASTWEGIRAAEVLEKEGIHCNLTLLFSFAQARACAEAGVYLISPFVGRIYDWYQARKPLEPYVVEEDPGVKSVRNIYDYFKQHKYNTIVMGASFRRTEQILALVGCDRLTIAPPLLKELQASDTPVVRKLIPASQILPRPVPLSEAEFRWEHNQDPMAVEKLAEGIRLFAVDQRKLEDLLAAKLSL

SEQ ID NO: 60033 - protein, 371 aa, Klebsiella pneumoniae
MPLADFHRSDPFTLGIELELQVVNPPGYDLSQDASTLIADVQHELTVGEAKHDITESMLEIATGVCRDISHAQIQLSAIQQAVQRAALRHHLQICGGGSHPFHAWQRQQISDNPRYVKTVEHFGYLAQQATVFGQHVHVGCQSGDDAIYLLHGLSRFVPHFIALNAASPWFDSTDSRFACSRLNRFSSYPDNGPMPWVADWQGFRRLFRQLSYTSMIDSMKDLHWDIRPSPQFGTVEVRVMDTPLTLAQAIHIAGFIQTLACWLLTERPFKHQPDDYLLYPFNRYQACRYGLDGTLTDVRSGEQRSIRQEILQLADRLAPFAHQLKATAALEAVVRQAKSPHSEAQQMRDFIANGGSLSGLVQKHCEIWAA

SEQ ID NO: 60034 - protein, 310 aa, Klebsiella pneumoniae
MSNSEHLATVMVNAFIDAVDRGVDLVPVVADSTSTAKIAPFIKRFPVRAVNVGIAEQTLVGAAAGLALVGKVAVTCNAAPFLISRANEQIKVDVCYNNTNCQTFGLNAGASYGPLASTHHSIDDIAILRGFGNIEIYAPSSPGECRQIIDYALAHVGPVYIRLDGKALPELHDEHYRFIPGNIDVLRLGRDIALVAMGSTVHEIVEAAAQLAAEGIDATVISVPSIRPCDTQALLAAIQSCPAAITVEEHNVNGGVGSLVAEVLAEAGCAIPLRRLGIPDGQYAIAADRAATRARHEIDAAGVVKHARKL

SEQ ID NO: 60035 - protein, 490 aa, Klebsiella pneumoniae
MSRMAEQQLYINGGYTSATNGRTFETINPATGEVLATVQAAGREDVDRAVESAQRGQKIWAAMTAMERSRILRRAVDLLRQRNDELARLETLDTGKPLSETAAVDIVTGADVLEYYAGLIPALEGSQIPLRDSSFVYTRREPLGVVAGIGAWNYPIQIALWKSAPALAAGNAMIFKPSEVTPLTALKLAEIYSEAGLPDGVFNVLPGIGAETGQYLTEHPDIAKISFTGGVASGKKVMANSAASSLKEVTMELGGKSPLIIADDADLDLAADIAMMANFYSSGQVCTNGTRVFVPAKQKAEFEHKILERVARIRPGDLFADDTNFGPLVSFPHRDNVLRYIESGKREGARLLCGGEALKGEGFDNGAWVAPTVFTDCSDEMTIVREEIFGPVMSILSYADEAEVIRRANATEYGLAAGVVTPNLNRAHRIIHQLEAGICWINSWGESPAEMPVGGYKHSGIGRENGVMTLQSYTQVKSIQVEMGKFQSIF

SEQ ID NO: 60036 - protein, 554 aa, Klebsiella pneumoniae
MQFDYIIIGAGSAGNVLATRLTEDPNTTVLLLEAGGPDYRFDFRTQMPAALAYPLQGKRYNWAYETEPEPYMNNRRMECGRGKGLGGSSLINGMCYIRGNAMDLDNWAKEPGLEHWSYLDCLPYYRKAETRDIGPNDYHGGDGPVSVTTPKPGNNPLFEAMVEAGVQAGYPRTDDLNGYQQEGFGPMDRTVTPQGRRASTARGYLDQARGRPNLTIRTHALTDHIIFAGKRAVGVEWLEGESTIPSKATANKEVLLCAGAIASPQILQRSGVGNPELLRQFDIPVVHDLPGVGENLQDHLEMYLQYECKEPVSLYPALQWWNQPKIGAEWLFGGTGIGASNQFEAGGFIRSRAEFAWPNIQYHFLPVAINYNGSNAVKEHGFQCHVGSMRSPSRGHVRLKSRDPHAHPAILFNYMSHEQDWQEFRDAIRITREIMNQPALDKYRGREISPGIECQSDAELDEFVRNHAETAFHPCGTCKMGYDEMAVVDGEGRVHGLEGLRVVDASIMPQIITGNLNATTIMIGEKMADAIRGRQPLPRSTATYYVAGDAPVRR

SEQ ID NO: 60037 - protein, 297 aa, Klebsiella pneumoniae
MADFPPVASLRSFEAVARLGSVTQAAHEMSVTHSAVSQHIKQLEALVGVTLFIRHGRGVRITEEGRLYALQIREALQHIADATRMVQIKPRTLEVTLATLPSFGCHWLLPRLARFQARHPQIAVRLLTSLAVVNLQQEGIDLAIRMGQGDWEGMESRHLFADEQLVVAAPGYRGGNLPTTPQAIAASDIIFSMESWHAWCSQAGLEKPIVPSGLRLNDSNLVLEAVRLGAGVALERRSLVAGAIARGELVQLTAVTVPYPWHYWLTVSPQAENRPEVARFIAWLEEESALWRQQISA

SEQ ID NO: 60038 - protein, 340 aa, Klebsiella pneumoniae
MKTIKGPGIFLAQFIGPQAPFNTLAGIAQWAAGLGYKALQIPCNHPAIFDVERAAASQTYCDEVSGILAEHGLVISELSTHLEGQLVAVHPAYDAALDAFAPAALHGDPQARQRWAVEKVHQAAVASGRLGLQAHATFSGALAWPFFYPWPPHNQPLLDEAFAELARRWRPLLDLFDEQGVDVCYEIHPGEDLHDGVTFERFLTLVDNHPRCNMLYDPSHLHLQQMDYLTYIDIYHARIKAFHVKDAEFRRNGRNGVYGGYQPWQQRAGRFRSPGDGQIDFKGVFSKLTEYDFAGWAVLEWECCLKDSETGAREGSEFIRRHIIPVAGRAFDDFAAGGRE

SEQ ID NO: 60039 - protein, 392 aa, Klebsiella pneumoniae
RLSLMMFMQFFIWGSWSVTLGLVMTRYEMSLLIGDAFSAGPIASILSPFVLGMLVDRFFASQKVMAVMHLAGGAILWFVPQAAGGCRTGCLLIGLLFGYTLCYMPTLALTNNICLPSLANVDKTFPVVRVFGTIGWIIAGICIGVTGISDTTGIFTLAALCSVALALYSLTLPHTPAPAKGMPVQFRDLLCADAFALLKTRHFLIFSLCATLISVPLGTYYAYTASYLADAGVKDVSTAMSFGQMSEIVFMLVIPLLFRRLGVKYMLLIGMAAWFVRYAFFALGVSEEGRFLLYLGILLHGVCYDFFFVVGFIYTDRVAGEKVKGQAQSMIVMFTYGIGMLLGSQISGALYNHLVAGQSVPQAWVTFWWIPAVAAAVIALIFLFSFQYNEKE

SEQ ID NO: 60040 - protein, 99 aa, Klebsiella pneumoniae
MTTPEDLQARAGEAAALMKAMSNPHRLLILCMLCDAPRASAGELARATGLSPSATSQHLARMRDEGLIDSERDAQRIHYFITHPAVQQVINTLKTLYCP

SEQ ID NO: 60041 - protein, 176 aa, Klebsiella pneumoniae
MDSSFTPIEQMLKFRASRHEDFPFQEILLTRLCMHMQGKLLENRNKMLKAQGINETLFMALITLESQENHSIQPSELSCALGSSRTNATRIADELEKRGWIERRESDNDRRCLHLQLTEKGHQFLREVLPPQHNCLHQLWSSLSTSEKDQLEHITRKLLSRLDQMEEEGVLADSLR

SEQ ID NO: 60042 - protein, 183 aa, Klebsiella pneumoniae
KGKTMSVQPVEISKAYRLLQSGPTTMISAKYDGVENVMSAAWVGLAGERKVVAYIGTQAFTRQLVEKSGYFVVQIPVVSQMATVLYAGGRSYADAPDKNDTIPFFYQPEFDLPLVAGCAGWLVCKVMPYPDIQQQHNLFMGDIVAAWSDDRVFRNGHWIFDDAPDELRTVHYVAGGQFYAIGK

SEQ ID NO: 60043 - protein, 1050 aa, Klebsiella pneumoniae
MDFSRFFIDRPIFAAVLSILIFITGLIAIPLLPVSEYPDVVPPSVQVRAEYPGANPKVIAETVATPLEEAINGVENMMYMKSVAGSDGVLVTTVTFRPGTDPDQAQVQVQNRVAQAEARLPEDVRRLGITTQKQSPTLTLVVHLFSPNGKYDSLYMRNYATLKVKDELARLPGVGQIQIFGSGEYAMRVWLDPNKVAARGLTASDVVTAMQEQNVQVSAGQLGAEPLPQESDFLISINAQGRLHTEEEFGNIILKTAQDGSLVRLRDVARIEMGSGSYALRSQLNNKDAVGIGIFQSPGANAIDLSNAVRAKMAELATRFPEDMQWAAPYDPTVFVRDSIRAVVQTLLEAVVLVVLVVILFLQTWRASIIPLIAVPVSVVGTFSILYLLGFSLNTLSLFGLVLAIGIVVDDAIVVVENVERNIEEGLAPLAAAHQAMREVSGPIIAIALVLCAVFVPMAFLSGVTGQFYKQFAVTIAISTVISAINSLTLSPALAALLLKPHGAKKDLPTRLIDRLFGWIFRPFNRFFLRSSNGYQGLVGKTLGRRGAVFAVYLLLLCAAGVMFKVVPGGFIPTQDKLYLIGGVKMPEGSSLARTDAVIRKMSEIGMNTEGVDYAVAFPGLNALQFTNTPNTGTVFFGLKPFDQRKHTAAEINAEINAKIAQIQQGFGFSILPPPILGLGQGSGYSLYIQDRGGLGYGALQSAVNAMSGAIMQTPGMHFPISTYQANVPQLDVQVDRDKAKAQGVSLTELFGTLQTYLGSSYVNDFNQFGRTWRVMAQADGPYRESVEDIANLRTRNNQGEMVPIGSMVNISTTYGPDPVIRYNGYPAADLIGDADPRVLSSSQAMTHLEELSKQILPNGMNIEWTDLSFQQATQGNTALIVFPVAVLLAFLVLAALYESWTLPLAVILIVPMTMLSALFGVWLTGGDNNVFVQVGLVVLMGLACKNAILIVEFARELEIQGKGIMEAALEACRLRLRPIVMTSIAFIAGTIPLILGHGAGAEVRGVTGITVFSGMLGVTLFGLFLTPVFYVTLRKLVTRRKPVQEDLPA

SEQ ID NO: 60044 - protein, 212 aa, Klebsiella pneumoniae
MRIIIYTRNDCVQCHATRRAMESRGLAFEMVNVDQQPDAADTLREQGFRQLPVVIAGELRWSGFRPDMINRLRPSFTAGQRMSLIVYFSSRSENTHRFVQRLGLPAVRIPLNEREHLRVDEPYILIVPSYGGGGTAGAVPRQAIRFLNDVHNRQLIRGVIAAGNRNFGDGWGRAGDVIAQKCAVPYLYRFELMGTPDDINTVRKGVSEFWQR

SEQ ID NO: 60045 - protein, 713 aa, Klebsiella pneumoniae
MATTTAERITAAVDFHALNAMLNLYDSEGRIPFEKDRQAVEAFMATQVQPNALTFPSQEDKLSWLVSEGYYDPQVLAGYDRGFVLALFAHARRAPFRFQTFLGAWKFYTSYALKTFDGKHYLEDFAERSVMVALTLARGDEQQARQLTEEILSGRFQPATPTFLNAGKQQRGELISCFLLRIEDNMESIGRAVNSALQLSKRGGGVAFLLSNLREAGAPIKRIENQSSGVVPVMKMLEDAFSYANQLGARQGAGAVWLHVHHPDILRFLDTRRENADEKIRIKTLSLGVVIPDITFQLAKEDAQMALFSPYDVERLYGKPFADCAIGDLYPQLVADERVRKRWIRARDLFQRLAEIQFESGYPYIMFEDTVNRASPVAGRVTMSNLCSEILQVSTPSAYNEDLSYAHIGEDISCNLGSLNIAHTMDSPDFGRTIATAVRALTAVSDMSHIQSVPSVAAGNAASHAIGLGQMNLHGYLAREGIAYGSPEGLDFTNIYFYTVTWHALHTSMQLARERGQRFAGFEQSRYASGAYFDKYLQEEWQPKTERVRALFARAGISLPDRESWRQLRDDVMRYGIYNRYLQAVPPTGSISYINHATSSIHPIVSKIEIRKEGKTGRVYYPAPFMNNDNLALYQDAYEIGPEKIIDTYAEATRHVDQGLSLTLFFPDTATTRDINKAQIYAWKKGIKTLYYIRLRQLALEGTEIEGCVSCAL

SEQ ID NO: 60046 - protein, 320 aa, Klebsiella pneumoniae
MTHLTRVSAINWNRIDDDKDLEVWNRLTSNFWLPEKVPLSNDIPAWQTLSAAEQQLTIRVFTGLTLLDTIQNTVGAPALMADALTPHEEAVLSNISFMEAVHARSYSSIFSTLCHSKEVDAAFAWSESCDPLQRKAQLMLGYYQADEPLKKKIASVFLESFLFYSGFWLPMYFSSRGKLTNTADLIRLIIRDEAVHGYYIGYKYQKGLEIVSPGKREELKNFALDLLMDLYDNELAYSRELYGESGWFDDVSAFLCYNANKALMNLGYEALFPAEMAAVNPAILAALSPNADENHDFFSGSGSSYVIGKMEETADDDWDF

SEQ ID NO: 60047 - protein, 1040 aa, Klebsiella pneumoniae
MQVLPPGRTGGPSRLFIMRPVATTLLMVAILLAGIIGYRFLPVSALPEVDYPTIQVVTLYPGASPDVVTSAITAPLERQFGQMSGLKQMSSQSSGGASVVTLQFQLTLPLDVAEQEVQAAINAATNLLPSDLPNPPVYSKVNPADPPIMTLAVTSSAIPMTQVEDMVETRVAQKISQVSGVGLVTLAGGQRPAVRVKLNAQAIAALGLTSETVRTAITSANVNSAKGSLDGPARAVTLSANDQMQSAEDYRRLIIAYQNGAPIRLGDVASVEQGAENSWLGAWANQQRAIVMNVQRQPGANIIDTADSIRQMLPQLTESLPKSVKVQVLSDRTTNIRASVRDTQFELMLAIALVVMIIYLFLRNVPATIIPGVAVPLSLVGTFAVMVFLDFSINNLTLMALTIATGFVVDDAIVVIENISRYIEKGEKPLAAALKGAGEIGFTIISLTFSLIAVLIPLLFMGDIVGRLFREFAVTLAVAILISAVVSLTLTPMMCARMLSHESLRKQNRFSRASERFFERVIAVYGRWLSRVLNHPWLTLGVALSTLALSIILWVFIPKGFFPIQDNGIIQGTLQAPQSVSFASMAERQRQVASIILKDPAVESLTSFVGVDGTNPALNSARLQINLKPLDERDDRVQMVISRLQQAVDGVPGVALYLQPTQDLTIDTTVSRTQYQFTLQANSLEALSTWVPPLLSRLQAQPQLADVSSDWQDKGLAAYIKVDRDSASRLGISMADVDNALYNAFGQRLISTIYTQANQYRVVLEQDTEATPGLAALENIRLTSSDGGIVPLTAIATVEQRFTPLSVNHLDQFPVTTISFNVPDNYSLGEAVEAILAAEQSLDFPTDIRTQFQGSSLAFQSALGSTVWLVVAAVVAMYIVLGVLYESFIHPITILSTLPTAGVGALLALWLAGSELDVIAIIGIILLIGIVKKNAIMMIDFALAAEREQGMPPREAIYQACLLRFRPILMTTLAALLGALPLMLSTGVGAELRRPLGIGMVGGLMLSQVLTLFTTPVIYLLFDRLSLHLKRRFPRQEEEA

SEQ ID NO: 60048 - protein, 1025 aa, Klebsiella pneumoniae
MKFFALFIYRPVATILISLAITLCGILGFRLLPVAPLPQVDFPVIMVSASLPGASPETMASSVATPLERSLGRIAGVNEMTSSSSLGSTRIILEFNFDRDINGAARDVQAAINAAQSLLPSGMPSRPTYRKANPSDAPIMILTLTSDTYSQGELYDFASTQLAQTIAQIDGVGDVDVGGSSLPAVRVDLNPQALFNQGVSLDAVRTAISDANVRKPQGALEDSAHRWQVQTNDELKTAADYQPLIVHYQNGAAVRLGDVATVSDSVQDVRNAGMTNAKPAILLMIRKLPEANIIQTVDSIRARLPELQQTIPAAIDLQIAQDRSPTIRASLEEVEQTLVISVALVILVVFLFLRSGRATLIPAVAVPVSLIGTFAAMYLCGFSLNNLSLMALTIATGFVVDDAIVVLENISRHLEAGMKPLQAALQGSREVGFTVLSMSLSLVAVFLPLLLMGGLPGRLLREFAVTLSVAIGISLAVSLTLTPMMCGWLLKSGKPHQPTRNRGFGRLLVAVQGGYGKSLKWVLKHSRLTGLVVLGTIALSVWLYISIPKTFFPEQDTGVLMGGIQADQSISFQAMRGKLQDFMKIIREDPAVDNVTGFTGGSRVNSGMMFITLKPRDQRHETAQQVIDRLRKKLANEPGANLFLMAVQDIRVGGRQSNASYQYTLLSDDLSALREWEPKIRKALAALPELADVNSDQQDNGAEMDLVYDRDTMSRLGISVQDANNLLNNAFGQRQISTIYQPLNQYKVVMEVDPAYTQDVSALDKMFVINSDGKPIPLAYFAKWQPANAPLSVNHQGLSAASTISFNLPTGRSLSEASEAIDRAMTQLGVPSSVRGSFAGTAQVFQQTMNAQVILILAAIATVYIVLGVLYESYVHPLTILSTLPSAGVGALLALEIFDAPFSLIALIGIMLLIGIVKKNAIMMVDFALEAQRNGNLTPEEAIFQACLLRFRPIMMTTLAALFGALPLVLSGGDGFELRQPLGITIVGGLVMSQLLTLYTTPVVYLFFDRLRLRFSRHSSQPVSE

SEQ ID NO: 60049 - protein, 453 aa, Klebsiella pneumoniae
MFKPELLSPAGTLKNMRYAFAYGADAVYAGQPRYSLRVRNNEFNHENLQLGINEAHALGKKFYVVVNIAPHNAKLKTFIRDLKPVVEMGPDALIMSDPGLIMLVREHFPEMPIHLSVQANAVNWATVKFWQQMGLTRVILSRELSLDEIEEIRRQVPEMEIEIFVHGALCMAYSGRCLLSGYINKRDPNQGTCTNACRWEYNVAEGKEDDVGNIVHKYEPIPVQTVEPTLGIGAPTDKVFMIEEAKRPGEYMTAFEDEHGTYIMNSKDLRAIAHVERLTQMGVHSLKIEGRTKSFYYCARTAQVYRKAIDDAAAGKPFDTSLLETLEGLAHRGYTEGFLRRHTHDDYQNYEYGYSVSERQQFVGEFTGERNGPLAAVAVKNKFSVGDSLELMTPQGNVNFTLEHMENGKGETMPVAPGDGYTVWLPVPDDLPLQYALLMRNFTGQTTRNPHGN

SEQ ID NO: 60050 - protein, 298 aa, Klebsiella pneumoniae
MMSTFPASLLILNGKGANEPQLREAVNLLRDEGIDIHVRVTWEKGDAARFIDEALQLNVETVIAGGGDGTINEVATALVERGGKMALGILPLGTANDFATSVGIPQDLASALKLAIVGRDVPIDIARVNDKTGFINMATGGFGTRITTETPEKLKAALGGVSYLIHGLMRMDTLKPDRCEIRGENFHWQGDALVIGIGNGRQAGGGQQLCPEALINDGLLHLRIFTGEELIPALFSTLANPENSPNIVDGVSSWFEITAPHEMTFNLDGEPLSGKTFRMELLPAALRCRLPPDCPLLR

SEQ ID NO: 60051 - protein, 105 aa, Klebsiella pneumoniae
MRKTKMMLLGVLLATAGASWTATAAGIDQYALKEFTADFTQFHIGDTVPAMYLTPEYNIKQWQQRNLPAPDAGSHWTYMGGNYVLITDTEGKILKVYDGEIFYHR

SEQ ID NO: 60052 - protein, 680 aa, Klebsiella pneumoniae
MLTMTQVAKKILVTCALPYANGSIHLGHMLEHIQADVWVRYQRMRGHEVNFICADDAHGTPIMLKAQQLGITPEQMIGEMSQEHQTDFAGFDISYDNYHSTHSDENRELSELIYTRLKENGFIKNRTISQLYDPEKGMFLPDRFVKGTCPKCKSPDQYGDNCEVCGATYSPTELIDPKSVVSGATPVMRDSEHFFFDLPSFSEMLQAWTRSGALQEQVANKMQEWFESGLQQWDISRDAPYFGFEIPNAPGKYFYVWLDAPIGYMGSFKNLCDKRGDTTSFDEYWKKDSTAELYHFIGKDIVYFHSLFWPAMLEGSNFRKPTNLFVHGYVTVNGAKMSKSRGTFIKASTWLNHFDADSLRYYYTAKLSSRIDDIDLNLEDFVQRVNADIVNKVVNLASRNAGFISKRFDGVLAAELADPALYKTFTDAAESIGEAWDSREFGKAIREIMALADVANRYVDEQAPWVVAKQEGRDADLQAICTMGLNMFRVLMTWLKPVLPQLAARAEAFLNSELSWDAIQQPLLAHKVNPFKALYNRIEMKQVEALVEASKEEVKATAAPVTGPLADDPIQETITFDDFAKVDLRVALIENAEFVEGSDKLLRLTLDLGGEKRNVFSGIRSAYPDPQPLIGRLTVMVANLAPRKMRFGISEGMVMAAGPGGKDIFLLSPDDGAKPGQQVK

SEQ ID NO: 60053 - protein, 574 aa, Klebsiella pneumoniae
MVRAFRHVWFAGMYEFDLVLLLLQQMCVFLVIAWLMSKTRLFIPLMQVTVRLPHKLLCYVTFSIFCIMGTYFGLHIEDSIANTRAIGAVMGGLLGGPVVGGLVGLTGGLHRYSLGGMTALSCMVSTIVEGLLGGLVHSVLVKRGRPDKVFSPLTAGAITFVAELVQMMIILLIARPFQDALHLVQSIAAPMMVTNTVGAALFMRILLDKRAMFEKYTSAFSATALKVAASTEGILRQGFNEENSMKVAQVLIQELDIGAVAITDRDKLLAFTGIGDDHHLPGKPISSSYTQRAIETGEVVYADGNEVPYRCSIHPHCKLGSTLVIPLRGENQRVIGTIKLYEAKNRLFSSINRTLGEGIAQLLSAQILAGQYERQKALLTQSEIKLLHAQVNPHFLFNALNTLKAVIRRDSDQAGQLVQYLSTFFRKNLKRPTEIVTLADEIEHVNAYLQIEKARFQANLQIQMAVPEGLAHHQLPAFTLQPIVENAIKHGTSQHLGVGEITIRASQDDRWLQLDIEDNAGLYRANPQASGLGMNLVDRRLRARFGADCGISVTCEPERFTRVTLRLPLEENAC

SEQ ID NO: 60054 - protein, 103 aa, Klebsiella pneumoniae
MTAKTAPKITLWEFFQQLGKTFMLPVAVLSFAGIMLGIGSSLSSHDVLTLLPWLDMPLLQAIFIWMSKVGSFAFSFLPVMFVSAIPLGLARENKGVAAFAGFV

SEQ ID NO: 60055 - protein, 391 aa, Klebsiella pneumoniae
MQKLINAVQNYAWGSHTALTELYGIANPDNLPMAELWMGAHPKSSSQILAADGQPRSLREVIDADKAALLGDKVAARFGELPFLFKVLCAAQPLSIQVHPNKRASEEGFARENAAGIPLSAAERNYKDPNHKPELVFALTPFLAMNAFREFSEIVTLLQPVASAHPAIGAFLQQPDATHLSQLFASLLNMQGEEKAKALQVLRDVLAREQGEPWQTIRLIAEFYPDDSGLFSPLLLNVVKLNPGEAMFLFAETPHAYLQGVALEVMANSDNVLRAGLTPKYIDIPELVANVKFEAKPAGELLTQPQRHGAELDFPIPVEDFAFSLHDLSAEASDLAQASAAIVFCVDGEAVLRKGDQSLTLKPGESAFVAASESPVQVSGRGRVARVFNKL

SEQ ID NO: 60056 - protein, 987 aa, Klebsiella pneumoniae
  MISC_FEATURE (524)..(524): X=any amino acid
RKVNHHQKPMEGKTMRIGVPQERLAQETRAAATPKTVEQLLKLGFSVAVESGAGKLASFDDEAFAEAGAEIVTGDEVWQSDVILKVNAPNDDEIALLNPGTTLISFIWPAQNPQLMEKLAARNINVMAMDSVPRISRAQSLDALSSMANIAGYRAIVEAAHEFGRFFTGQITAAGKVPPAKVMVIGAGVAGLAAIGAANSLGAIVRAFDTRPEVKEQVQSMGAEFLELDFKEEAGSGDGYAKVMSEAFIKAEMALFAAQAKEVDIIVTTALIPGKPAPKLITREMVDSMKSGSVVVDLASQNGGNCEYTVPGEVVTTANGVKIIGYTDLPGRLPTQSSQLYGTNLVNLLKLLCKEKDGNIVIDFDDVVVRGVTVVREGEITWPAPPIQVSAQPQAAAKKVEAPKEAVKPASPWRKYALMALAIILFGWLANVAPKEFLGHFTVFALACVVGYYVVWNVSHALHTPLMSVTNAISGIIVVGALLQIGHGGWVSFLSFIAVLIASINIFGGFTVTQRMLKMFRKGXGVHMSGGLVTAAYIVAAILFIFSLAGLSKHETSQQGNYFGIAGMAIALIATILGPDAGNVGWIILAMVIGGAIGIRLAKKVEMTEMPELVAILHSFVGLAAVLVGFNSYLQHETGMEQFWSIIHLTEVFLGIFIGAVTFTGSVVAFGKLRGKISSRPLMLPNRHKLNLAALVVSFILMVIFVRSDSTGTQVLCLLVMTAIALAFGWHLVASIGGADMPVVVSMLNSYSGWAAAAAGFMLSNDLLIVTGALVGSSGAILSYIMCKAMNRSFISVIAGGFGTDGSSSGGDEEVGEHREISAEETAEMLKNSHSVIITPGYGMAVAQAQYPVAEITEKLRARGIKVRFGIHPVAGRLPGHMNVLLAEAKVPYDIVLEMDEINDDFSDTDTVLVIGANDTVNPAAQDDPKSPIAGMPVLEVWKAQNVVVFKRSMNTGYAGVQNPLFFKENTHMLFGDAKASVDAILK

SEQ ID NO: 60057 - protein, 508 aa, Klebsiella pneumoniae
MSMSSIPSSSPGGKRYGWVEKIGNKVPHPFLLFIYLIAVLIAATAILSALNVGVQNPTDGSRVVVKNLLSVEGLHWFLPNVIKNFSGFAPLGAILALVLGAGFAERVGLLPALMVKMASHVSARYASYMVLFIAFFSHISSDAALVIMPPLGALMFLAVGRHPVAGLLAAIAGVGCGFTANLLIVTTDVLLSGISTEAAKSIDASLHVSVIDNWYFMATSVIVLTLVGGLITDKLVEPRLGQWQGSRDEKLQTLTPAERFGLRIAGVATLVFVAVIALMVVPENGILRDPVQHTVMPSPFIKGIVPLIIFFFFVVSLAYGIATGKIRRQADLPQLMIEPMKEMAGFIVMVFPLAQFVAMFNWSNMGKFMAVGLTDLLESSGMNGVPAFVGLALLSAFLCMFIASGSAIWSILAPIFVPMFMLLGFHPAFAQILFRIADSSVLPLAPVSPFVPLFLGFLQRYRPDARLGTYYSLVLPYPLIFLAVWLLLLVGWYLVGLPIGPGIYPRLS

SEQ ID NO: 60058 - protein, 481 aa, Klebsiella pneumoniae
MEAIFQFVDEVVEAQRDTYCAIADDIWDQPETRFEEFWSAQRLADALEAEGFQLTRDAGGIPNAFIASVGEGQPVIALLGEFDALAGLSQQAHSAEPTPLTPGANGHGCGHNLLGTAAFAAAVAAKGWLQQHGDSGTLRFYGCPGEEGGSGKTFMVREGLFDDVDAALTWHPEAWAGMFSTRTLANIQAAWRFTGTAAHAANSPHLGRSALDAVTLMTTGSNFLNEHIIEKARVHYAITDTGGVSPNVVQAQAEVLYLIRAPEMADAEQIFARIEKIAQGAALMTETQVSCRFEKACSSYLPNRTLEAAMYQAVCHYGTPAWSDEERAFAAAIRATLSANDINNSLNNIAGTSGEEGKTFARRHRDTLLIDEVAPWAATDNVLAGSTDVGDVSWKAPVAQCFSPCFAVGTPLHSWQLVSQGRTSIAHKGMLLAGKVLAATAIRLFSDSALLEASQQEFRQVLAERPYRCPIPAEVSPSVLR

SEQ ID NO: 60059 - protein, 442 aa, Klebsiella pneumoniae
LLTPMLRSSPLTNWFSDAQRVQGMLDFEAALAQAQAACGMVPPEAVGPIVAACRHEAIDFAALGEAAVGAGNLAIPLVKQLTAQVKAQDPEAARYVHWGATSQDAIDTGLVLQLRGALDAAETLLEQLLAALALQADRYRDTVMPGRTWMQHALPVTFGLKLAGTLDALLRWQQRLREMRPRLLALQFGGAAGTLDALKEKGPAVGLALAQILGLSLPDTPWHSQRDRLLEAGAWFAGVCGTLGKFANDFSLLMQTEVAEVGEPVAEGRGGSSTMPHKRNPVACAAILTAAQRTPGLMATLYASQLQQHERALGGWQAEWETLPELITLVGGALAQSEALVRDMQVFPQKMRADLDITHGLIMAEAVTLALAEFIGKAEAHHHIEALCRQALDRHCPLVDLLAADPQVSQYLSRERLTTLLDPATATGSAERFVRQVLARYQ

SEQ ID NO: 60060 - protein, 487 aa, Klebsiella pneumoniae
MENTLLTANATLPTYDRSALIPRIVHLGFGAFHRAHQAVYADILASEHGSDWGYTEVNLIGGEQQIADLQQQDLLYTVAEMSADAWTARVVGVVKQALHAGVDGLEAVLAAMCQPQVAIVSLTITEKGYCHSPASGELQLDHPLIAADLHNPHQPKSAVGVVVEALSRRRAAGLPAFTVMSCDNMPENGHVMRNVVCAYARALDEDLAAWIEQNVTFPSTMVDRIVPAVTAETLDKITQLTGVRDPAGVACEPFRQWVIEDNFVAGRPQWEKAGAELVADVVPFEEMKLRMLNGSHSFLAYLGYLAGYQHINDCMQDDNYRRAALSLMLDEQAPTLKVQGVDLSRYASLLIDRYCNPALKHRTWQIAMDGSQKLPQRMLDSIRWHLVHQRDFTLLALGVAGWMRYVGGVDDAGQSIEICDPLLPVIQQAVAASADGEARVKALLGIEAIFGVELPQESRFVTAVTRAYLALQRQGAKATVRRVGRRA

SEQ ID NO: 60061 - protein, 166 aa, Klebsiella pneumoniae; identical to SEQ ID NO: 53818

SEQ ID NO: 60062 - protein, 91 aa, Klebsiella pneumoniae
MKKLFASLALAAAVAPVWAATQTVTLAVPGMTCAACPITVKKALSKVEGVSKVDVGFEKREAVVTFDDTKASVQKLTKATADAGYPSSVKQ

SEQ ID NO: 60063 - protein, 182 aa, Klebsiella pneumoniae
  MISC_FEATURE (12)..(12): X=any amino acid
IVFRRPRLNPDXFLLEEGIASLCHAENNMVISTIFAPSLLGLIDGYGVFNGIPEKHHCSLFAETDLRGRWIGHQAAVEILNAQNLWQEMAHVLAQRLMVLSMRSQEMVGVDSYPMVRTLLTELADYPEEYRRQINALSFIQRRTNLSRSRVMSILAELRKGGYITVHRGVLEKITRTLPAHF

SEQ ID NO: 60064 - protein, 165 aa, Klebsiella pneumoniae
MQFNIPTLLTLFRVILIPFFVLAFYLPFSWAPFACALIFFVAAVTDWFDGFLARRWNQSTRFGAFLDPVADKVMVAIAMVLVAEHYHTWWVTLPAATMIAREIIISALREWMAELGKRSSVAVSWIGKVKTTAQMTALVWMLWRPYPWVEWAGIALFLVAAVLTL

SEQ ID NO: 60065 - protein, 165 aa, Klebsiella pneumoniae
MALNLQDKQAIVAEVSEVAKGALSAVVADSRGVTVDKMTELRKAGREAGVYMRVVRNTLLRRVVEGTQFECLKDTFVGPTLIAYSMEHPGAAARLFKEFAKANAKFEVKAAAFEGELIPASQIDRLATLPTYEEAIARLMATMKEASAGKLVRTLAAVRDAKEAA

SEQ ID NO: 60066 - protein, 108 aa, Klebsiella pneumoniae
WSSGLMQNQRIRIRLKALDHRLIDQSTAEIVETAKRTGAQVRGPIPLPTRKERFTVLISPHVNKDARDQYEIRTHKRLVDIVEPTEKTVDALMRLDLAAGVDVQISLG

SEQ ID NO: 60067 - protein, 378 aa, Klebsiella pneumoniae
MIINNVKLVLDDEVVHGSLEVQDGRILAFAESQSRLPQALDGEGGWLLPGLIELHTDNLDKFFTPRPKVDWPAHSAMSSHDAMMVASGITTVLDAVAIGDVRDGGDRLENLEKMVNAVEETQKRGLNRAEHRLHLRCELPHHTTLPLFEKLIDRESVSMVSLMDHSPGQRQYADRSKYRDYYQGKYHLTHDEMDRFEAEQMALAATWSQPNRQTIAAMCRARRIALASHDDATEAHVAESHQLGSVIAEFPTTLAAAQASRQHGMHVLMGAPNIVRGGSHSGNVAAHQLASHGLLDILSSDYYPASLLDAAFRIADAEDNAFTLPQAIRLVSQHPAQALGLDDRGVIAEGKRADLVLAHRRGEHIQIDHVWRQGKRVF

SEQ ID NO: 60068 - protein, 941 aa, Klebsiella pneumoniae
MDKIEVRGARTHNLKNINLVIPRDKLIVVTGLSGSGKSSLAFDTLYAEGQRRYVESLSAYARQFLSLMEKPDVDHIEGLSPAISIEQKSTSHNPRSTVGTITEIHDYLRLLYARVGEPRCPDHDVPLAAQTVSQMVDNVLAQPEGLRLMLLAPIIKERKGEHTKTLENLASQGYIRARIDGEVCDLSDPPKLELQKKHTIEVVIDRFKVRDDLAQRLAESFETALELSGGTAIVANMDDEKAEELLFSANFACPICGYSMRELEPRLFSFNNPAGACPTCDGLGVQQYFDPDRVVQNPELSLAGGAIRGWDRRNFYYFQMLKSLAEHYKFDVEAPWGTLSANVQKVVLYGSGKESIEFKYMNDRGDTSVRRHPFEGVLHNMERRYKETESSAVREELAKFISNRPCASCDGTRLRREARHVFVENTPLPTISDMSIGHAMDFFNNLKLSGQRAKIAEKVLKEIGDRLKFLVNVGLNYLTLSRSAETLSGGEAQRIRLASQIGAGLVGVMYVLDEPSIGLHQRDNERLLGTLIHLRNLGNTVIVVEHDEDAIRAADHVIDIGPGAGVHGGQVVAEGPLEAIMAVPESLTGQFMSGKRKIEVPKQRVPANPEKVLKLTGARGNNLKDVTLTLPVGLFTCITGVSGSGKSTLINDTLFPIAQRQLNGATIAEPAPYRDIQGLEHFDKVIDIDQSPIGRTPRSNPATYTGVFTPVRELFAGVPESRSRGYTPGRFSFNVRGGRCEACQGDGVIKVEMHFLPDIYVPCDQCKGKRYNRETLEIKYKGKTIHEVLDMTIEEAREFFDAVPALARKLQTLMDVGLTYIRLGQSATTLSGGEAQRVKLARELSKRGTGQTLYILDEPTTGLHFADIQQLLEVLHQLRDQGNTIVVIEHNLDVIKTADWIVDLGPEGGSGGGEILVSGTPETVAECEASHTARFLKPMLK

SEQ ID NO: 60069 - protein, 559 aa, Klebsiella pneumoniae
MSNAITEIDNTDLVFIFGYNPADSHPIVANHVINAKRNGAKIIVCDPRKIETARIADMHIALKNGSNIALLNAIGHVIIEEDLYDKSFVASRSEGFEEYRKIVEGYTPESVEEITGVSAQEIRACARMYASAKSAAILWGMGVTQFYQGVETVRSLTSLAILTGNLGKPSVGVNPVRGQNNVQGACDMGALPDTYPGYQYVKFPENREKFAKAWGVESLPAHTGYRISELPHRAAHGEVRAAYIMGEDPLQTDAELSAVRKAFDDLELVIVQDIFMTKTASAADVILPSTSWGEHEGVYTAADRGFQRFFKAVEPKWDLKTDWQIISEIATRMGYPMHYNNTQEIWDELRHLCPDFYGATYEKMGELGYVMWPCRDESDADQGTSYLFKEKFDTPNGLAQFFTCDWVAPIDKLTDEYPMVLSTVREVGHYSCRSMTGNCAALAALADEPGYAQINTADAERLGIEDEELVWVNSRKGRIITRAQVSDRPNKGAVYMTYQWWIGACNELVSENLSPITKTPEYKYCAVNVERIADQRAAEQYVIDEYNKLKSRLRESAMG

SEQ ID NO: 60070 - protein, 228 aa, Klebsiella pneumoniae
MKYLFLFLLVFTSGAAVATEPGSQYQQQAEAGDRRAQYYLADTWVSSGDYQKAEYWAQKAAAQGDGDALALLAQLKIRNPQQADYPQARQLAEKAVEAGSKSGEIVLARVLVNRQAGATDVAHAITLLQDAARDSESDAAVDAQMLLGLIYASGVHGPEDDVKASEYFKGSSSLSRTGYAEYWAGMMFQQGEKGFIEPNKQKALHWLNVSCLEGFDTGCEEFDRISKG

SEQ ID NO: 60071 - protein, 648 aa, Klebsiella pneumoniae
  MISC_FEATURE (647)..(647): X=any amino acid
HPIPANIAERCLINPDQYKAQYQQSITDPDTFWGEQGKILDWMRPYTRVKNTSFAPGNISIKWYEDGTRNLAANCLDRHLAERGDQTAIIWEGDDASQSKHITYRELHADVCRFAQCALDLGIKKGDVVAIYMPMVPEAAVAMLACARIGAIHSVIFGGFSPEAVAGRIIDSSSRLVITADEGLRAGRAIPLKKNVDDALKNPNVKSIEHVVVLKRTGGNIDWQEGRDLWWSDLIANASAEHRPVEMNAEDPLFILYTSGSTGKPKGVLHTTGGYLVYAATTFKYVFDYHPGDIYWCTADVGWVTGHSYLLYGPLACGATTLMFEGVPNWPTPARMCQVVDKHKVSILYTAPTAIRALMAEGDKAIEGTDRSSLRILGSVGEPINPEAWEWYWKKIGNEKCPVMDTWWQTETGGFMITPLPGAIELKAGSATRPFFGVQPVLVDNEGLPLDGATEGNLAIADSWPGQARTLFGDHERFEQTYFSTFKNMYFSGDGARRDEDGYYWITGRVDDVLNVSGHRLGTAEIESALVSHPKIAEAAVVGIPHNIKGQAIYAYVTLNHGEEPTPELYAEVRNWVRKEIGPLATPDVLHWTDSLPKTRSGKIMRRILRKIAAGDTSNLGDTSTLADPGVVEKLLEEKQAITMPSXV

SEQ ID NO: 60072 - protein, 69 aa, Klebsiella pneumoniae
MNKDEIGGNWKQFKGKAKEQWGKLTDDDMTVIEGKRDQLVGKIQERYGYEKDQAEKEVSDWEHKNDYRW

SEQ ID NO: 60073 - protein, 185 aa, Klebsiella pneumoniae
MDMGINMKMSKKFLAGALIFSACSALSTVAQADNTITFNGIVSDTTCTATIDGGVTAIDMGTTSVADLKAYTFGAAKNFSFSLADCPTAEEGGNSIARVTFGGVSDTANSDYFKNQATDEPATGVAVALFDEAGNVMKNNEEGSDVDISSGAATIPFTVKMVKSGDADPTKGTVQTTVTYNVTYH

SEQ ID NO: 60074 - protein, 547 aa, Klebsiella pneumoniae
MEIFFTILIMTLVVSLSGVVTRVLPFQVPLPLMQIAIGALLAWPTFGLHVEFDPELFLVLFIPPLLFADGWKTPTREFIEHGREILGLALALVVVTVVGIGFLIYWIVPGIPLIPAFALAAVLSPTDAVALSGIVGEGRIPKKIMGILQGEALMNDASGLVSLKFAVAVAMGTMVFTVGGATVEFLKVAIGGVLAGFVVSWSYGRSMRFLSRWGGDEPATQIVLLFLLPFASYLIAEHIGVSGILAAVAAGMTITRSGVMRTAPLAMRLRANSTWAMLEFVFNGMVFLLLGLQLPDILSSSLVAAEADPNVETWMLFTDIILIYAALMLVRFGWLWSMRKLSQRFLKKKPMEFGSWTTRELLISSVAGVRGAITLAGVLSIPLLLPDGNVFPARYELIFLAAGVILFSLFVGVIALPILLRHIESSDNVQQRKEERLARAATADVAIVAIQKMEERLAADTKENIDTQLLTEVSSRVIGNLRRRADGRNDVETSMLEESLERRFRLAALRSERGELYHLRATRQISNETLQKLLHDLDLLEALLIED

SEQ ID NO: 60075 - protein, 522 aa, Klebsiella pneumoniae
MSIIRLTLLALLACVPLLAQAAPYQLTTAWPVNVGPLNPHLYTPNQMFAQSMVYEPLVKYQADGSVQPWLATRWRHSADGKTWWFTLRDDVAFSNGEPFNAQAAAANFQAVLANRQRHAWLELANQITDVRALSATELQITLKSAYAPLLQELALPRPFRFIAPSQFIDGGTARGIKAPIGTGPWRLASSQLNQRDVLVRNERYWGRKPALQQITIKVIPDATSRAVAFETGEIDMLYGDEGLLPLDTFERFRHHPGYVARLSAPAETVMLALNASQGPTRGQAVREALNYAVDKQTLVDSVLYGTQQVADTLFAPSVPYAPQDLTPRRYDPTKARALLEQAGWQQLEGQPWRQKAGQPLAIELAFIGTDALAKSMAEIIQANLRQVGVQVTLVGEEESSIYARQREGRFGMIFNRTWGAPYDPHAFLSSMRVPSHADYQAQRGLPDKALIDKEISEVLTTGDEAQRRKLYHDVLTRLHQDAVYLPISYVSLMSVARQEVGEIPFAPVTSEIPFDQITPVTP

SEQ ID NO: 60076 - protein, 428 aa, Klebsiella pneumoniae
  MISC_FEATURE (354)..(354): X=any amino acid
  MISC_FEATURE (411)..(411): X=any amino acid
LRHTALGLALSLAFAGQALAVTTIPFWHSMEGELGKEVDSLAQRFNAANPDYKIVPVYKGNYEQSLSAGIAAFRTGNAPAILQVYEVGTATMMASKAIKPVYQVFSEAGIKFDESQFVPTVAGYYTDSKTGHLLSQPFNSSTPVLYYNKDAFKKAGLDPDQPPKTWQDLAAYTAKLKAAGMKCGYASGWQGWIQIENFSAWHGLPVATKNNGFDGTDAVLEFNKPEQVKHIALLEEMNKKGDFSYFGRKDESTEKFYNGDCAITTASSGSLADIRQYAKFNYGVGMMPYDADVKGAPQNAIIGGASLWVMQGKDKETYTGVAKFLDFLTKPENAAEWHQKTGYLPITTGGLRSXRVSRGFYDKNPGADIATRQLLNKPPLPFTKGLRLGNMRKSAPIVDEELESVVGPGKXYYPPASQALDSAVQRGN

SEQ ID NO: 60077 - protein, 221 aa, Klebsiella pneumoniae
MNPFTTVQRKKALVWLSLFHLLVITSSNYLVQLPISIFGFHTTWGAFSFPFIFLATDLTVRIFGAPLARRIIFAVMVPALAISYGISALFYMGEWQGFAALGTFNLFVARIAVASFMAYALGQILDVHVFNRLRQSRRWWLAPTASTLFGNISDTVAFFFIAFWRSPDPFMAAHWGEIALVDYSFKVLISIIFFLPMYGVLLNMLLKRLADKSDLSALQPS

SEQ ID NO: 60078 - protein, 305 aa, Klebsiella pneumoniae
MLHLFAGLDLHTGLLLLLALAFVLFYEAINGFHDTANAVATVIYTRAMRSQLAVAMAALFNFFGVLLGGLSVAYAIVHMLPTDLLLNMGSAHGLAMVFSMLLAAIIWNLGTWYFGLPASSSHTLIGAIIGIGLTNALMTGTSVVDALNIPKVIGIFASLIISPIVGLVIAGGLIFLLRRYWSGTKKRARIHLTPAEREKKDGKKKPPFWTRIALILSAIGVSFSHGANDGQKGIGLVMLVLIGVAPAGFVVNMNASGYEITRTRDAVNNVETFFQQRPELLKKATGVDQLVPSPDTNTACNGEFH

SEQ ID NO: 60079 - protein, 126 aa, Klebsiella pneumoniae
MGFFWALLSVGLVSAAQLLLRSAMVALPPLTDIVAFLQHLLHFQPGTFGLFFGLLGYLLSMVCWYFALHRLPLSKAYALLSLSYILVWAAAIWLPGWHEPFYWQSLLGVAIIVAGVLTIFWPVKRR

SEQ ID NO: 60080 - protein, 661 aa, Klebsiella pneumoniae
MKAVVFAYHDMGCAGIQSLLDAGYDIAAIFTHPDNPGENHFFGSVARLAAEQGIPVWAPEDVNHPLWIERIREMKPDVLFSFYYRNLLGDEILNLAPKGAFNLHGSLLPKYRGRAPLNWVLVNGESETGVTLHRMVNRADAGDIVAQQAVAIGADDAALTLHRKLCAAATELLSRALPAILAGTTDERPQDHSQATYVGRRTPEDGRLDWELPAQTLHNLVRAVSDPWPGAFGYAGANKFIVWKSCVRHDLPAAKPGTVLSIAPLIVACQDGALEIVTGQTERGVYMQGAQLAQALGLVSGAVISSKPVVAIKRRTRVLILGVNGFIGNHLTERLLQDDNYEIYGLDIGSDAISRFLDCPRFHFVEGDISIHSEWIEYHIKKCDVVLPLVAIATPIEYTRNPLRVFELDFEENLKIIRDCVKYNKRIIFPSTSEVYGMCTDKNFDEDSSNLVVGPINKQRWIYSVSKQLLDRVIWAYGDKNGLKFTLFRPFNWMGPRLDNLNAARIGSSRAITQLILNLVEGSPIKLIEGGKQKRCFTDISDGIEALFRIIENKDGRCDGQIINIGNPENEASIKELAEMLLACFERHPLRDRFPPFAGFREVESSDYYGKGYQDVEHRKPSIRNAKRCLNWEPTVEMEETVEHTLDFFLRTVELTDDKNS

SEQ ID NO: 60081 - protein, 510 aa, Klebsiella pneumoniae
MATIDSMNRDTTRLSDGPDWTFELLETYLAEVDRVAKLYRLDTYPHQIEVITSEQMMDAYSSVGMPINYPHWSFGKKFIETEQAYKHGQQGLAYEIVINSNPCIAYLMEENTITMQALVMAHACYGHNSFFKNNYLFRSWTDASSIIDYLIFARKYITECEERYGVDEVEKLLDSCHALMNYGVDRYKRPQKISLQEEKARQKSREEYLQSQVNMLWRTLPKREEEKAIESARRYPSEPQENLLYFMEKNAPLLEPWQREILRIVRKVSQYFYPQKQTQVMNEGWATFWHYTILNHLYDEGKVTERFMLEFLHSHTNVVFQPPYNSPWYSGINPYALGFAMFQDIKRICQSPTEEDKYWFPDIAGSDWLETLHFAMRDFKDESFISQFLSPKIMRDFRFFTVLDDDHNNYLEISAIHNEEGYREIRNKLSAQYNLSNLEPNIQVWNVDLRGDRSLTLRYVPHNRVPLDKGRREVLKHVHRLWGFDVLLEQQNADGSIELLDRCPARPNAL

SEQ ID NO: 60082 - protein, 93 aa, Klebsiella pneumoniae
MFCVIYRSTKREQTYLYVEKKDDFSRVPDELMRSFGTPQMAMLLPLDGRKKLVNADLEKVKQALSEQGYYLQLPPPSENLLKKHLAEQGKQSD

SEQ ID NO: 60083 - protein, 264 aa, Klebsiella pneumoniae
MSAVPSRLRGEQLTLAYGNKTIAESLNVTIPDGHFTAIIGPNGCGKSTLLRTLSRLMTPASGHVWLDGAQIQQYASKEVARRIGLLAQNATTPGDITVQELVARGRYPHQPLFTRWRKEDEEAVNKAMRATGISDLALQSVDTLSGGQRQRAWIAMVLAQETAIMLLDEPTTWLDISHQIDLLELLSELNREKGYTLAAVLHDLNQACRYATHLIALRDGRIVAEGAPKEIVTADLIERIYGLRCTIIEDPVAHTPLVVPLGRR

SEQ ID NO: 60084 - protein, 319 aa, Klebsiella pneumoniae
MNFFSFCRRGALTGMLLLLGITSAQAADWPRQVTDSYGTHTLPSQPLRIVSTSVTLTGSLLAIDAPVVASGATTPNNRVADSQGFLRQWSEVAKARKLARLYIGEPSAEAVAAQMPDLILVSATGGDSALPLYDQLKTIAPTLVINYDDKSWQTLLTQLGQITGHEQQASARIADFNKQLVSLKEKMKLPPQPVTALVYTAAAHSANIWTPESAQGQMLEQLGFSLATLPGGLPASHSQGKRHDIVQLGGENLAAGLNGQSLFLFAGDQKDADAIYANPLLAHLPAVAGKRVYPLGTETFRLDYYSALLVLQRLSSLFG

SEQ ID NO: 60085 - protein, 1300 aa, Klebsiella pneumoniae
MRHKELTMTTRLPLVAAQPGIWMAERLSTLPGAWSVAHYVELRGALDPTLLGKAIVAGLQQADTLSLRFEEEEGEVWQWLAADRTFAEPSIIDLRTAPDPHRAATERMQADLAQDLRVDGGNPLVCHQLLRVGDDRWYWYQRYHHLLVDGFSFPAITRQIAAIYRAWQRGEATPESPFTPFAEVVDEYQRYAGSEAWQRDKAFWQAQRQALPAPASLSAAPLGGRAAGSDIWRMKLEMNAEGFRRLASHAPQCQPADLALALTTLWLGRLCNRMDYAAGFIFMRRMGSAALTSTGPVLNVLPLAVHIDARETLADLAMRLAAQLKKMRRHQRYDAEQIVRDSGKAAGDEPLFGPVLNVKVFDYQLDIDGVEAVTHTLATGPVNDLELALFPDETGGLSLEILANKARYDEAELRRHMARLTALLAQFAADPALRCGEAEMLSADELARLAAVNDTAVPLPATTLSALVADQARKTPDAPALADARWQFSYREMRQQVVALAQLLRQRGVKPGDSVAVALPRSVFLTLALHGIVEAGAAWLPLDTGYPDDRLRMMLEDARPSLLIATEDQLARFSDIPGLESLCYQQPLAAGDEAPLALSKPDHTAYIIFTSGSTGRPKGVMVGQTAIVNRLLWMQDRYPLSADDVVAQKTPCSFDVSVWEFWWPFIAGAQLVMAEPEAHRDPQAMQQFFARYGVTTTHFVPSMLAAFVASLDADSVAACRTLRRVFCSGEALPTELCREWERLTGAPLHNLYGPTEAAVDVSWYPACGPELAAVTGSSVPIGWPVWNTGLRILDAAMRPVPPGVAGDLYLTGIQLAQGYLGRPDLTASRFIADPFAPGERMYRTGDVARWLTNGAVEYLGRSDDQLKIRGQRIELGEIDRVMLALPDVGQAVSHACVFNQAAATGGDARQLVGYLVSDSGLPLDTAALKARLAEQLPPHMVPVVLMQLAELPLSANGKLDRKALPLPTLGGERSGRPPEPGMETLVAAAFSQLLGCEVNDIDADFFALGGHSLLAMRLAAQLSRQLARQVTPGQVMVASTVGKLSALLAADLSDEQAQRLGLDTLLPLRESDGPTLFCFHPASGFAWQFSVLARYLSPRWSITGIQSPRPQGPMASAASLDEVCEHHLRTLLAQQPHGPYYLFGYSLGGTLAQGIAARLRQRGEAVAFLGLLDTWPPETQNWAEKEANGLDPEVLAEIDREREAFLAAQQGQASGELFSAIEGNYADAVRLLTTAHSAKFDGKATLFVAEKTRQEGMDPQVVWGPWVGELEVFSQNCAHVDIISPQAFEAIGPVVREILG

SEQ ID NO: 60086 - protein, 535 aa, Klebsiella pneumoniae
MIAFTRWPEEFAARYRQKGYWQDLPLTNLITRHAENDAVAIIDGERQISYRQFNQLVDNLACSLQRQGLKRGETALVQLGNVAEFYMTFFALLRIGVAPVNALFSHQRSELNAYAAQIKPALLIADREHALFADDSFLHAFIAEHPSLRVALLRNDGGERDLATEINRPADNFIANPTPADEVAFFQLSGGSTGTPKLIPRTHNDYDYSIRRSNEICGINAETRYLNALPAAHNYAMSSPGSLGVFLAGGRVILAADPSATLCFPLIEKHQINVASLVPPAVSLWLQAIHEWGSNAQLQSLQLLQVGGARLSATLAARIPAEIGCQLQQVFGMAEGLVNYTRLNDSPERIINTQGCPMCPDDEVWVADADGNPLPRGEVGRLMTRGPYTFRGYYNSPQHNAEAFDAEGFYCSGDLISIDEDGYITVQGREKDQINRGGEKIAAEEIENLLLRHEAVIHAALVSIEDNLLGEKSCAYLVVTSPLRAVAVRRFLREQGVAEFKLPDRVECVAALPLTPVGKVDKKQLRQWLAEGKLG

SEQ ID NO: 60087 - protein, 451 aa, Klebsiella pneumoniae
MLSPAIITLPWRPDAAEHYFAPLSALPWAMLLHSGFADHPHNRFDILVAAPRATLLTRDEQTWVDDGETVVVSAEDPLQLLQQQLDRQPFTPQPHDDLPFLGGALGLFGYDLGRRFERLPSHAQADIALADMAVGIYDWALIVDHQRQQILLLSYDDPQQRLQWLEAQTPTPGETFALTSAWQSNMSRQQYGEKFRQVQAYLHSGDCYQVNLAQRFQASYVGDEWQAFRQLNAVNRAPFSAFIRLDEGAILSLSPERFIQLRQGEIQTRPIKGTLPRLDSPLADAQQAEKLANSPKDRAENLMIVDLMRNDIGRVAVPGSVRVPELFVVEPFPAVHHLVSTITARLPMTLHASDLLRAAFPGGSITGAPKVRAMEIIDELEPQRRNAWCGSIGYLSYCGNMDTSITIRTLTAWQGQLYCSAGGGIVADSEEAAEYQETFDKVNRILQQLEN

SEQ ID NO: 60088 - protein, 192 aa, Klebsiella pneumoniae
MADRALNLDDFLSRFQLLRPQPSRHALNQRQAAVLVPIVRRPQPGLLLTQRSPLLRKHAGQVAFPGGAVDNTDATLIAAALREAQEEVAIPPEAVEVIGVLPPVDSVTGFQVTPVVGIIPPDLHYHASQDEVSAVFEMPLAEALRLGRYHPLDIHRRGNDHRVWLSWYQHYFVWGMTAGIIRELALQIGARP

SEQ ID NO: 60089 - protein, 454 aa, Klebsiella pneumoniae
MISLFDMFKVGIGPSSSHTVGPMKAGKQFVDDLVEKGLLNAVTRVAVDVYGSLSLTGKGHHTDIAIIMGLAGNQPDTVDIDAIPAFIRDVEARGRLLLANGQHEVDFPADDGMRFRSDNLPLHENGMTIHAWAGEKEIYCKTYYSIGGGFIVDEEHFGKENANELQVPYPFKSAQEMLAYCKETGLSLSGMVMQNELALHSKKEIEDYFANVWQTMRACIDRGMNTEGVLPGPLRVPRRASALRRLLVASDKLSSDPMNVVDWVNMFALAVNEENAAGGRVVTAPTNGACGIVPAVLAYYDHFIESVSPEIYIRYFMACGAIGALYKMNASISGAEVGCQGEVGVACSMAAAGLAELLGASPEQVCVAAEIGMEHNLGLTCDPVAGQVQVPCIERNAIASVKAINAARMAMRRTSEPRVSLDKVIETMYETGKDMNAKYRETSRGGLAIKVQCD

SEQ ID NO: 60090 - protein, 323 aa, Klebsiella pneumoniae
VTIAIVISTHGWAAEQLLKTAEMLLGEQENVGWIDFVPGENAETLIEKYNAQLAKLDTSKGVLFLVDTWGGSPFNAASRIVVDKEHYEVIAGVNIPMLVETFMARDDDPSFDELVALAVETGSEGVKALKAKPVEKAAPAPAPAAAPKAAAPAKPMGPDDYMVIGLARIDDRLIHGQVATRWTKETNVTRIIVVSDEVAADTVRKTLLTQVAPPGVTAHVVDVAKMIRVYNNPKYAGQRVMLLFTNPTDVERIVEGGVKITSVNIGGMAFRQGKTQVNNAISVDAKDIEAFKKLNARGIELEARKVSTDPKLKMMDLIAKVDK

SEQ ID NO: 60091 - protein, 286 aa, Klebsiella pneumoniae
MSEMVDMTKNTTEKKLTQSDIRGVSIRSNLFQGSWNFERMQALGFCFSMVPAIRRLYPENNDARKQAIKRHLEFFNTHPYVAAPVLGVTLAMEEQRANGAEIDDGAINGIKVGLMGPLAGVGDPIFWGTVRPVFAALGAGIAMSGSLLGPLLFFILFNAVRLLTRYYGVAYGYRKGVDIVKDMGGGFLQKLTEGASILGLFVMGALVNKWTHVNIPMVVSKITGSDGQVHVTTVQTILDQLMPGLVPLLLTFACMWLLRKKVNPLWIIVGFFVIGIAGYAVGLLGL

SEQ ID NO: 60092 - protein, 476 aa, Klebsiella pneumoniae
MEMTKVKLSALFIALIPLLGSPVIHAETTAAPVLENRAAQGDITTPGGARRLTGDQTEALRASLINKPAKNVILLIGDGMGDSEITAARNYAEGAGGFFKGIDALPLTGQYTHYSLDKKTGKPDYVTDSAASATAWTTGVKTYNGALGVDIHENAHQTILELAKAAGLATGNVSTAELQDATPAALVAHVTSRKCYGPTVTSEKCPSNALEKGGKGSITEQLLNARPDVTLGGGAKTFAETATAGEWQGKTLREQAQARGYQIVTDAASLAAATEASQDKPLLGLFADGNMPVRWEGPKASYHGNIDKPPVTCTPNPKRDASVPTLAQMTEKAIDLLSRNEKGFFLQVEGASIDKQDHAANPCGQIGETVDLDEAVQKALEFARKDGNTLVIVTADHAHASQIIPADSKAPGLTQALNTHDGAVMVMSYGNSEEESMEHTGTQLRIAAYGPHAANVVGLTDQTDLFTTMKAALSLK

SEQ ID NO: 60093 - protein, 63 aa, Klebsiella pneumoniae
MPNRPPYPREARVVAVEKGPQGQTVTWYQLRADYPEPDSLISEHPTEQEAVDAKRRYEDPDKS

SEQ ID NO: 60094 - protein, 250 aa, Klebsiella pneumoniae; identical to SEQ ID NO: 43408

SEQ ID NO: 60095 - protein, 431 aa, Klebsiella pneumoniae
MLERLSWKRLALELFLACIPALILGAFVGHLPWFLLAAVTGLLIWHFWNLMRLSWWLWVDRSMTPPPGRGSWEPLLYGLHQMQMRNKKRRRELGSLIKRFRSGAESLPDAVVLTTEEGAIFWCNGLAQQILNLRWPDDSGQNILNLLRYPEFANYLKQRDFSKPLNLVLNNARHLEIRVMPYSDKQWLMVARDVTQMHQLEGARRNFFANVSHELRTPLTVLQGYLEMMQEQVLEGATREKALHTMREQTQRMEGLVKQLLTLSRIEAAPALAMNDRIDVPMMLRVVEREAQTLSQEKQTLIFTVDEQLKVLGNEEQLRSAISNLVYNAVNHTPPGTEIRVSWQRTPQGALFSVEDNGPGIAPEHIPRLTERFYRVDKARSRQTGGSGLGLAIVKHAVNHHDSRLEIDSTVGKGTRFSFLLPERLIAKNDA

SEQ ID NO: 60096 - protein, 439 aa, Klebsiella pneumoniae
MTHQLKSRDIIALGFMTFALFVGAGNIIFPPMVGLQAGEHVWTAAIGFLITAVGLPVLTVVALAKVGGGVESLSTPIGKVAGILLAVVCYLAVGPLFATPRTATVSFEVGIAPLTGDGPLPLLIYSVIYFALVILVSLYPGKLLDTVGNFLAPLKIIALIVLAVAAIIWPAGPISDALEAYRTAPFSNGFVNGYLTMDTLGAMVFGIVIVNAARSRGVSEARLLTRYTVWAGLMAGVGLTLLYLALFRLGSDSATLVDQSANGAAILHAYVQHTFGGAGSFLLAALIFIACLVTAVGLTCACAEFFAQYLPFSYRTLVFVLGLFSMAVSNLGLSHLIQVSIPVLTAIYPPCIALVVLSFTRSWWHNSSRVIAPAMFISLMFGIIDGIKSSAFAAILPDWTARLPLAEQGLAWLMPTAVMTILAVIWDRAAGRQVTSSAH

SEQ ID NO: 60097 - protein, 457 aa, Klebsiella pneumoniae
MESSNKLKRGLSTRHIRFMALGSAIGTGLFYGSADAIKMAGPSVLLAYIIGGVAAYIIMRALGEMSVHNPAASSFSRYAQENLGGLAGYITGWTYCFEILIVAIADVTAFGIYMGVWFPTVPHWIWVLSVVLIICAVNLMSVKVFGELEFWFSFFKVATIIIMILAGFGIIIWGIGNGGQPTGIHNLWSNGGFFSNGWLGMVMSLQMVMFAYGGIEIIGITAGEAKDPEKSIPRAINSVPMRILVFYVGTLFVIMSIYPWNQVGTDGSPFVLTFQHLGITFAASILNFVVLTASLSAINSDVFGVGRMLHGMAEQGSAPKVFAKTSRRGIPWVTVMVMTIALLFAVYLNYIMPENVFLVIASLATFATVWVWIMILLSQIAFRRRLSPEEVKALKFKVPGGVVTTVIGLLFLAFIIALIGYHPDTRISLYVGMAWIALLLLGWVFKTRRERRLAQAQ

SEQ ID NO: 60098 - protein, 605 aa, Klebsiella pneumoniae
MLKAWHLPVAPFIKVQQDRLFITLWLSGESLPQRITLRAEEDNEELSLPMQRLRQAPQPGVVAWRGEISLASGQPRRRYSFKLLWADHQRWFTPQGFTRFPPARLEQFAIDLPDAGPQWVADQVFYQIFPDRFARSAARDADQDAVYYHHAAGREIVRKAWDDPLTGEAGGSTFYGGDLDGISEKLPYLKQLGVTALYLNPVFAAPSVHKYDTEDYRRVDPQFGGDAALLRLRHNTQRAGMRMILDGVFNHTGDSHPWFDRHQQGSGGAGHDPDSPWRDWFTFSEEGQAHNWLGYASLPKLDYRSTSLVNEIYAGEDSIVRHWLKAPWSMDGWRLDVVHMLGEGGGARNNLQHIAGITQAAKQAQPEAFVFGEHFGDARQWLQADAEDAAMNYRGFTFPIWGFLANTDISYDPQKIDAQTCMAWMDNYRAGLSHQQQLRMFNQLDSHDTARFKSLLGKDVARLPLAVVWLFSWPGVPCIYYGDEVGVDGNNDPFCRKPFPWDPALQDTQLLALYQRMAKLRKAHQALRYGGCQVIYAEDNVVVFVRVYKQQRVLVAINRGEACEVVIEDSPLLNVAGWTLQEGAGAFQDGVLTLPAISANVWSGR

SEQ ID NO: 60099 - protein, 469 aa, Klebsiella pneumoniae; identical to SEQ ID NO: 43395

SEQ ID NO: 60100 - protein, 354 aa, Klebsiella pneumoniae; identical to SEQ ID NO: 43402

SEQ ID NO: 60101 - protein, 300 aa, Klebsiella pneumoniae
MMTTAEGGLAYQRWLATINQVCGHFAARPLKESFHGEIDARYAGSLKVSTVTAAGVNLYRTRNEIKRDNDAWFYTVFQLAGEAIIEQDDRQVTLAAGDITLIDAARPCSIVWQQTSRQASLLLPRQRVAPTGDITTACRLDKSLPMVQLSQRLLLESMGGTTLSASESEAALEAIACLLRPVLHQRDPAPSRREKQFQKIIALIDASIQSEHLRPEWLASETGMSVRSLYRLFADQGLVVAQYIKNRRLDLCAQALQNVHDDEKLAGIGYRWGFSDHSHFSTAFKQRFGVTPGEYRKRCR

SEQ ID NO: 60102 - protein, 332 aa, Klebsiella pneumoniae
MKTRYLGKEKFQVSALGLGCMGMSFAYGGAETSQAINTIHAAMDMGVTFLDTAEVYGPFDNEVLVGKAIKGFRDKVQIATKFGFRILPTGQGLERMAGVDSRPAHIRESVEGSLKRLNVETIDLLYQHRVDPAVPVEEVVGTMADLVKEGKIRHIGLSEVSAQTLRRACKVHPIAAVQTEYSLWSREPEAGILHTCRELGVGFVPYSPLGRGFLTGTITDPGVLAADDFRRHLPRFQAETMRKNQLLLERLQQVATRYDATLAQIALAWVMSKGEDIVPIPGARKIAHLRDNAGAANITLAAEDILTIEHIFTADNITGLRYTQGDFDLIEK

SEQ ID NO: 60103 - protein, 419 aa, Klebsiella pneumoniae
MTEQITEIDTLVVGAGQAGVAMSEHLTRLDIPHLVLEKQGIAQAWRSGRWDSLVANGPAWHDRFPGMVFPDCPPDSFVGKEQVADYFAAYARSFNAPIRTGVEVYSAERLAGRPGFRIDTSQGVIEAQRIVAATGPFQRPVIPAIAPQSPAIQQLHSAHYFNPQQLPEGGVLVIGAGSSGVQIADELQRAGRAVWLSVGAHDRPPRRYRQRDFCWWLGVLGMWDAAANAPGKEHVTIAVSGARGGHTVDFRQLAHQGVTLVGQTRGFDGDKALFHPDLAENIRRGDASYLALLDAADAWVARNGMDLPEEPSAREFLPDPACVTDPLLSLNLAEAGIGTIIWATGYTTDYRWLKVNAFDDAQRPQHHRGVSTEPGVYFLGLPWLSRRGSTFIWGVWHDAKYIADQIAIQRQYQRYQPSC

SEQ ID NO: 60104 - protein, 304 aa, Klebsiella pneumoniae
MNRFTLKQLKYFVTVVETESIAEASRQLHIAQPSISIAIKNLESTFDQQLFIRHHAQGVSLTSSGRRIYDKAKELLRLSWEFEQNSRADKELVSGMISIGCFESVAPLYMPKLVAGFKKCYPEITLHLYDGEQHELMHGLHRGRFDLALVYDLELGHSINKERLNAPHKPYALLPAAHPLAQKAQVTLQELSREPMILLDAVPSKNYFISIFKEKGYHPEVAYSSPSIEMVRCMVGQGLGFSVLVTRPCCDMTYDGERVVQRDIADEMPASTLIMAHLANNEPTRPTQLFMDYCRSIELTPTHA

SEQ ID NO: 60105 - protein, 530 aa, Klebsiella pneumoniae
MTAKTAPKITLWEFFQQLGKTFMLPVALLSFCGIMLGIGSSLSSHDVLTLLPWLDMPLLQAIFIWMSKVGSFAFSFLPVMFCIAIPLGLARENKGVAAFAGFVGYAVMNLAVNFWLTAKGILPTTDAAILKANNIQNIIGIPSIDTGILGAVIAGIIVWLLHERFHNIRLPDALAFFGGTRFVPIVTTVVLGLVGLAIPLVWPVFAMGINALGKMINSAGDFGPMIFGTGERLLLPFGLHHILVALIRFTEAGGTLDVCGHSVSGALTIFQAQLSCPTTHGFAESATRFLSQGKMPAFLGGLPGAALAMYHCARPENRHKIKGLLISGVIACVVGGTTEPLEFLFLFVAPVLYVIHALLTGLGFTIMAVLGVTIGNTDGNIIDFVVFGILHGLATKWYLVPVVAAIWFAVYYAIFRFAITRFNLKTPGRDIDTAASVEKAVAGTIGKSGYNVPAILAALGGAENIVSLDNCITRLRLSVHDMSKVDAAALKAHRAIGVVQLNQHNLQVVIGPQVQSVKDEMATLMNTVQA

SEQ ID NO: 60106 - protein, 130 aa, Klebsiella pneumoniae
MELLVRLGHFFEQARSDADYATFANELRRHQVSYYIYFVSTGNMNFVMANDEVVSVKSARGLLRVRAEASHCLTRAAVIRHFARAINFEQYCRDLASAGVFKWIVDLEEETRHYWSKDNTLLYKECLMPP

SEQ ID NO: 60107 - protein, 317 aa, Klebsiella pneumoniae
MSKLDAFIQQAVTAMPISGTSLIASLYGDALLQRGGEVWLGSVAALLEGLGFGERFVRTALFRLNKEEWLDVVRIGRRSFYRLSDKGLRLTRRAEHKIYRASAPEWDGTWLLLLSEGLEKNVLADVKKQLLWQGFGALAPSLLASPSQKLADVQSLLHEVGVAENVIYFEAHSPLALSRAALRSRVEECWHLTEQNEMYEAFIALFRPLLPLLRDCDPSELTPDRCFQIQLLLIHFYRRVVLKDPLLPEELLPAHWAGQTARQLCINIYQRVSPGALAFVSEKGESSVGELPAPGPLYYQRFGGLRAHKEVACRYIR

SEQ ID NO: 60108 - protein, 332 aa, Klebsiella pneumoniae
MSKLGINGFGRIGRLVLRRLLEVDSSLEVVAINDLTSPKVLAYLLKHDSNYGPFPWSVDFTEDALIVNGKTITVYAEKEAQHIPWQAAGAEVIVECTGFYTSAEKSQAHLQAGARKVLISAPAGEMKTIVYNVNDDTLTPDDTIISVASCTTNCLAPMAKVLQDAFGITVGTMTTIHAYTGTQSLVDGPRGKDLRASRAAAENVIPHTTGAAKAIGLVIPALSGKLKGHAQRVPTKTGSVTELVSVLEKKVTADEVNQAMRQAAEGNESFGYTEEEIVSSDIIGSHFGSIYDATQLEIVEAGGVQLVKTVAWYDNEYGFVTQLIRVLEKFAR

SEQ ID NO: 60109 - protein, 438 aa, Klebsiella pneumoniae
MITTTKLDPIETASRDELQALQTQRLKWTLKHAYENVPMYRRKFDAAGVHPDDFRELNDLQKFPCTTKQDLRDNYPFDTFAVPMEQVVRIHASSGTTGKPTVVGYTQNDIDNWANIVARSLRAAGGSAKDKIHVAYGYGLFTGGLGAHYGAERLGATVIPMSGGQTEKQAQLIRDFQPDMIMVTPSYCLNLIEELERQMGGDARGCSLRVGVFGAEPWTLAMRAEIERRLGITALDIYGLSEVMGPGVAMECLETVDGPTIWEDHFFPEIVNPDDGTPLEDGEHGELLFTTLTKEALPVIRYRTRDLTRLLPGTARTMRRMDRISGRSDDMLIIRGVNVFPSQLEEEILKFEHLAPHYQLEVNRRGHLDSLAVRVELKESGLALSHEQRCQICHQLRHRIKSMVGISTDITIVNCGSIPRSEGKACRVFDLRKAVVSG

SEQ ID NO: 60110 - protein, 503 aa, Klebsiella pneumoniae
  MISC_FEATURE (30)..(30): X=any amino acid
ISVWPGAAMITAKGSARFWPNGHHSSAGNXMMTTSLATVAVIGSGTMGAGIAEVAAAAGHPVRIFDINPKAVDLAIEGIAGRLASRVARGKLASEQADALLARLHPAHDLAALADADLVIEAASERLEVKTALFTQLAEICAPSTLLTSNTSSISITAIAAGVKNPERVAGLHFFNPAPVMKLVEVVSGLATSTEVVEQLCQCVSGWGKQPVRCRSTPGFIVNRVARPFYAEAWRALEEQVAAPEVIDAALRDGGGFPMGALALTDLIGQDVNFAVTCSVFNAFWQDRRYLPSLLQQELALAGRLGKKSGHGVYRWPAETQPDAALPPVSIGAQSITAISDGVTELDDLLLLETEGETALALSVKHHRPVVVYDLCASETVVLAAAATNAPAATDKAVHYFQQQGKKVLRIADYPGLLVWRTVAMLINEALDAVQKGVASPHDIDTAMRLGVNYPHGPLAWGERLGWRRVLQLLENLQHHYGEERYRPSSLLRQKALMEKHHE

SEQ ID NO: 60111 - protein, 83 aa, Klebsiella pneumoniae
ITIKEAIPRGKVKKGDVLKAVVVRTKKGVRRPDGSVIRFDGNACVILNNNSEQPIGTRIFGPVTRELRTEKFMKIISLAPEVL

SEQ ID NO: 60112 - protein, 104 aa, Klebsiella pneumoniae [sequence omitted]

SEQ ID NO: 60113 - protein, 194 aa, Klebsiella pneumoniae
MKIKTRFAPSPTGYLHVGGARTALYSWLFARNHGGEFVLRIEDTDLERSTPEAIEAIMDGMNWLNLQWDEGPYFQTKRFDRYNNVIDEMLEAGTAYKCYCSKERLEALREEQMAKGEKPRYDGRCRHSHEHHADDEPCVVRFANPQEGSVIFDDQIRGPIEFSNQELDDLIIRRTDGSPTYNFCVVVDDWDMGI

SEQ ID NO: 60114 - protein, 186 aa, Klebsiella pneumoniae
LIGRNGAGKSTSLGLVAGVIKPTKGTVTTEGRVASMLELGGGFHPELTGRENIYLNATLLGLRRKEVQQRMERIIEFSELGEFIDEPIRVYSSGMLAKLGFSVISQVEPDILIMDEVLAVGDIAFQAKCIQTIRDFKKRGVTILFVSHNMSDVEKICDRVIWIENHRLREVGSADRIIELYKQAMA

SEQ ID NO: 60115 - protein, 292 aa, Klebsiella pneumoniae
MEKKRATTIGFAAIILWSTMVGLIRGVSEGLGAVGGAAMIYSLSGLLLIFTVGFPNLRQIPRRYLLAGSVLFVSYEICLALSLGYAASRQQAIEVGMVNYLWPSLTILFAILFNGQKSSWLVIPGLILALLGVGWVLGGEHGLQPDEIISNVISSPLSYLLAFVGAFIWAAYCTVTAKYARGKNAITLFVLLTALTLWLKFLASDQPPMLFSWPVVIKLMTVSVALGLAYAAWNVGILHGNVSLLAAASYFTPVLSSALAAILLSATLSWSFWQGAGMVCLGSLLCWYATRR

SEQ ID NO: 60116 - protein, 725 aa, Klebsiella pneumoniae
MSTSNDPSNNASAGKCPFHAETPKQSAGSGTANRDWWPNQLRVDLLNQHSNRSNPLGENFNYREEFKKLDYSALKADLRALLTDSQEWWPADWGSYIGLFIRMAWHGAGTYRTVDGRGGAGRGQQRFAPLNSWPDNVSLDKARRLLWPVKQKYGQKISWADLYMLAGNVALENAGFRTFGFGAGREDVWEPDLDVDWGDEKEWLAHRHPESLAKQAIGATEMGLIYVNPEGPNASGEPLSAAAAIRATFGNMAMDDEEIVALIAGGHTLGKTHGAAETSHVGAEPEAAPLEAQGLGWHSSYGSGAGADAITSGLEVVWTQTPTQWSNYFFENLFKYEWVQTRSPAGAIQFEAKDAPEIIPDPFNPEKKRKPTMLVTDLTLRFDPEFEKISRRFLNDPQAFNEAFARAWFKLTHRDMGPKSRYLGPEVPKEDLIWQDPLPAATHQPSAEDIASLKSAIAGAGLSVSELVSVAWASASTFRGGDKRGGANGARLALAPQKDWPVNAIASRVLPTLQAIQRASGKASLADIIVLAGVVGVEQAAAAAGVSVNVPFTPGRVDALPEQTDVESFDLLQPLADGFRNYRRIEGGVSTETLLIDKAQQLTLTAPEMTVLVGGLRVLGANYDGSKHGVFTDRVGVLSNDFFVNLLDMATVWKAADDNAELFTGSDRKTGEAKYSATRVDLVFGSNSVLRALAEVYACADGQQKLVHDFVAAWTKVMNLDRFDL

SEQ ID NO: 60117 - protein, 143 aa, Klebsiella pneumoniae
MAIHKKGLAHWEGDLKHGKGTVSTESGALSQQPYGFNTRFEGVKGTNPEELIGAAHAACFSMALSLMLSEEGYTATSIDTTAVVTLNKTDGGFAITDIALQSQIVLPDVSPAAFDEIIQKAKAGCPVSQVLKANITLDYQLNP

SEQ ID NO: 60118 - protein, 1246 aa, Klebsiella pneumoniae
MSKLLDRFRYFKQKGETFANGHGQVYNNNRDWEDSYRQRWQFDKIVRSTHGVNCTGSCSWKIYVKNGLVTWETQQTDYPRTRPDLPNHEPRGCPRGASYSWYLYSANRLKYPLARKRLIELWREALAKHPDPVLAWDSIMQDPAKTRSYKAARGKGGFVRSSWKELNQLIAAANVWTIKHYGPDRVAGFSPIPAMSMVSYAAGTRYLSLIGGTCLSFYDWYCDLPPASPMTWGEQTDVPESADWYNSSYIIAWGSNVPQTRTPDAHFFTEVRYKGTKTIAITPDYSEVAKLCDQWLAPKQGTDSALAMAMGHVILKAFHLDNPSDYFLNYCRTYTDMPMLVILEPRDDGSYTPGRMLRASDLLDGLGESNNPEWKTVAYNSDGELVAPNGSIGFRWGEKGKWNLEQRADGKDVELKLSLLDIRDSVVSVGFPYFGGNENPHFRSVSQSPVTLHPLPAKQLTLASGESGLVVSVYDLILANYGLDRGLDDVNAAKDFAEVKAYTPAWAEQITGVPRQHIEQIAREFADTAHKTHGRSMIILGAGVNHWYHMDMNYRGMINLLVFCGCVGQSGGGWSHYVGQEKLRPQTGWLPLAFALDWSRPPRQMNSTSYFYNHASQWRYEKLTAQELLSPLADASKFSGSLIDFNVRAERMGWLPSAPQLNVNPLTIKQQAEAAGLSPAEFTVQSLKSGDIRFAAEQPDSGKNHPRNLFIWRSNLLGSSGKGHEYMLKYLLGTDSGIQGDELGASDEVKPEEVEWQTAAIEGKLDLLVTLDFRMSSTCLFSDIVLPTATWYEKDDMNTSDMHPFIHPLSAAVDPAWEAKSDWEIYKDIAKSFSQVCVGHLGKETDVVLVPLQHDSPGELSQPFEVLDWRKGECDLIPGKTAPSIALVERDYPATWDRFTSLGPLLDKLGNGGKGIAWNTQSEVDFLGKLNYVKPDGPAKGRPRIDSAIDASEVILSLAPETNGQVAVKAWQALGEFTGRDHTHLALNKEDEKIRFRDIQAQPRKIISSPTWSGLESEHVSYNAGYTNVHELIPWRTLSGRQQLYQDHPWMRAFGESLVAYRPPIDTRSVSQMKAVPPNGFPEKALNFLTPHQKWGIHSTYSENLLMLTLSRGGPIVWLSETDAKELGIEDNDWIEAFNANGALTARAVVSQRVPPGMTMMYHAQERIMNIPGSEVTGRRGGIHNSVTRVCPKPTHMIGGYAQLAYGFNYYGTVGSNRDEFIMIRKMKNIAWLDDEGRDQVQEAKK

SEQ ID NO: 60119 - protein, 514 aa, Klebsiella pneumoniae
MKIRSQVGMVLNLDKCIGCHTCSVTCKNVWSSREGMEYAWFNNVETKPGIGYPKNWEDQDQWQGGWIRGISGKLTPRLGNRVSVLSKIFANPVLPAIDDYYEPFTYDYQHLHNAPEGKYLPTARPRSLISGERMDKISWGPNWEELLGGEFEKRARDRNFEAMQKEMYGQFENTFMMYLPRLCEHCLNPSCVATCPSGAIYKREEDGIVLIDQDKCRGWRMCISGCPYKKIYFNWKSGKSEKCIFCYPRIESGQPTVCSETCVGRIRYLGVLLYDADRIEEAASTEHETDLYERQCEVFLNPNDPAVIEEALKQGIPHNVIEAAQKSPVYKLAMDWKLALPLHPEYRTLPMVWYVPPLSPIQSVADAGGLPSNGNILPAVESLRIPVQYLANLLSAGDTGPVLRALKRMMAMRHYKRSQTVEGVTDTRAIEEVGLSVEQVEEMYRYLAIANYEDRFVIPTSHRELAEDAFPERNGCGFTFGDGCHGSDTKFNLFNSRRIDAIDVSGVRKHGEGE

SEQ ID NO: 60120 - protein, 226 aa, Klebsiella pneumoniae
MIQYLNLFFYDIYPYLCGTVFLVGSWLRYDYGQYTWRASSSQMLDKRGMVLWSNLFHIGILGIFFGHLFGMLTPHWVYSWFLPMSQKQLMAMILGGICGVLTLVGGIGLLMRRLTNPRIRATSTTADILILCILLIQCALGLTTIPFSAQHPDGSEMLKLVDWAQAVVTFHGGASAHLDGVAWIYRVHLVLGMTIFLIFPFTRLVHVWSAPVEYFTRRYQVVRSRR

SEQ ID NO: 60121 - protein, 306 aa, Klebsiella pneumoniae
MTMQDEKPPMKKLPTSMLPEETAPRPEFPEQEQTPPGLDAEMEPSPDHGETSYTGSGRLAGKKALITGGDSGIGRAVAIAFAREGADVAINYLPEEQKDADEVIALIKAEGRTAVALPGDIRSESFCQSLVADAVEQLGGLSILVNNAGRQQYCETLEELTTEDFDATFKTNVYAPFWITRAALPHLQAGSAIINTTSVQAYKPSPILLDYAQTKACLAIFTKSLAKQVAKRGIRVNAVAPGPYWTVLQSSGGQPDEKVKQFGKDTPMGRPGQPVEIAPLYVTLASDACSYTSGQVWCSDGGDGVV

SEQ ID NO: 60122 - protein, 336 aa, Klebsiella pneumoniae
MKAAVVTHDHQVNVTEKTLRPLEYGEALLKMECCGVCHTDLHVKNGDFGDKTGVILGHEGIGVVQKVGPGVTSLKPGDRASVAWFFEGCGHCDYCNSGNETLCRSVKNAGYTVDGGMAEECIVTANYAVKVPDGLDSAAASSITCAGVTTYKAVKVSHIKPGQWIAIYGLGGLGNLALQYAKNVFNAKVIAIDVNDGQLELAASMGADLTINSRNEDAAKVIQEKTGGAHAAVVTAVAKAAFNSAVDAVRAGGRVVAVGLPPEAMSLDIPRLVLDGIEVVGSLVGTRQDLVEAFQFAAEGKVVPKVTLRPLEDINAIFKEMEQGQIRGRMVIDLRS

SEQ ID NO: 60123 - protein, 575 aa, Klebsiella pneumoniae
MKVCGVTHVRVYYFPVLVIPSFYPNFSGFSMTTNYIFVTGGVVSSLGKGIGAASLAAILEARGLNVTIMKLDPYINVDPGTMSPIQHGEVFVTEDGAETDLDLGHYERFIRTKMTRRNNFTTGRIYSDVLRKERRGDYLGATVQVIPHITNAIKERVLAGGEGHDVVLVEIGGTVGDIESLPFLEAIRQMAVEIGREHTLFMHLTLVPYMAAAGEVKTKPTQHSVKELLSIGIQPDILICRSDRAVPANERAKIALFCNVPEKAVISLKDVDSIYKIPGLLKSQGLDDYICKRFSLTCPEANLAEWEQVIYEEANPAGEVTIGMVGKYIELPDAYKSVIEALKHGGLKNRVTVNIKLIDSQDVETRGVEILKDLDAILIPGGFGYRGVEGKIATARYARENNIPYLGICLGMQVALIEFARNVAGMENANSTEFVPDCKYPVVALITEWRDEDGNVEVRSEKSDLGGTMRLGAQQCQLSDDSLVRQLYGEPTITERHRHRYEVNNMLLKPIEAAGLRVAGRSGDDQLVEIIEVPNHPWFVACQFHPEFTSTPRDGHPLFAGFVKAASEYQKRQAK

SEQ ID NO: 60124 - protein, 432 aa, Klebsiella pneumoniae
MSKIVKVIGREIIDSRGNPTVEAEVHLEGGFVGMAAAPSGASTGSREALELRDGDKSRFLGKGVTKAVAAVNGPIAQAILGKDAKDQAGIDKIMIDLDGTENKSNFGANAILAVSLANAKAAAASKGLPLYAHIAELNGTPGKYSMPVPMMNIINGGEHADNNVDIQEFMIQPVGAPTLKEAVRMGSEVFHHLAKVLKSKGMNTAVGDEGGYAPNLGSNAEALAVIAEAVKAAGYELGKDITLAMDCAASEFYKDGKYVLAGEGNKAFTSEEFTHFLEELTKQYPIVSIEDGLDESDWEGFAYQTKVLGDKIQLVGDDLFVTNTKILKEGIEKGIANSILIKFNQIGSLTETLAAIKMAKDAGYTAVISHRSGETEDATIADLAVGTAAGQIKTGSMSRSDRVAKYNQLIRIEEALGEQAPFNGRKEIKGQA

SEQ ID NO: 60125 - protein, 257 aa, Klebsiella pneumoniae
MAETFDPHCVWFVGAGPGDRELITLKGYRLLQQAQVVIYAGSLINTELLAYCPPQAECHDSAALHLEQILDLMEAGVKAGKTVVRLQTGDVSLYGSVREQGEELTRRGIRWQVVPGVSAFLGAAAELGVEYTVPEVSQSLIITRLEGRTPVPAREQLEAFASHQTSMAIYLSVQRIHRVAERLVEGGYPATTPVAVIYKATWPESQTVRGTLADIGDKVRDAGIRKTALILVGPFLGDEYHYSKLYAADFSHEYRKA

SEQ ID NO: 60126 - protein, 961 aa, Klebsiella pneumoniae
MPRSLWFKVFVVLAALWAPFSQADTGWQPIQETIRKSEKDTRQYQAIRLDNDMVVLLVSDPQAVKSLSALVVPVGSLQDPADHQGLAHFLEHMTLMGSQKYPQPDSLAEFLKLHGGSHNASTAPYRTAFYLEVENDALDGAVDRLADAIAAPLLDKKYADRERNAVNAELTMARTRDGMRMAQVSAETINPAHPAAHFSGGNLETLSDKPGSPVLDALHTFRDSWYSANLMKAVIYSNKPLPALARMAADTFGRVPNRQISRPEITVPVVTDAQKGIIIHYVPAMPRKVLRVEFRIDNNSDRFRSKTDELVTYLIGNRSPGTLSDWLQKQGLAEGIRADSDPVVNGNSGVLAISATLTDKGLAHRDEVTAAIFSYLDLLRTQGIDKRYFDELAHVLALDFRYPSINRDMDYVEWLADTMIRVPVEHALDVVNIADQYDPQAIKDRLAMMTPQNARIWYISPQEPHNKTAYFVDAPYQVDKISEQTFADWQHKSQAIQLQLPALNPYIPDDFTLIKSDKAWPHPQLILDEPTLRVVYAPSQYFASEPKADISLVLRNPQAMDSARRQVMFALNDYIAGIALDQLSNQAAVGGISFSTGANNGLMVNANGYTQHLPALFSDLLQGYFSYTPTEEQLEQAKSWYAQMMDSAEKGKAYDQAIMPIQMVSQVPYFQREVRRALLPSITLKEVLDYRANLKTRGRPELMVIGNMTADAATTLARQIQQQLGADGNEWCRNKDVVVNRQQLAIFNKAGNSTDSALAAVFAPPNVDEFSSTAASTLLGQIIQPWFYNQLRTEEQLGYAVFAFPMNVGRQWGMGFLLQSSDKQPAFLWQRFQAFFPTAEAKLRAMKPEEFAQLQQAVISQMLQAPQTLGDEASKLSKDFDRGNMRFDSRDKVVAQIKLLTPQKLADFFHQTVVDPQGMTILSQISGSQNGKADYAQPKGGKVWENVSALQQSLPLMRENE

SEQ ID NO: 60127 - protein, 264 aa, Klebsiella pneumoniae
MKQYLDLMQKVLTEGTPKNDRTGTGTISIFGHQMRFNLQEGFPLVTTKRCHLRSIIHELLWFLQGDTNIAYLHENNVTIWDEWADENGDLGPVYGKQWRSWPAPDGRHIDQISTVMNQLKNDPDSRRIIVSAWNVGELDKMALAPCHAFFQFYVADGKLSCQLYQRSCDVFLGLPFNIASYALLVHMVAQQCDLQVGDFVWTGGDTHLYSNHLEQTNLQLSREPRPLPKLVIKRKPASIFDYRFEDFEIEGYDPHPGIKAPVAI

SEQ ID NO: 60128 - protein, 1178 aa, Klebsiella pneumoniae
MTDTAESLDPLRLPLIGERLIEASAGTGKTFTIAALYLRLLLGLGGEAAYPRAISVEELLVVTFTEAATEELRGRIRSNIHELRIACLRGESDNPLYSALLAEIADKDDAAKTLLLAERQMDEAAVFTIHGFCQRMLSLNAFESGMLFEQQLIEDESRLRYQACADFWRRHCYPLTRDIAAVIHDVWKGPRDLLKSLDRWLQGEAPQLKSPPAPNETLAERHQQIIARIDSLKQQWREQVGEIEGVLDNSGLDRRKFNRGNQGKWMEKVNAWAQEETLSYQLPDALEKFAQSFLLERTKAGGEPPVHPLFSAVESLLASSLTLTDLVLARAMVEIRDAVAREKRRRGELGFDDMLSRLDEALRGDSGETLASAIRQRFPVAMIDEFQDTDPQQYRIFRRIWRRQPETALLLIGDPKQAIYAFRGADIFTYMKARGDVAAHYTLDTNWRSSPGMVGSVNRLFSLSDNPFMFHEIPFLPVKAAAKNKGLRFTVDAADVPAMNVWLMPGDTVGSGDYQTFMAQLCATQIRDWLSAGQQGRALLWRGETSRPVQASDITVLVRNRLEAAQVREALQTLGIPSVYLSNRDSVFETLEAQELLWLLQAVLAPERENTLRSALATSMFGLTALDIENLNQDEQAWDALVEEFSEYRQIWRQRGVMPMLRALMTARHIAENLLATRGGERRLTDILHISELLQEAASQLESEHALVRWLAQHIAEPDSNAASQQMRLESDKHLVQIVTIHKSKGLEYPLVWLPFIARFRKQDQAFYHDRETFAAVLDLGQDEASLELAEAERLAEDLRLLYVALTRAVWHCSLGVAPLSSRKSGNSDFHLSALGRLLQAGEAMDAAGLAARLADFCHGDIALQIPGELDLTPWQAPAATIPRLSARELQRRIADDWRVTSYSGLQQHGFSGGQDLLPRLDVDAAGVGEVVEEPQLTPHQFPRGAAPGTFLHSLFEELDFTQPVPEGWMAEKLQLSGFDAQWAPVLTDWLGGVLKTRLPGPDIALNQLAARDKQVEMAFYLPIAQLLTAERLDALIRQYDPLSADTPPLDFRQVRGMLKGFIDLVFRHEGRYYLLDYKSNWLGEDREAYTRPAMEQAMRAHRYDLQYQLYSLALHRYLRHRLADYDYDRHFGGVIYLFLRGMDGQEGGQGIFTTRPVRPLIDGLDQLFAGETQEEAS

SEQ ID NO: 60129 - protein, 183 aa, Klebsiella pneumoniae
MQSFFAYLAGKAIFRRRARANRRGILDAMNREHGYTLMETLVTLTLMMILSVGGLYGWQRWQQQQRLWQTAVQVRDFLLFLRDDANAYNRDRVLRVGQDEVGWCLSADGEGPDCASGTSFTLRPRWPGITLAGVTPGLGFYGLRSTAWAGNLRLQSAAGSWSIVISHWGRIRLCRSDSAGGCQ

SEQ ID NO: 60130 - protein, 614 aa, Klebsiella pneumoniae
MTFEQLLLAAVEQRLLRPLDVQFALMVAQNDPPAVKLAAALLSRDAGEGHVCLPLSRLSGDEALSGKAGEIRDRLLAEAGAPEDWPGLLLASSAVSCGDAPAPMILCGDRLYLNRMWRNELTVARFFNEANRVLEMDEARLASTLNALFPATGETDWQKVAAAVALTRRISVISGGPGTGKTTTVAKLLAALIQIEDSPRCRIRLAAPTGKAAARLTESLGAALRKLPLTDAQKALIPTEASTLHRLLGAQPGSQRMRYHAGNPMHLDVLVVDEASMIDLPMMSRLIDALPAHGRVIFLGDRDQLASVEAGAVLGDICAWASSGYTAARAQELTRLTGSPVPAGEGAIAGALRDSLCLLQKSYRFGSHSGIGSLARAVNAGARAEVKATLRQPFDDIALHPLSTTEEYEAMLGAAQQGYERYLQLRRERAEPQAMLAAFSEFQLLCALREGPYGVSGVNERLEQRLNRQRAIALPRHSRWYDGRPIMISRNDSALGLFNGDIGIALERNGELRVWFLMPDGAIKSVQPSRLPEHDTAWAMTVHKSQGSEFEHAALILPARSVPLVTRELVYTAITRAKRRLSLYADEQVLSQAIVTRTERRSGLAEIFAGRETP

SEQ ID NO: 60131 - protein, 417 aa, Klebsiella pneumoniae
MSGNNSGLSRRRLLQGAGAMWLMSVSPVGLAAAARVVAVRVWPASTYTRVTVESNHVLKYRQFALSNPERVVVDLEGVNLNSVLKGMGGQIRDDDPFIKSARVGQFDPQTVRMVFELKQNVKPQLFALAPVAGFKERLVMDLYPANATDVQDPLLALLEDYNKGDLERQVPPAQSGPQPGKAGRDRPIVIMLDPGHGGEDSGAVGKYRTREKDVVLQIARRLRALIDKEGNMKAYMTRNEDVFIPLKVRVAKAQKQRADLFVSIHADAFTSRQPSGSSVFALSTKGATSTAAKYLAQTQNASDLIGGVSKSGDRYVDHTMFDMVQSLTIADSLKFGKAVLEKMGNINNLHKNRVEQAGFAVLKAPDIPSILVETAFISNVEEERKLKTAKFQQEVAESILAGIKAYFADGATLARRG

SEQ ID NO: 60132 - protein, 225 aa, Klebsiella pneumoniae
MTGFDRLSYQSRWLQVAPERKFLLWLLLMALAFTLPAWGQALTLALTAALTCWLLRVSFWRWCRWMALPFGFLLVGVLTILFSVSRDPQMLLASFRLGAFSIGISAPGLAVAGETFWRSLAAMAATLWLVLNLPFPQLIILLKRGRVPRLLTEQILLTWRFIFILLDEAMAIHRAQTLRFGYGSVPQGYRSLAMLVGLLFTRVLLRYQQMSTALDIKLYQGDFHL

SEQ ID NO: 60133 - protein, 507 aa, Klebsiella pneumoniae
MTLAVMLQGTASDVGKSVLVAGLCRIFHQDGLRTAPFKSQNMALNSGITPDGKEMGRAQIFQAEAAGIAPDVRMNPILLKPTSDRQAQVVLMGQVATSMDAVSYHQYKPRLREQILAVYQSLAGEYEALVLEGAGSPAEINLRDRDIVNMGMAEMAQCPVILVADIDRGGVFAAIYGTLALLQPQERARVKGVIINKFRGDVALLRSGIEQIEALTGVPVLGVMPWLDVDLEDEDGVALQAGKYHRTDRSDIDIAVVHLPHIANFTDFNALAAQPDVRVRYVRDPQALADADLVILPGSKNTLGDLCWLRESGMAHAVEQARQRKVPLLGICGGYQMLGETIIDEVESGLGTQPGLGVLKTVTHFAQHKTTTQVQATLGSALPDWLADAAGLRVSGYEIHMGETRREAGCPPLLQLHKAGQAVDDGAISDDGLAFGTYLHGLFDSDAFTRALLNGLRQRKGLAPLDSALEYARYKTRQFDRLAEAMREHIAIDKIYAIMRQHQEPLC

SEQ ID NO: 60134 - protein, 745 aa, Klebsiella pneumoniae
MVAVRSAHLNKAGEFDPKKWIASLGISSQQSCERLAETWDYCREKTQGHPQADLLLWRGVEMVEILSTLSMDIDTLRAALLFPLADGEVVSEEVMQESVGKSVVTLIHGVRDMAAIRQLKATHTDSVSSEQVDNIRRMLLAMVDDFRCVVIKLAERIAHLREVKDAPEDERVLAAKECTNIYAPLANRLGIGQLKWELEDYCFRYLHPAEYKRIAKLLHERRIDREHYIEEFVGHLRSEMKAEGVKAEVYGRPKHIYSIWRKMQKKHLAFDELFDVRAVRIVAERLQDCYAALGIVHTHYRHLPDEFDDYVANPKPNGYQSIHTVVLGPSGKTVEIQIRTRQMHEDAELGVAAHWKYKEGAGAGTSGGRGYEDRIAWLRKLIAWQEEMADSGEMLDEVRSQVFDDRVYVFTPKGDVVDLPAGSTPLDFAYHIHSDVGHRCIGAKIGGRIVPFTYQLQMGDQIEIITQKQPNPSRDWLNPNLGYVTTSRGRSKIHAWFRKQDRDKNILAGRQILDDELEHLGISLKDAEKHLLPRYNFNELDELLAAIGGGDIRLNQMVNFLQAQFNKPSAAEQDAAALKQLQQKTYTPQNRTKDNGRVVVEGVGNLMHHIARCCQPIPGDEIVGFITQGRGISVHRADCDQLAELQSHAPERIVDAVWGESYSAGYSLVVRVEANDRSGLLRDITTILANEKVNVLGVASRSDTRQQLATIDMTIEIYNLQVLGRVLGKLNQVPDVIDARRLHGG

SEQ ID NO: 60135 - protein, 263 aa, Klebsiella pneumoniae
MTQIDRLLGIMRRLRDPENGCPWDKEQTFATIAPYTLEETYEVLDAIQREDFDDLRGELGDLLFQVVFYAQMAQEEGRFNFDDICAAISDKLERRHPHIFGEASAGNSTEVLARWEQIKSRQRAEKAQHSALDDIPHSLPALMRAHKIQRRCSAVGFDWTSLGPVLDKVHEEIDEVMHEAQQAVVDEAKLEEEVGDLLFATVNLSRHLGVKPEVALQKANLKFERRFREVERIVAARGLEMTGVDLDTMEEVWQEVKRQETDL

SEQ ID NO: 60136 - protein, 76 aa, Klebsiella pneumoniae
MKMTKAAAIISACMLTLGLSACSSNYVMHTNDGRTIVTDGKPQTDNDTGMISYKDAWGNKQQINRSDVKQLGELDE

SEQ ID NO: 60137 - protein, 2872 aa, Klebsiella pneumoniae
  MISC_FEATURE (587)..(587): X=any amino acid
  MISC_FEATURE (1024)..(1024): X=any amino acid
  MISC_FEATURE (1038)..(1038): X=any amino acid
  MISC_FEATURE (1058)..(1058): X=any amino acid
  MISC_FEATURE (1068)..(1068): X=any amino acid
  MISC_FEATURE (2833)..(2833): X=any amino acid
  MISC_FEATURE (2868)..(2868): X=any amino acid
AVGRPAPGASTAALQDVRSTLSNALTAEAQARSTLAAQMRGSYDGNDLEKVTSGLLYQEKTARVTAISAEVKARESLQTQFNDNKAAVSGELSSLTTEQSAQASRIGGLETSLGKKADAAALTSLTQKVEQQGATLTSQGAALTSLTNRVGQTETGLAGTNEALSGLQSVVTQQGDRITSQGQSITKLTSDLGTTNAALAKKAEAAAVTALTQQVEQNGRDIRSNTDSITSLSNQLVNGQPNRWSRRIYPVQLANAGTVPSFSDVRAVAPTVVDEVADAAKLDFTSAGSYLIALYSCQVKVAADTTITLAPGARVFDDTGAIFVNGVQVAWGNASWNTVSFELKVGWNTVEFLVNQWTGQAYINLGLKLSDKVAEMYSGLGVSALANAAGVLSSNVSQIGNEVVSNSQSITQLRNALTQTDANVASKADQTAMNSLTGRVEKTESGLTAANANITSLKSAVRAGNASGGDLIPNPTFDPAYDQMGFSVVSTTAEEVPPGCPYGYAARIASRDHHPNFAAFPATLNDVIEISALVACGAGTANFNLYVGTAVRPDTSTGAPLMAGGGKSPSATWQRTTGASRSRRRWXTGVISARSCRSRRTARMAPYGSLRTGICENVTAAQKVQDTADATAAAVDSLTTTVTQQGNLLTSTGNRTTQLENGLATTNAAVAKKADATAVQDLTNTVTQLGNDLTAANSAITKLTGNLANTDKALAQKADATALATLDTKVTQQGKTLESQSNSLTNLSNSLSQVAADIDASGQIPGNLVVNPSFERGLDGYTGRSTATSVVEVSAPHSGTRALKVDPGSVSPGQYIPFVQGRTYEIGVWVKEPGATTDNGAGNNSCGSVTLPASRSLSVRTTAARWGQTGPWFSGRWKATETASLPVTLSNYLISGSRYFDDFYVTDVTDRVDIDATAGAVTGLTSRVSTAEGAITSQSQQLTNLQNSLNTTNSNVSKKADATALTSVDNRVTEAEGKLTTQSQQLTNLANVLTATRNAGDNLSRTLIFYRAALPGIFSIQPVXPLAISGTGKRGSGXTGRLTPVRGSSPTTTSRCRXMASASTAWWXRPKGVSGAMSLLIRRQNKIGQTDSTYEDKTVTLTTDWQTITWETGLTAAGADGQNFKLYSHPTNGEIWLDSVRVFDITDETNIKATSDAVSSLTGTVTNQGNTLTSQGQSITALNNALEGVKGDVAKKADASAVSSLTNRVTQTEKDIRSQADSLTSLNTSLKQQATRGANVLPDGSFESYAVGDVLSNARAVITSEAAHSGTKSLRVTRSTEYNPNATDNNDTHIFSGMQVRDNAVYYVEAWVKLPAGSTADPTVYMVLGFSFQDSANGWSWPGLNVKVSELSVDNWTKVSGYLTNNRTALKQAMVRISIPNTPKVRLGDAFLIDDLIITDVTDAKAALDAADANAQALSSLSASVTQNGKNITSQGSAITKLQSDVTQLGKDISGKANASALTNLTTRVTATEGGLKSQGDSLTSLQNSLNTTNSNVAKKADATALQSLQNTVEQHGRDLTTQSSALTNLENNFSSLAVGGTNLIRNADTLEGWSSRHATETYLDDRVAYTRLAKGASGYTQLDEQTLDVTGRTEFVFSFYAKGAYDGQEMASYFYNPSNTTTTETSQGVKGGAGDGKAVTKLTTAWARYWVKWVIPATSGTKRLIAARLESATSADKEVWLCRPQLETGTVMTDWSPSPDDAASGITANTSAINSLTSRVTNAEGQLTAQSQSITNLQNSLNTTNNNVAQKASAQSVSDLTSRVTSAEGKITSQGQAITKLQGDLSSTTDKVNTKADQTALNALTGRVEKTEAGLTAANSNIVSLTAAVNAGNAAGDDYIPNPSFDPAYDRMGYDVVETTADGVPADCPFRYAVRLAGRDHVPKINNIAVTPGDVFEMSALVACGTGSADFNFYIGRATTATGGIGAKASGGNTRTTSAWKRATWRFTVPSDTSLLRPFLQVNQSSPFGTVWYAADWHMRNVTAANSAQKTADVTAKAVDSLTTTVSQQGDTLSSIGTRTTSLENSLRSTNDTVSKKADTTAVTQLQGTVTQQGNDIAAANSALTKLSSDLATTNANVNKKADASAMNTLQNQVTEQGKTLSAQGDSLTQLSNSLSQTAADIDASGKIPDNLIVNGSFERGAAGFTGWSSTATVADLQVPHSGNKALKMSAGQSNLVGQEISITQGRTYRMGVWAKQDSGTTIKDAGNTKFRVADSTGLLVGSNYGPFSSGWQLVTFDWKATKTTTASFQLTTFLSAGAMYFDDFHVLDVTDEKDIAANAGAISQMNTRVTAAEGAITTQAQQLTKLSGDLAVTNAAVSQKAEQSAVTGLTTRMTSAEGKLDSQSQQLTSLQNSLTTMNTELGKKADTSAVSSLTGRVSQVENTITSQSQSITSLTSTINTIRTQGANPWVDGTFESYSDGQVLGGNGTAVVVASRKFTGGKSLKLRRDENNSGNSDKQLGTWQSVREDAKFRFEFWAMMPADQAPSSGWTTLVGIQSQNAAGQNAWQAAVTVSEASLGARDKWVKFTGIASNNGAGRTRAVVWISTRGATGNGTPGYSLYIDDLVITDVTDAKAAQDASDATASAVSGLTARVTDAEGKITAQAQQQTALATKVDNANSRVDNMAKTLSDSQSTQASLNTSLQSQIDAQAAANIKNQTTLDNTIKSVASITSTQQTHATALEALATQQTTLTSSVGDLSASVQNTAKTVADVNGTVSSLWSMKVETVNGKNVGAGITLGSNGQTSDMILYADRFSLFNRNNATAVPVMIAEGNELYIDTARIKNSSLTSTKSRTVPSRTRRSATRSARITLLTGRKAGVSPRMALRSSITXSFVAGSKRIAACSVALSRRMRSSVTLRWQKVTTAXPSAA

SEQ ID NO: 60138 - protein, 529 aa, Klebsiella pneumoniae
MTHPLLAIDNLSIAFRQQGETQTVVHNLSLEVAVGETLALVGESGSGKSISALSVLRLLPTPPASYPSGDIRFHGQSLLHADEATLRGVRGNRIAMIFQEPMVSLNPLHTLEKQLYEVLSLHRGMRKQAARGEILDCLERVGIRQAPRRLADYPHQLSGGERQRVMIAMALLTRPELLIADEPTTALDVSVQAQILQLLRELKQELNMGLLFITHNLSIVRQLADRVAVMQNGRCVEHNDCRALFSAPAHPYTQRLLDSEPDGEPVPLAADAPVLLQADDLKVAFPVRKGILRRVVDHHRVVNSLSFQLRAGETLGLVGESGSGKSTTGLALLRLIPSGGKITFAGQPIQGRNRRQLLPLRRQMQVVFQDPNSSLNPRLTAQQIIEEGLRVHQPTLTAAEREQAVILAMQEVGLDPASRQRYPAAFSGGQRQRIAIARALIVKPQLIVLDEPTSSLDKTVQAQILNLLKALQRKHQLAYIFISHDLGVVRALCHQVMVLRQGEVVEQGECKSVFSAPRHEYTRQLLALS

SEQ ID NO: 60139 - protein, 601 aa, Klebsiella pneumoniae
MYARLFLILLALFSLDAKAQTIQESVAFAIIGEPKYAAGFSHFEYVNPRAPKGGTLTLAAIGTFDNFNRYALRGNPAVRTEALYDTLFTTSDDEPGSYYPLIAERARYAEDYSWMEIALNPRARFHDGTPITARDVAFTFNKFMTEGVPQFRLFYKGTTVKAIAPLTVRIDLGQPGKENMLSLLSLPVMPEAFWRQHKLSDPLSKPPLASGPYRISAWRMGQYITYSRVADYWAADLPVNRGRWNFDTLRYDYYLDDNVAFEAFKAGAVDRREETVAKNWATRYVGRNFSRGYIIKDEHTNTSAQDTQWLAFNIQRPIFADRRVRQAITLAFDFEWMNKALFYSAYQRANSYFQNTEYAARSLPDAAELALLTPMKNELPSELFSQVYQPPVSRGDGFDRANLLKADGLLNAAGWTVKNQRRVNAATGKPLRFELLLPAGGNDRWVLPFQHNLQRLGIVMDIRQVDNSQYSNRRRSRDYDMMPSLWRAMPWPGTDLQISWASDYIHSSYNAPGVQSPVVDKLIAQILQWQGNKQKLIPLGRALDRVLTWNNYMLPMWYMAQDRTAWWNKFSFPATRPIYSSGLDTWWYDVNKAATLPADRR

SEQ ID NO: 60140 - protein, 588 aa, Klebsiella pneumoniae
MTVAITDVVLRDAHQSLFATRLRLDDMLPVAAQLDDVGYHSLECWGGATFDACIRFLGEDPWVRLRELKKAMPKTPLQMLLRGQNLLGYRHYADDVVERFVERAVKNGMDVFRVFDAMNDPRNMQAALQAVRRHGAHAQGTLSYTTSPAHTLQTWLDLTEQLLETGVDSVAIKDMSGILTPHAAFELVSEIKKRYDVTLHLHCHATTGMAEMALLKAIEAGVDGVDTAISSMSATYGHPATEALVATLAGTPYDTGLDIHRLESIAAYFREVRKKYHAFEGQLKGTDSRILVAQVPGGMLTNLEGQLKQQSAAHRLDEVLAEIPRVREDLGFIPLVTPTSQIVGTQAVLNVLGGERYKTIAKETAGILKGEYGRTPAPVNAALQARVLDGADPVTCRPADLLKPELAALEADVRRQAQEKGITLAENAIDDVLTVALFPQPGLKFLENRHNPAAFEPVPQAEAAQPVAKAEKPAASGVYTVEVEGKAFVVKVSDGGDVSQLTAAAPASAPAAAAPAGAGTPVTAPLAGTIWKVLASEGQTVAAGEVLLILEAMKMETEIRAAQAGTVRGIAVKAGDAVAVGDTLMTLA

SEQ ID NO: 60141 - protein, 353 aa, Klebsiella pneumoniae
MMLELDFTQTLGSHCLQIRETLPASGITAVFGVSGAGKTSLINAISGLTRPQAGRIVLNGRVLNDTAQRICLAPEQRRIGYVFQDARLFPHYKVRGNLQYGMAKSMVSQFDKLVDLLGIAPLLDRLPGRLSGGEKQRVAIGRALLTAPELLLLDEPLASLDIPRKRELLPYLQRLAQEIHIPMLYVSHSLDEIQHLADRVLVLEAGKVKAFGPLEEVWSSSVMHPWLPAEQQSTILSATVAAQHPQYAMTALALGDQLLWVNRLERPAGDTARIRIQASDVSLTLAQPSGTSIRNILRAEVAQCLEVNGQIEVQLRVSDRLLWARISPWARDDLAIAPGQQVFAQIKSVSIAA

SEQ ID NO: 60142 - protein, 257 aa, Klebsiella pneumoniae
MAGSWLRGVVGVSLTLCVAGQALAAEGKVTVFAAASLTNAMQDIAQAYKKEKNVEVVSSFASSSTLARQIEAGAPADLFISADQKWMDYAADKKAIDPATRATLLGNSLVVVAPKASAQGAITIDEKTDWTSLLKGGRLAVGDPQHVPAGIYAKEALQKLGAWETLSPKLAPAEDVRGALALVERNEAPLGIVYGSDAVASKGVKVVGTFPEASHQKVEYPLAIVDGHRNAAVSAFYDYLKGPEASAIFKRYGFTTR

SEQ ID NO: 60143 - protein, 91 aa, Klebsiella pneumoniae
MASISISCPSCSATEGVVRNGKSTAGHQRYLCSHCRKTWQLQFTYTASQPGTHQKIIDMAMNGVGCRATARIMGVGLNTILRHLKNSDRSR

SEQ ID NO: 60144 - protein, 828 aa, Klebsiella pneumoniae
MDTSSIITGTTLNRYQLDIPSCTASLDVEEFSGAEKLSELYYYTITFTSAEKNIDAAQLLSKPAMLTMGGGALQQLADCKRVHGVVTAFRRISSSEDQSKYQITLEPFLSLLDKQFRSHRFFVNKSVPEVVEQVLQEHHLHDWEYEFNLKQHYPRREQINQYQESDLAFIQRLLAEVGIFYFFTLQEEAQSEVVHFADAQRALMFDKTLPVNSPSGMSDSGTESIWGLSITHNVVEANVTTRDYNPRDAQSVLQSATADMTRGNGEGITYGEVYHYKLRHRERGDKIDPQTETANFYARLDHERFLAHQTLITAISTAAWLAPAQVLTVTDSLPSTLPAPVQDPLLITGTGFTASRREALRVSLLAVPYSETLCWRPPLLPRPKVTGTMTARVTSAKANDIYAWQDASGLYRVKFDPDRDEKGQGQESMPVRLAKPYGGDVYGFHFPLIQGTEVAIAFHEGDPDRPYIAHALHDSRHVDPVTEKNSTRNVIRTPANNKLRMEDKRGEEHIKLSTEYGGKTQLNLGHNVNAQRELRGEGAELRTDKWVSIRGGAGVFISADKQPSAGDRMLAMEEAIAQLENALGIAKSLASAAESAQALPSDTGNQQTLNDALKELAQPGIVLNAPQGVSISSPQAVRLSSGSACVGIVSQQNTDISALKRFTVAAGEAVSLLARKAGMKLFAAKGKIEIQAQDDALEATAKKDITVTSVEGRVEITAAEELVVNCAGAYIRLSGGNIELGCPGNILLKSANVQKMGKADFRVPPLELPEGFEERFTVKDQKTGDIVPFARYRITTEKGQVFEGRADADGKTASVYTALPESIKIELL

SEQ ID NO: 60145 - protein, 365 aa, Klebsiella pneumoniae
  MISC_FEATURE (363)..(363): X=any amino acid
FRGRMYYLNGLDNSLILVSTLPLKDLSSSFKESTISSVVESRRAEMLLQANTLDERETFSPLRHLAWQNAHYFTLRTTFNQPGHLATVVAFDLPINDLIPPGMTIDSFRIEPDPSQNLATTPDKESADHIGITFNGMQIDIATDISTTGMQLLWTVPMSTMLLESMQNILLPLLLNIGLLALALFGFTTFRHYKGRSHSSGAGLPSAANSELRLLRAINEEIVSLLPLGLLVHDQEANRTVISNPIADHLLPHLNLQNITNMADQHQGVIQATVNNEQYEIRQYRSQVAPRTQILIIRDQDREVLVNKKLKQAQRLYEKNQQGRAAFMQHIGSALKQPALTLAAEAAALSSTENRTLGPACRXAG

SEQ ID NO: 60146 - protein, 597 aa, Klebsiella pneumoniae
MFKFKASYVALAAVLTSSVVYADPTSYTHSSGATVIDIEKPNAAGVSHNLYRDFNVGANGTILNNSGDDVSHSTFGNIARNNNLTAGSASVILNEVTSKNASSLKGFIEVNGQKADVVIANPNGITCSGCSFVNTNKAILTTGKVNMTDDGAIGSYTVTGGTLTIGENGMNAANGYAVLLADAIKINGKVQANNALVSAGNFTMDNSSGSVTSAGKKATLIQMTVNPQYSIDVSSLGGIEANSISMVGNNIGFGVRNKGSIISNGTLMLTSNGNLLNKGSITGKGLLSQVSTVTGITNDGSIAGAYYLMLSSGDYIVNTGSLSGGQLIATANGNITNGDSGTMTGTSGLSLTSGGKIRNEEKASLLSNNQIAATAIGDFLNEGKISAKHTSLTFVGDSFKNTGNINSTGQTTIQSLTQDGSANTGEIYNLGNITGENINLQTNGTLAQSSSGRIEATNAITAHSYWLNQNGYMNAADITTDHGVVNNYGNITAKNISITTYSDITNEGQISSTGDLTLNTKNKGAIYNYSTLSAGGNMTLTATKVVNGGKSCGILGLAKCGVGTLTADKLVLNSSQKYVSDMGGKQYFKSTEVNTVK

SEQ ID NO: 60147 - protein, 425 aa, Klebsiella pneumoniae
MKPMQIAMALLSAVMFFILAGVFMGVQLELNGTKLVVDTAADIRWQWIFIGTAVVFFFQLLRPLFQKAVKNVSGPKFIMPAIDGSTVKQKLFLIALLVIAVAWPFMVSRGTVDIATLTMIYIILGLGLNVVVGLSGLLVLGYGGFYAIGAYTFCAAEPLLRSRLLDLSPAGRPGLRGGRFLLGFPVLRLRGDYLAIVTLGFGEIVRILLLNNTEITGGPNGISQIPKPTFFGLEFSRSAREGGWDTFSNFFGVKYDPSDRVIFLYLVALLLVVLSLFVINRLLRMPLGRAWEALREDEIACRSLGLSPTRIKLTAFTISAAFAGFAGTLFAARQGFVSPESFTFAESAFVLAIVVLGGMGSQFAVILAAILLVVSRELMRDFNEYSMLMLGGLMVLMMIWRPQGLLPMTRVQLKLKNGQAKGEQA

SEQ ID NO: 60148 - protein, 460 aa, Klebsiella pneumoniae
MEKKLGLSALTALVLSSMLGAGVFSLPQNMAAVASPSALLIGWAITGVGILFLAFAMLLLTRIRPDLDGGIFTYAREGFGELIGFCSAWGYWLCAVIANVSYLVIVFSALSFFTDTPELRLFGDGNTWQSIVGASVLLWVVHFLVLRGVQTAAGINLVATLAKLLPLGAFVALAALAFQLDTFRLDFSGLALGVPVWEQVKNTMLITLWVFIGVEGAVVVSARARHKRDVGRATLLAVLSALAVYLLVTLLSLGVVPRSELAEMRNPSMAGLMVRLMGSWGEIVIAAGLIVSVCGAYLSWTIMAAEVPFLAATHKAFPRLFARQNSNNAPSASLWLTNISVQVSLVLIWLTGSDYGTLLTIASEMILVPYLLVGAFLLKIATRPLHKAVAIGACIYGIWLLYASGPVHLLLSVVLYAPGLLVFLYARRTHQHDRSLKRREVALIGLLLVAAVPATWMLVG

SEQ ID NO: 60149 - protein, 303 aa, Klebsiella pneumoniae
MQKFDTRTFQGLILTLQDYWARQGCTIVQPLDMEVGAGTSHPMTCLRALGPEPMATAYVQPSRRPTDGRYGENPNRLQHYYQFQVVIKPSPDNIQELYLGSLKELGMDPTIHDIRFVEDNWENPTLGAWGLGWEVWLNGMEVTQFTYFQQVGGLECKPVTGEITYGLERLAMYIQGVDSVYDLVWSDGPLGKTTYGDVFHQNEVEQSTYNFEYADVDFLFTCFEQYEKEAQQLLALETPLPLPAYERILKAAHSFNLLDARKAISVTERQRYILRIRTLTKAVAEAYYASREALGFPMCNKNK

SEQ ID NO: 60150 - protein, 46 aa, Klebsiella pneumoniae
MLVLDGRLRQALARHQRALKYSRFQPGNKGGKQVARFPERKSKEVA

SEQ ID NO: 60151 - protein, 128 aa, Klebsiella pneumoniae
MAYSEKVIDHYENPRNVGSFDNSDENVGSGMVGAPACGDVMKLQIKVNNEGIIEDARFKTYGCGSAIASSSLVTEWVKGKSLDEAQAIKNTDIADELELPPVKIHCSILAEDAIKAAIADYKSKREAK

SEQ ID NO: 60152 - protein, 615 aa, Klebsiella pneumoniae
MRRILTTLMILLAVIVAGLTSLVLLVNPNDFRAYMVHEVAERSGYQLDLDGPLRWHVWPQLSILSGRMTLTARGAEEPVIRADNMRLDVALLPLLSHQLQVKQVMLKGAVIQLTPKTEAVRDSSAPVVPHDNTLPLAPEDRGWSYDVRQLQVADSVLFFQHENGEQVTVRDIRLQMEQDENHRATVDFSGRVNRDQRDLALNFSATVQGGDYPHSLKADFTQLSWQLRGAELPPDGINGQGSLQASWQEDDKTLRFDNLNLMANRSTVTGSGSVVLGDRPDWSLDLHATTLDLDSLLAQRSPATDSSASQQGQSQTRPLRPVIADSDEREDYQSLRGFNGRMALSADQLQWRGLNFTQVQSEISNQQGLLTVSKMQGNLDGGQLSLPGTLDARGDTPLATFQPALQNVEIGSLIKAFNYSLNLTGKLSLSGEFSGTRIDADDFRRHWQGQAQLQMADTRTEGLNFQQLVQQAVERSTNVRAQENYDNATRLDSVSSRLTLDNGLVTLNRLQGQSDVMAMTGEGQLDLQKENCDMRFNVRVLGGWKGEGKLIDRLKQTAIPLRIYGEWQSLSYSLQVDQILRKQLQDEAKQRLNDWVERNKGSKDGNDAKKLLDKL

SEQ ID NO: 60153 - protein, 457 aa, Klebsiella pneumoniae
MALWGGRFTQAADQRFKQFNDSLRFDYRLAEQDIVGSVAWSKALVTVGVLRCREQQQLEEALNVLQEEVRANPQQILASDAEDIHSWVEGKLIDKVGQLGKKLHTGRSRNDQVATDLKLWCKDTVVELLSANRQLQSALVETAQQNQDAVMPGYTHLQRAQPVTFAHWCLAYVEMLARDESRLQDALKRLDVSPLGCGALAGTAYEIDREQLAGWLGFASATRNSLDSVSDRDHVLELLSDAAIGMVHLSRFAEDLIFFNSGEANFVELSDRVTSGSSLMPQKKNPDALELIRGKCGRVQGALTGMMMTLKGLPLAYNKDMQEDKEGLFDALDTWLDCLHMAALVLDGIQVKRPRCAEAAQQGYANATELADYLVAKGVPFREAHHIVGEAVVEAIAQGKPLEALTLADLQKFSPVIADDVYPILSLQSCLEKRAAKGGVSPQQVAQAINEAKARLS

SEQ ID NO: 60154 - protein, 245 aa, Klebsiella pneumoniae
MLFIFRVIFVVIYCIVVCVLGCLYCLFSPRNPKHVATFGHLFGRLSPVFGLKVELRKPADAESYGNAIYIANHQNNYDMVTASNIVQAPTVTVGKKSLLWIPFFGQLYWLTGNLLIDRNNRTKAHGTIAEVVNAFKKRKISFWMFPEGTRSRGRGLLPFKTGAFHAAIAAGVPIIPVCVSNTSNKIKLNRWNNGLVIVEMLPPVDTTQFGKDNVRALATHCRELMAAKIADLDNEVAEREAAGKQ

SEQ ID NO: 60155 - protein, 352 aa, Klebsiella pneumoniae
AFYKNVDIFNLWLRNEHTLTLQRGTILMNALTAVKPTPAPVAQQYPGFSFTPSAQSPRLLELTFSTETTTQFLQQVAQWPVQALEYKSFLRFQVGKILDDLCGNQLQPLLIKTLLDRAEGALLINGEGIDHVSQAEEMVKLATAVAHLIGRSNFDAMSGQYYARFVVKNVDNSDSYLRQPHRVMELHNDGTYVEEQTDYVLMMKIDEQNMQGGNSLLLHLDDWEHLDEFFRDPLARRPMRWAAPPSKNVSKDVFHPVFDVDSLGRPVMRYIDQFVQPKDFEEGTWLSRLSDALETSKNILSIPVPVGKFLLINNLFWLHGRDRFTPHPDLRRELMRQRGYFAYSTNHYQTHQ

SEQ ID NO: 60156 - protein, 239 aa, Klebsiella pneumoniae
MLRVLIIDDEPLARENLRILLETQRDIEIVGECGNAVEAIGAVHKLRPDVLFLDIQMPRISGLEMVGMLDPEHRPYIVFLTAFDEYAVKAFEEHAFDYLLKPIEAARLEKTLARLRQERNLQDVSLLDDAQQTLKYIPCTGHSRIWLLQMEDVAFVSSRMSGIYVTDREGKEGFTELTLRTLESRTPLLRCHRQYLVNMAHLKEIRLEENGQAELLMRAGQTVPVSRRYLKSLKEAIGL

SEQ ID NO: 60157 - protein, 206 aa, Klebsiella pneumoniae
MTIEWWFAYLLTSIILSLSPGSGAINTMTTSINHGYRGAAASIAGLQTGLVIHIVLVGVGLGTLFSRSVLAFEVLKWAGAAYLIWLGIQQWRAAGAIDLNTLAKAQTRGKLFQRAVFVNLTNPKSIVFLAALFPQFILPHQPQVMQYLVLGVTTIVVDIIVMIGYATLAQRISAWIKGPKQMKALNKVFGSLFMLVGALLASARHA

SEQ ID NO: 60158 - protein, 494 aa, Klebsiella pneumoniae
MSRQWMTLMAILLVYIPVAIDATVLHVAAPTLSVALGSSGNELLWIIDIYSLVMAGMVLPMGALGDKIGFKRLLLLGSAIFGIASLCAALSPTAMTLIASRALLAVGAAMIVPATLAGIRSTFAEASQRNMALGLWAAVGSGGAAFGPLVGGILLEHFYWGSVFLINVPIVLVVIAINAKVVPRQPARREQPLNLLQALVLIAAILMLVFSAKSALKGQLALWLTALVALGGAAMLTWFIRKQLSAARPMVDMRLFTHRIILSGVMMAMTALITLVGFELLMAQELQFVHQKTPFEAGIFMLPVMVASGFSGPIAGLLVSRLGLREVATGGMLLSAFSFLGLALTDFSTQQWLAWGLMTLLGFSVACALLASSSAIMAAAPKEKAAAAGAIETMAYELGAGLGIALFGLILTRSYSASIALPSGLSGAMAQQAASSIGEAVSLSQALPAGVAQALMAAAKTAFIQAHSLVLATAGVLLLLLAAGIWRSLATVAK

SEQ ID NO: 60159 - protein, 480 aa, Klebsiella pneumoniae
MSKNYAALAQQIVAAIGGVDNVAAVTHCMTRLRFVVKDDEQVDSSTLKGLAGVLGVVRSDNQCQVIIGNTVSQAYREVVNLLPGDLRPAEPQGKAPLTLKRIGAGILDALIGTMSPLIPAIIGGSMVKLLAMILEMSGALPKGSPTLTLLALIGDGAFFFLPLMVAASAAVKFKTNMSLAIAIAGVLVHPGFIELMAKAAQGEHVEFAFIPVTAVKYTYTVIPALVMTWCLSYIERWVDRITPAVTKNFLKPMLIVLIAAPLAILLIGPLGIWIGSAISALVYTIHSYLGWLSVAIMGGLWPLLVMTGMHRVFTPTIIQTIAETGKEGMVMPSEIGANLSLGGSSLAVAWKTKNPELRQTALAAAASAILAGISEPALYGVAVRLKRPLIASLISGFICGAVAGIAGLASHSMAAPGLFTSVQFFDPANPMTIVWVFGVMALSVVLSFALTLILGFEDIPVEQAAADARARQARAQASHA

SEQ ID NO: 60160 - protein, 59 aa, Klebsiella pneumoniae
MLILTRRVGETLMIGDEVTVTVLGVKGNQVRIGVNAPKEVSVHREEIYQRIQAEKSQQS

SEQ ID NO: 60161 - protein, 1045 aa, Klebsiella pneumoniae
MKILSLRLKNLNSLKGEWKIDFTAEPFASNGLFAITGATGAGKTTLLDAICLALYHETPRLNKVSQSQNDLMTRDTAECLAEVEFEVKGIAYRAFWSQNRARNQPDGNLQAPRVELARCADGKILADKVSDKLEQTATLTGLDYGRFTRSMLLSQGQFAAFLNAKPSDRAELLEELTGTEIYGQISAMVYEQHKAARHALEKFEAQAAGIVLLTEAQQQALQESLQVLTDEEKALLAQQQSQQQQLQWLTRRDELAQQQQQAATRQQQARQALADAAPALAKLELAQPAAQLRPLWERQQEQTAGLAQTRQRISEVNARLLASTALRARIRQGALRAQQQRQAELADLAQWLAAHERFRLWGQEIAGWRAQFSQLTRDKQQLTAQSTRLAALRQKLATLPASPLTLSADDVAAAIEQQTQSRPLRQRLISLHEQHQLLRKRLRQNADSVQQAQAEQVKLNATLTLRREQYKDKNQHYLDLKALCQREETIKDLESYRDRLEAGKPCPLCGACEHPAIEQYASLTLTDNQRRRDALEKEVAALKEEGLLILGQVKALTQQLQRDTEAAGRLAEEEQALTKAWQETCASLHITRDIAQEINDWMQEQERYEQQLYQLSQRLMLQSQLNDQQALERQAEQQLAATRQGLESALQALALSLPAEGTEAAWLHARESEFAQWQAQQTQHDAIQQQIAALRPLLETLPTSDETEVEAESAIPDNWREIHEECLSLHSQLVAQQQQETQEKARLDQSQAQFTSALAASRFSDREAFLAALLDDETAQRLTQLKQTLEQQLQQAAALCEQATRQHEALLALRPQGVDADVPTLQTQLHALAQRLRDNTTRQGEIRQQLRQDAESRQQQQALGQQIAEAAQLADDWGYLNSLIGSSTGDRFRKFAQGLTLDNLVWLANQQLNRLHGRYLLQRKASEALELEVVDTWQADAVRDTRTLSGGESFLVSLALALALSDLVSHKTRIDSLFLDEGFGTLDSETLDTALDALDALNASGKIIGVISHVEAMKDRIPVQIKVKKINGLGYSRLDKAFAVE

SEQ ID NO: 60162 - protein, 392 aa, Klebsiella pneumoniae
MQLRKLLLPGLLSVTLLSGCSLFNSEEDVVKMSPLPTVENQFTPSTSWSTSVGDGIGEFYSNLHPAFADGVVYAADRKGTVKALNADDGKEVWSVNLAEKDGWFSRTPALLSGGVTVSGGHVYIGSEKAQLYALNTSDGSVAWQTRVAGEALSRPVVSDGMVLVHTSNGQLQALNETDGAVKWTVNLDMPALSLRGESAPATAYGAAIVGGDNGRVSAVLMQQGQMIWQQRISTATGPTEIDRLNDVDTTPIIVNGVVYALAYNGNLTALDLRSGQIMWKRELGSVNDFIVDGNRIYLVDQNDRLLALTTDGGVTLWTQSDLLHRLLTAPVLYNGNLVVGDSEGYMHWVNPEDGHFVAQQKVDSSGFLTDPVVADGRLLIQAKDGTLYAITR

SEQ ID NO: 60163 - protein, 361 aa, Klebsiella pneumoniae
MLANHLRTLLQPNEAVYHLAGHDLVFRLNSEGHQARIHLIDRSLRQFRFHWDGVPLQPRIGMSYCSVRSPVKHLYLLLGELNTIADMSLASGHPENLQRRGAGHVQQDLKDKVVMMNRILKALEHDHFVLMAQPIQGIRGDRYHEVLVRMEGESGELTGPNEFLPVAHEFGLSTRVDQWVIEHTLAFMDANRRALPGLRLAINLSPVSLSRSQFPQEVEALLQAYNIEPWQIIFELTENYALSNPELVCQTLEHLRALGCRVAIDDFGTGYASYARLKTMNVDILKIDGSFIRNLLASSLDYQVVDSICRLARMKNMQVVAEYVESPEIRQAVITLGIDYMQGYDIGVPVPLTQLAEEMTG

SEQ ID NO: 60164 - protein, 85 aa, Klebsiella pneumoniae
MRFFRFSFSFIFSIIDFIRFCYQDNAMSDVNAHLLAQRIDTVLDILVAGDYHSAIHNLEILKAELLALAADDAEQQNQPKAPWEI

SEQ ID NO: 60165 - protein, 394 aa, Klebsiella pneumoniae
MIISAASDYRAAAQRILPPFLFHYIDGGAYAEHTLRRNVEDLSDVALRQRILRNMSDLSLETTLFNEKLAMPTALAPVGLCGMYARRGEVQAAGAADDKGIPFTLSTVSVCPIEEVAPTIKRPMWFQLYVLRDRGFMRNALERAKAAGCSTLVFTVDMPTPGARYRDAHSGMSGPNAALRRYWQAVTHPQWAWDVGLNGRPHDLGNISAYLGKPTGLEDYIGWLANNFDPSISWKDLEWIRDFWDGPMVIKGILDPEDARDAVRFGADGIVVSNHGGRQLDGVLSSARALPAIADAVKGDITILADSGIRNGLDVVRMIALGADSVLLGRAYLYALATHGKQGVANLLNLIEKEMKVAMTLTGAKSIREISRDSLVQNAEALQTFDALKQNNAA

SEQ ID NO: 60166 - protein, 513 aa, Klebsiella pneumoniae
MSAALLLTLPFWACAKDVTIIYTNDLHAHVEPYKVPWIADGKRDIGGWANITTMVKQEKAKNNATWFFDAGDYFTGPYISSLTKGKAIIDIMNTMSYDAVTIGNHEFDHGWDNTLLQLSQATFPIVQGNIFYQNSDKSFWDKPYTIIEKDGVKIGVIGLHGVFAFNDTVSAATRVGIEARDEVKWLQHYIDELNGKVDLTVALIHEGVPARQSSQGGTDVRRALDKDIQTAGQVKGLDVLITGHAHVGTPEPIKVGNTLILSTDSGGIDVGKLVLDYQEKPHQFTVKHFELKTLYADEWKPDPQTKQVIDGWNKQLDQLVQQVITQSPVELTRAYGISSPLGNLAADALLLAAGRSTQMALTNSGGIRNEIPAGAVSMGAVISTFPFPNELVTMDLTGKQLRSLMEHGAGLSNGVLQVSRGLEMKYDSSKPVGQRVVLFRLNGKPIDDTTVYHIATNSFLADGGDGFVAFTEGQARNTSGGYYVSNAVVDYFKAGQKITDEQLNGQRVVDVKK

SEQ ID NO: 60167 - protein, 290 aa, Klebsiella pneumoniae
  MISC_FEATURE (27)..(27): X=any amino acid
QKDRDIFVHKRESLGAKVFVQSANGTXETQMSQIENMINRGVDVLVIIPYNGQVLSNVIKEAKQEGINVLAYDRMINNADIDFYISFDNEKVGEMQAQSLVDKVPQGNYFLMGGSPVDNNAKLFRAGQMKVLKPYVDDGKIKIVGDQWVDGWLPENALKIMENALTANNNKIDAVVASNDATAGGAIQALTAQGLAGKVAISGQDADLAGVKRIISGTQTMTVYKPITTLATNAAEIAVELGNDKQPKADTTLNNGLKDVPSRLLTPIEVNKENIDATVIKDGFHKKSEL

SEQ ID NO: 60168 - protein, 282 aa, Klebsiella pneumoniae
  MISC_FEATURE (274)..(274): X=any amino acid
VRRLPGILLLTVATLIVIVALLVSGLRLVLPQLDAWRPQLLEKISTLTGTPVDASQITASWQTFGPTLDARDIHVGLKDGGTMAVKRVTLALDVWQSLLHMRWQFRDLTFWQLQVHTNTPIQTNDGGESLKTDRISDLFLRQFDHFTLRDSHLSFLTLSGQRAELAVPQLTWLNGRNRHRAEGQLSLSSLTGQHGVMQVRMDLRDEDGLLNKGRVWLQADDIDVKPWLGRWMQDNIALKSARFSLEGWMTIEKGDVASGDVWLKKGGAQLAGRXRSPSFVGG

SEQ ID NO: 60169 - protein, 382 aa, Klebsiella pneumoniae
MKALHFGAGNIGRGFIGKLLADAGIELTFADVNQTVLDALNARHSYQVHVVGENEQVDTVSGVNAVSSIGDEVVDLIAEVDLVTTAVGPVVLERIAPAIAKGLAQRKAQGTERPLNIIACENMVRGTTQLKGHVFNALAEEDKAWVEAHIGFVDSAVDRIVPPSASATHDPLEVTVETFSEWIVDKTQFKGALPTIPGMELTDNLMAFVERKLFTLNTGHAITAYLGKLAGHQTIRDAILDKKIRAVVQGAMEESGAVLIKRYAFDPQKHAAYIQKILGRFENPYLKDDVERVGRQPLRKLSAGDRLIKPLLGTLEYGLPHRNLVKGIAAAMHFRSEDDPQAQELAALIADKGPQAALAQISGLDAASDVVAEAVNDYNAEK

SEQ ID NO: 60170 - protein, 263 aa, Klebsiella pneumoniae
MKPTTIALLQKCKQEKKRFATITAYDHSFAKLFADEGINVLLVGDSLGMTVQGHDSTLPVTVEDIAYHTRAVRRGAPNSLLLADLPFMAYATPEQTFANAAIVMRAGANMVKLEGGAWLADTVRMLAERAVPVCGHLGLTPQSVNVFGGYKVQGRGDAAQTLFEDALALEAAGAQLLVLECVPVELAKRITDALTIPVIGIGAGNVTDGQILVMHDAFGITGGHIPKFAKNFLAEAGDIRAAVRQYIAEVESGVYPGEEHSFH

SEQ ID NO: 60171 - protein, 373 aa, Klebsiella pneumoniae
MHNQAPIQRRKSKRIYVGNVPIGDGAPIAVQSMTNTRTTDVAATVNQIKALERVGADIVRVSVPTMDAAEAFKLIKQQVNVPLVADIHFDYRIALKVAEYGVDCLRINPGNIGNEERIRMVVDCARDKNIPIRIGVNAGSLEKDLQEKYGEPTPQALLESAMRHVDHLDRLNFDQFKVSVKASDVFLAVESYRLLAKQIDQPLHLGITEAGGARSGAVKSAIGLGLLLSEGIGDTLRVSLAADPVEEIKVGFDILKSLRIRSRGINFIACPTCSRQEFDVIGTVNALEQRLEDIITPMDVSIIGCVVNGPGEALVSTLGVTGGNKKSGLYEDGVRKDRLDNNDMIDQLEARIRAKASMLDEARRIDVQQVEAK

SEQ ID NO: 60172 - protein, 506 aa, Klebsiella pneumoniae
MRYAHPGQPGAVVSFKSAYGNFIDGRFVEPLSGEFFMNTSPVDGSNIAQFPRSDARDIDFALDAAHRAAPAWGKTSVQQRSRLLLQVADRIEQHLEYLAVAESWDNGKPIRETLNADLPLAVDHFRYFAGCLRAQEGSTAEIDETTVAYHFHEPLGVVGQIIPWNFPLLMAAWKLAPALAAGNCVVLKPAEQTPLSITLLLELIGDLFPAGVLNVVQGFGKEAGEALATSKRIAKLAFTGSTPVGRHILACAAENIIPCTVELGGKSPNIYFADVMDGEEEFIEKAVEGLVLGFFNQGEVCTCPSRALIHESIYEPFMARVMEKVAQIRRGDPLDTDTMIGAQASRQQFDKILSYIQIAREEGGQILTGGERAAIAPALDNGFYIQPTLIKGRNDMRSFQEEIFGPVIGVTTFKDEAEALAIANETQFGLGAGVWTRDTNLAYRMGRGIKAGRVWTNCYHVYPAHAAFGGYKQSGVGRETHKMALDAYQQTKNLLVSYGTAPLGLF

SEQ ID NO: 60173 - protein, 350 aa, Klebsiella pneumoniae
MTDITQLLGKDAESLLQHRCITIPSDQLYLPGADYVDRVMVDNNRPPAVLRNMQTLYNTGRLGGTGYLSILPVDQGVEHSAGASFAANPLYFDPKNIVELAIEAGCNCVASTYGVLASVSRRYAHRIPFLVKLNHNETLSYPTEYDQTLYASVEQAFNMGAVAVGATIYFGSEQSRRQIEEISAAFERAHELGLVTVLWAYLRNSAFKKDGVDYHVSADLTGQANHLAATIGADIVKQKMAENNGGYKAVNFGYTDDRVYSKLTSDNPIDLVRYQLANCYMGRAGLINSGGAAGGETDLADAVRTAVINKRAGGMGLILGRKAFKKSMADGVKLINAVQDVYLDGKVTIA

SEQ ID NO: 60174 - protein, 417 aa, Klebsiella pneumoniae
MLKREMNMADYDAELWQAMEQEKVRQEEHIELIASENYTSPRVMHRQGSQLTNKYAEGYPGKRYYGGCEYVDVVEQLAIDRAKELFGADYANVQPHSGSQANFAVYTAAAQPGDTVLGMNLAQGGHLTHGSPVNFSGKLYNIIPYGIDESGKIDYDDMAKQAQEHKPKMIIGGFSAYSGIVDWAKMREIADSIGAYLFVDMAHVAGLIAAGVYPNPVPHAHVVTTTTHKTLAGPRGGLILAKGGSEELYKKLNSAVFPSAQGGPLMHVIAAKAVALKEAMEPEFKVYQQQVAKNAKAMVEVFLNRGYKVVSGGTENHLFLLDLVDKNLTGKEADAALGRANITVNKNSVPNDPKSPFVTSGIRIGSPAVTRRGFKEAEVKELAGWMCDVLDNINDDAVIERVKGKVLDICARFPVYA

SEQ ID NO: 60175 - protein, 710 aa, Klebsiella pneumoniae
MLIPTGTSVGLTSVSLGVIRAMERKGVRLSVFKPIAQPRSGGDAPDQTTTIVRASSSTTTAAEPLKMSHVESLLSSNQKDVLMEEIIANYHANTQDAEVVLVEGLVPTRKHQFAQALNFEIAKTLNAEIVFVMSQGTDTPEQLNERIELTRNSFGGAKNTSITGVIVNKLNAPVDDQGRTRPDLSEIFDDSSKAKIVKIDPAQLQKGSTLPVLGAVPWSFDLIATRAIDMAHHLNATIINEGDINTRRVKSVTFCARSIPHMLEHFRPGSLLVTSADRPDVLVAACLAAMNGVEIGAILLTGGYEMDARISKLCERAFATGLPVFMVNTNTWQTSLSLQSFNLEVPVDDHERIEKVQEYVANYINADWIESLTATSERSRRLSPPAFRYQLTELARKAGKRVVLPEGDEPRTVKAAAICAERGIATCVLLGNPDEINRVAAAQGVELGAGIEIVDPEVVRESYVGRLVELRKNKGMTEAVAREQLEDNVVLGTLMLEQDEVDGLVSGAVHTTANTIRPPLQLIKTAPGSSLVSSVFFMLLPEQVYVYGDCAINPDPTAEQLAEIAIQSAESAIAFGIEPRVAMLSYSTGTSGAGSDVEKVREATRLAQEKRPDLMIDGPLQYDAAVMADVAKSKAPNSPVAGRATVFIFPDLNTGNTTYKAVQRSADLISIGPMLQGMRKPVNDLSRGALVDDIVYTIALTAIQSAQQQK

SEQ ID NO: 60176 - protein, 492 aa, Klebsiella pneumoniae
MIPVVALVGRPNVGKSTLFNRLTRTRDALVADFPGLTRDRKYGRAEVEGREFICIDTGGIDGTEEGVETRMAEQSLLAIEEADVVLFMVDARAGLMPADIAIAKHLRSREKPTFLVANKTDGIDVDQAMADFWSLGLGDIYPIAASHGRGVTSLLEQALLPWVDEVNPQEEVDEDAEYWAKFEAEQNGEAEEEPEDDFNPQDLPIKLAIVGRPNVGKSTLTNRILGEDRVVVYDMPGTTRDSIYIPMQRDEREYVLIDTAGVRKRGKITDVVEKFSVIKTLQAIEDANVVLLVIDAREGISDQDLSLLGFILNSGRSLVIVVNKWDGLSQEVKEQVKETLDYRLGFIDFARVHFISALHGSGVGNLFESVREAYDSATRRVSTAMLTRIMNMAAEDHQPPLVRGRRVKLKYAHAGGYNPPIVVIHGNQVKDLPDSYKRYLMNYFRKSLDVMGTPIRIQFKEGENPFANKRNTLTPNQMRKRKRLIKHIKKSK

SEQ ID NO: 60177 - protein, 838 aa, Klebsiella pneumoniae
MLPVTAGRAVALATVPTMMFCLSPLSRALADDYFDPAALEFADPQQQTSDLHYFAKPGGQQPGTYPVTVVVNDQELGQADITFVDDGGQLRPVLTPGQLAEYGVNVSAFPAFQALHEGETFTRIEKFIPDASSRFSFANQRLTLSIPQAAMNVQSRGYVDPSRWDDGVPAAFVDYYFSGAQIKNADEGESSRSNYLNLRSGLNLGAWRLRNISSMQYDQQRRHWDTQSTWLQRDVRSLKSLLRIGDTYTTGDVFDSIQFRGVQLMSDDEMLPDSQRGFAPTIRGVAHSNAKVTVSQHGYVIYETFVSPGAFAISDLYPTSQSGDLEVKVTESNGAVRTFTQPYSAVPYMLREGRGKFSLSAGRYHSGGASVRSPEFLQGTLFYGLTAGFTLYGGTQLARDYQAWALGLGRGFGEFGSLGGDVTQAVTRTPSGKRYTGHSLRAQYQKNFVSSGTAFSLASYRYSSSGYYDFAEASALESAQGQVDNRRRREELSVSQSLGGLGSLAVSAWSQEYWHRQSRDETVHLGFYSAWKGISWGVGYYYTRASGQQKNDRSWSFNINIPLGGPLSDSAVSYNTTSDSNGYTSQQMSLYGAVPTRPNLFYSVQQGYGNQGRGSNSSASLDYHGGFGNAQIGYRHDAASNQLTWGGAGSVVAHPHGVTFGQTVGESFAIVRAPGAAGVAVQNGNNVHTDWRGYAVVPSLTAYRKNVITLDTESMADDTDVDQQGQTVIPGGGAVVMANYQTHIGNRVLFTLRNAQGPLPFGASARLIEEEESGNPPGGMVADGGQVYLSGVPQEGTLAVSWIVNNQSQSCTLHFHLPDNPQQSLNTVKTVSGLCQTR

SEQ ID NO: 60178 - protein, 559 aa, Klebsiella pneumoniae
MNRLFSSHVMPFRALIDACWKEKYTTARFTRDLIAGITVGIIAIPLAMALAIGSGVPPQYGLYTSAVAGIVIALTGGSRFSVSGPTAAFVVILYPVSQQFGLAGLLVATLMSGIFLILFGLARFGRLIEYIPLSVTLGFTSGIGITIGTMQIKDFLGLQMPHVPEHYLQKVAALAMALPTINVGDAAIGVVTLGILILWPRLGIRLPGHLPALLGGCAVMLVVNLLGGDVTTIGSQFHYQLADGTQGNGIPQLLPQLVLPWDMPGSNFTLSWASLQALLPAAFSMAMLGAIESLLCAVVLDGMTGTKHKANSELIGQGLGNIIAPFFGGITATAAIARSAANVRAGATSPVAAVIHALLVILALLILAPLLSWLPLSAMAALLLMVAWNMSEAHKVINLLRHAPKDDIVVMLMCMSLTVLFDMVIAISVGIVLASLLFMRRIARMTHLAPVNVEVPDDVLVLRVIGPLFFAAAEGLFNDLETRIAGKRIVVLKWDAVPVLDAGGLDAFQRFANKLPEGCELRVSNLEFQPLRTLARAGVKPLPGRLSFYPDRQAALDDL

SEQ ID NO: 60179 - protein, 549 aa, Klebsiella pneumoniae
  MISC_FEATURE (539)..(539): X=any amino acid
  MISC_FEATURE (541)..(541): X=any amino acid
  MISC_FEATURE (544)..(544): X=any amino acid
VSMSLPFKPHIIALLCSAGLLAAAGTLYVQSRTPATIAEPPAQQAPAPAASTTQPVAATYTQAQIDQWVAPIALYPDSLLSQVLMASTYPDNVLQAVQWSQDNPAMKGDAAVQAVASQPWDPSVKSLVAFPALLAMMGENPPWVENLGNAFLAQPHDVMDSVQRLRAIAQQTGTLKSTPQQKVIVTPAAPVSASSSTAATATAHTAAPAPTQVIKIEPTNPQVVYVPSYNPSTVYGTWPNSAYPPVYLPPPPGEQFTDSFVKGFGYSLGVATTWALFSSIDWDDDDHHHHDDDYHHGDYSHNGDNININVNNFNHITGENLPGNHVNWQHNPAYRGHTPYPDNTVAQRFHQTNVSGGLSATQHAPVDREAQRQAAMTQLQHNVPTATAGNLAANNASRDAQRQAASAQLKQATQRSNYRGYDSTPTQQQRREAAKTQLKNPTPQQQQRREAARSHEQNRTPQQQQRRQQFQSATPAQRQQTLSHLRANALSRQRKPRPPPGQAQQERGLQSRQFSGVNRELRDGTRERLSEHHELRRRXGXAEXETHYP

SEQ ID NO: 60180 - protein, 256 aa, Klebsiella pneumoniae
MLWRAAVGSSYSWPAMDIVLPGERYLHLVGSIHMGTRDMAPPPAKLLKKIRQADALIVEADISGNETPFSNLPTYPPLAERLSDAQLSELEARAGELGLSVGLFDSQPLWQVAMVLQATQAQKLGLRPDYGIDYQLLMAARESNIAVMELEGADSQIALLRDLPDGGMALLEDTLTHWRTNARLLQVMIGWWLEQPPSRGAVSLPTTFSQSLYDVLMHQRNLAWRETLLALPPGRYVVAVGALHLYGEGNLPDMLT

SEQ ID NO: 60181 - protein, 232 aa, Klebsiella pneumoniae
MKIGIIGAMEEEVTLLRDKIENRQTITIGGSEIYTGQLHGVDVALLKSGIGKVAAAMGATLLLERCQPDVIINTGSAGGLASTLKVGDIVVSDEARYHDADVTAFGYEYGQLPGCPAGFKADEKLVAAAESCIKALDLNAVRGLIVSGDAFINGSVGLAKIRHNFPQAIAVEMEATAIAHVCHNFKVPFVVVRAISDVADQQSHLSFEEFLAVAARQSTLMVENLVQNLARG

SEQ ID NO: 60182 - protein, 246 aa, Klebsiella pneumoniae
MSNWPYPRIVAHRGGGKLAPENTLAAIDVGARYGHTMIEFDAKLSKDGQIFLLHDDNLERTSNGWGVAGELAWDDLLKVDAGSWFSREFKGEPLPLLSQVAERCRRHGMMANIEIKPTTGLGPQTGKVVALAARDLWQGMTAPLLSSFEIDALEAAQEAAPELPRGLLLDEWRDDWRELTTRLGCVSIHLNHKLLDAARVASLKQAGLHILVYTVNKPQRAAELLCWGVDCICTDAIDVIGPNFQP

SEQ ID NO: 60183 - protein, 173 aa, Klebsiella pneumoniae
MAKPKYSPETKLAVVNHYLSGKDGEQSTADLFGIERTSVRRWVRAWQFHGAEGLTAKNNHYSDEFKLVVVRAVISDRLTMREAAARFNLSAEILVRRWLDVYNDAGAEGLLNMQCGRPGQMTKPKNIPPLTDKELEKLSPEELRAELRYLRAENAYLKKLKALVQSEKNGKKP

SEQ ID NO: 60184 - protein, 159 aa, Klebsiella pneumoniae
MRIGHGFDVHAFGGEGPIIIGGVRIPYEKGLLAHSDGDVALHALTDALLGAAALGDIGKLFPDTDPAFKGADSRELLREAWRRIQARGYTLGNVDVTIIAQAPKMLPHIPQMRVFIAEDLGCHMDDVNVKATTTEKLGFTGRGEGIACEAVALLRKADK

SEQ ID NO: 60185 - protein, 43 aa, Klebsiella pneumoniae
MDRIGSDFHELSGRAKDMGSAAVLLAIIIALITWGTLLWSHYH

SEQ ID NO: 60186 - protein, 228 aa, Klebsiella pneumoniae
MAAESQLNPTQPVNQQIYRILRRDIVHCLIPPGTPLSEKEVSVRFAVSRQPVREAFIKLAENGLIQIRPQRGSYVNKISLSQVRNGCFVRQAIECAVVRRAAGMINEEQLYQLEQNLHQQRIAVDRQQLNDFFLLDDEFHQKLSIIADCQLAWETVENIKAAIDRVRYMSLDHVTSPEMLLRQHHEIFTALEKRDAEAVEKAMSIHLHEISESVLLIRQENRDWFSEE

SEQ ID NO: 60187 - protein, 335 aa, Klebsiella pneumoniae
MKAIAITQAAADGNNIPSLTEIDLPIPTAHGRDLLVAVKAISVNPVDTKVRAGFQGDTPRVLGWDAVGVVQSVGEEVTLFAPGDEVWYAGALGRAGSNSEYQLVDERLVAHKPRTLDNASAAALPLTAITAWELLFHRLGVEEGGNAGDTLLIVGAAGGVGSILTQLASKLTAMTVIGTASRPESQQWVREAGAHHVIDHSKPLADELARIGITSVTHVASLTNTEQHFNALIDALAPQGKLALIDDPETLDVVPLKAKSLSLHWEFMFTRSMFETDDMIAQHQLLTRVAALIDNHTIKTTLGEHYGAITAANLQKAHRQLETGRAVGKIVLEGF

SEQ ID NO: 60188 - protein, 293 aa, Klebsiella pneumoniae
MTDSRYIGRFAPSPSGELHFGSLIAALGSYLQARANQGIWRVRIEDIDPPREVPGAADTILRQLDHYGLHWDGDVLWQSQRHEAYREALTWLGEQGLSYYCTCTRARIHAVGGIYDGHCRDLGLGAENAALRLRQTRPVLQFSDRLRGTLIANEPLAREDFIIHRRDGLFAYNLAVVVDDHFQGITEIVRGADLIEPTVRQISLYQHFGWQAPDYLHLPLALNGDGNKLSKQNHAPALPEGDPRPEIVRALRFLNQAIPEEWQALSIDDLLAQAVANWQPAKIEHSQMAPAEL

SEQ ID NO: 60189 - protein, 286 aa, Klebsiella pneumoniae
MLVSMKDMLQHALRDGYAVGQFNINNLEWVGAVLSTAQQCRSPVILGVSGGTVKHMLGLKCIHDIVVNAMEYLHIDVPVALHLDHGTSREACEAAIAAGFSSIMFDGSHLPFRENLAITRHLVTLAHSKGISVEAELGTIAGSEDGIVNSEVIYADPQECYTLVTETQVDCLAAALGSTHGLYKGKARLGFTEMKAIAEQVKVPLVLHGGTGIADEDMRRAIACGTAKINVNTENMYAWCQQVKAIFAADTGHDVNDPRKVIAQGLQPVREMIARRMALFGSEQRY

SEQ ID NO: 60190 - protein, 163 aa, Klebsiella pneumoniae
MNMNATILGQAIAFVIFVWFCMKYVWPPLMAAIEKRQKEISDGLASAERAKKDLDLAQANATDQLKKAKAEAQVIIEQANNAALRFWTKLKLKQNRNAPKSLHKRRLKLMLSVNVHARSCVSRSLSWLLLAPRRSSNVPWMKLLTATSWINLSLNCKEGGADV

SEQ ID NO: 60191 - protein, 427 aa, Klebsiella pneumoniae
MKKTKIVCTIGPKTESEEMLTKMLEAGMNVMRLNFSHGDYAEHGQRIQNLRNVMSKTGKKAAILLDTKGPEIRTIKLEGGNDVSLKAGQTFTFTTDKSVIGNNEIVAVTYEGFTSDLTVGNTVLVDDGLIGMEVTAIEGNKVICKVLNNGDLGENKGVNLPGVSIALPALAEKDKQDLIFGCEQGVDFVAASFIRKRSDVVEIREHLKAHGGENIQIISKIENQEGLNNFDEILEASDGIMVARGDMGVEIPVEEVIFAQKMIIEKCIRARKVVITATQMLDSMIKNPRPTRAEAGDVANAILDGTDAVMLSGESAKGKYPLEAVTIMATICERTDRVMTSRLDFNNDNRKLRITEAVCRGAVETAEKLEAPLIVVATQGGKSARAVRKYFPDATILALTTNETTARQLVLSKGVVPQLVEEIASTD

SEQ ID NO: 60192 - protein, 55 aa, Klebsiella pneumoniae
MLVLEDDGCGLPPGSNLQGFGLTGMRERVTALGGTLTISCTHGTRVCVNLPLRYA

SEQ ID NO: 60193 - protein, 577 aa, Klebsiella pneumoniae
MNKKAMAAAVSMILAGGAHAAQQERPNVIVIIADDMGYSDISPFGGEIPTPNLQAMAEQGMRMSQYYTSPMSAPARSMLLTGNSNQQAGMGGMWWYDSTIGKEGYELRLTDRVTTMAERFKDAGYNTLMAGKWHLGFVPGATPKDRGFNHAFAFMGGGTSHFNDAIPLGTVEAFHTYYTRDGERVSLPDDFYSSEAYARQMNSWIKATPKEQPVFAWLAFTAPHDPLQAPDEWIKRFKGQYEQGYAEVYRQRIARLKALGIIHDDTPLPHLELDKEWEALTPEQQKYTAKVMQVYAAMIANMDAQIGTLMETLKQTGRDKNTLLVFLTDNGANPAQGFYYESTPEFWKQFDNSYDNVGRKGSFVSYGPHWANVSNAPYANYHKTTSAQGGINTDFMISGPGITRHGKIDASTMAVYDVAPTLYEFAGIDPNKSLAKKSVLPMIGVSFKRYLTGEVQEPPRGNYGVELHHQAAWVDGEWKLRRLVPRGLTAGDAPWQLFNLHDDPLETHDVAAEHPDRVKAMSEAYEAFAKRTMVTKAQGKMIDYVGIDSKTGRYLAVDPATMKPVPAPQAIPVSEIH

SEQ ID NO: 60194 - protein, 297 aa, Klebsiella pneumoniae
MKIAAFDIGGTALKMGVMARDGRLLETARQSINDSDGDRILQAMLSWLAAHPSCEGIAISAPGYIDPHSGFITMGGAIRRFDNFAMKSWLETRTGLPVSVENDANCVLLAERWQGKAAEMANFLVLTIGTGIGGAIFCQHQLINGARFRAGEFGYMLTDRPGGRDPRRYSMNENCTLRVLRHRYAQHIGAPLDSVTGELIFDRYDAGDPVCQRLVAEFFNGLGHGLYNLVHIFDPQTIFIGGGVVERPGFLTLLRQHLAWFGIADYLDTVSHGNDAGLIGAVYHFNQLYRSPDDDRH

SEQ ID NO: 60195 - protein, 1227 aa, Klebsiella pneumoniae
MSSKVEQLHQQLKERILVLDGGMGTMIQGYRLSEQDFRGERFADWPCDLKGNNDLLVLSKPEVIREIHDAYFEAGADIIETNTFNSTTIAMADYQMESLSAEINFAAAKLARASADAWTARTPEKPRYVAGVLGPTNRTASISPDVNDPAFRNITFDQLVAAYRESTRALVEGGVDLILIETVFDTLNAKAAIYAVKEELEALGVDLPLMISGTITDASGRTLSGQTTEAFYNSLRHAEALSFGLNCALGPDELRQYVQELSRIAECYVTAHPNAGLPNAFGEYDLDADTMATQIREWAEAGFLNIVGGCCGTTPEHIAAMSRAVAGLPPRQLPEIAVACRLAGLEPLNIGDDSLFVNVGERTNVTGSAKFKRLIKEEKYSEALDVARQQVESGAQIIDINMDEGMLDAEAAMVRFLNLIAGEPDIARVPIMIDSSKWEVIEKGLKCIQGKGIVNSISMKEGVESFIHHAKLVRRYGAAVVVMAFDEVGQADTRERKIEICRRAYKILTEEVGFPPEDIIFDPNIFAVATGIEEHNNYAQDFIGACEDIKRELPHALISGGVSNVSFSFRGNDPVREAIHAVFLYYAIRNGMDMGIVNAGQLAIYDDLPGELRDAVEDVILNRRDDSTERLLELAEKYRGSKADDGANAQQAEWRTWEVKKRLEYSLVKGITEFIEQDTEEARQQAARPIEVIEGPLMDGMNVVGDLFGEGKMFLPQVVKSARVMKQAVAYLEPFIEASKEQGSSNGKMVIATVKGDVHDIGKNIVGVVLQCNNYEIIDLGVMVPADKILKTAKEVNADLIGLSGLITPSLDEMVNVAKEMERQGFTIPLLIGGATTSKAHTAVKIEQNYSGPTVYVQNASRTVGVVSALLSDTQRDEFVARTRKEYETVRIQHGRKKPRTPPVTLAAARENDLAFDWESYTPPVAHRLGVQTVEASIETLRNYIDWTPFFMTWSLAGKYPRILEDEVVGEEAQRLFKDANELLDKLSAEKTLNPRGVVGLFPANRVGDDIEIYRDETRTHVLTVSHHLRQQTEKVGFANYCLADFVAPKLSGKADYIGAFAVTGGLEEDALADAYEAQHDDYNKIMIKAIADRLAEAFAEYLHEKVRKVYWGYAANENLSNEELIRENYQGIRPAPGYPACPEHTEKGTIWQLLDVEAHTGMKLTESFAMWPGASVSGWYFSHPDSKYFAVAQIQRDQVEDYALRKGMTPAEVERWLAPNLGYDAD

SEQ ID NO: 60196 - protein, 335 aa, Klebsiella pneumoniae
MSYRISILDKSPLAAGETAAQALARTLTLAQHAEAWGYHRFWVAEHHNTDQLASPSPELVIAWLLGHTRRIRLGSGGVMLQHYSPYKVAENFNLLAALAPGRIDLGVGKAPGGLPLSTRALQQGLHQEEKGTFADQLAQLDNWLSLTEPGGEESLRATPIPPRRADGFLLGASLESAELAARLDWNFVFAAHLNGDSALRRAVFNRWRELSPREAIVAVQVVVADDPATAAALAQQVEVWGVELENGQRVTVGSEAQAVAFARQAGSRPTRIARRESSLISGTPEQVKARLDALQAEEQLDELIIDTPISDGPARLHSLRLLAQAHYGKEVLNVL

SEQ ID NO: 60197 - protein, 91 aa, Klebsiella pneumoniae; identical to SEQ ID NO: 43000

SEQ ID NO: 60198 - protein, 37 aa, Klebsiella pneumoniae
MRRLFNMLVNNVREHFMIYLALWLLLAIIDLVWLWFF

SEQ ID NO: 60199 - protein, 163 aa, Klebsiella pneumoniae
MRLTSKGRYAVTAMLDVALNSEMGPVPLADISERQGISLSYLEQLFSRLRKNGLVSSVRGPGGGYLLGKDAGSIAVGEVISAVDESVDATRCQGKGGCQGGDKCLTHALWRDLSERLTGFLNNITLGELVNNQEILDVSGRQHQHETQRNARTQDAIDVKLRA

SEQ ID NO: 60200 - protein, 867 aa, Klebsiella pneumoniae
MSWPQGDLNCAAIKAHIDTFQHWLGEAFDSGIVAEQLIAARTEFIDQLLQRLWIACGFESVSDLALVAVGGYGRGELHPLSDVDLLILSRKKLPDDQAQKVGELLTLLWDVKLEVGHSVRTLEECLLEGLSDLTVATNLIESRLLIGDVALFLELQKHIFSDGFWPSEKFFAAKVEEQNVRHQRYHGTSYNLEPDVKSSPGGLRDIHTLQWVARRHFGATSMDEMVGFGFLTEAERNELNECLHQLWRIRFALHLELTRYDNRLLFDRQLSVARRLGYEGDGNQPIEHMMKDFFRVTRRVSELNQMLLQLFEEAILALTEDEKPRPIDDDFQLRGTLIDLRDDTLFIREPQAILRMFYIMVRNSTITGIYSTTLRHLRHARRHLTQPLCYIPEARTLFLSMLRHQGAVSRGLLPMHRHSVLWAYMPQWSHIVGQMQFDLFHAYTVDEHTVRVMLKLESFAKEETRSRHPLCVELWPRLTHPELILIAALFHDIAKGRGGDHSILGAQDVLKFAELHGLNSRETQLVAWLVRHHLLMSVTAQRRDIQDPEVIKQFAEEVQTENRLRYLVCLTVADICATNETLWNSWKQSLLRELYFATEKQLRRGMQSTPDMRERVRHHQLQALALLRMDNINEEALHQIWNRCRANYFVRHTPTQLAWHARNLLRHDLNKPMILLSSQATRGGTEIFIWSPDRPYLFAAVCGELDRRNLSVHDAQIFTTRDGMAMDTFIVLEPDGSPLSADRHEAIRQGLEQTITQRSWQPPAPRRQAAKLRHFSVDTEVNFLPTHTDRKSFLELIALDQPGLLARVGQVFADLGISLHGARITTIGERVEDLFIIATADRRALNNELQQEVQQRLTAALNPNDKG

SEQ ID NO: 60201 - protein, 495 aa, Klebsiella pneumoniae
MQYIKIHSQDNVAVALTDIAAGSVVTIDNDSVTLGQDIVRGHKFALRAIAKGENVVKYGLPIGHALADIAPGEHVHAHNTRTNLSDLDAYRYQPDLVAQPPQPADREVQIYRRANGDVGVRNELWILPTVGCVNAMARQMQNRFLKETYGAEDIDGVHLFSHTYGCSQLGDDHINTRTMLQNMVRHPNAGAVLVVGLGCENNQVEAFRETLGEFDPQRVHFMVCQHQDDEVEAGVEHLHQLYEVMRQDKRQPGKLSELKFGLECGGSDGLSGITANPMLGRFSDYVIANGGTTVLTEVPEMFGAEQLLMSHCRDEATFDKLVTMVNDFKQYFIAHDQPIYENPSPGNKAGGITTLEDKSLGCTQKAGSSQVVDVLRYGERLKVHGLNLLSAPGNDAVATSALAGAGCHMVLFSTGRGTPYGGFVPTVKIATNSELAAKKKHWIDFDAGQLLHGKTMPQLLEEFVDAIVAFANGKPTCNEQNDFRELAIFKSGVTL

SEQ ID NO: 60202 - protein, 270 aa, Klebsiella pneumoniae
MRRDVLLLLCSFYLLPLGAHADDSGLSAKDIKTLFFGHDDRKAVNRPEESPWDAIGQLETASGNLCTATLISPHLALTAGHCLLTPPRGKPDKAVALRFISRKGNWVYEIHGIDGRVDPSLGRRLKADGDGWIVPSAAAPSDFGLIVLRYAPSGITPIPLFPGSKADLTAALKAADRKVTQSGYPEDHLDNLYSHQDCIVTGWAQTSVLSHQCDTLPGDSGSPLLLKTEDGWQVIAVQSSAPGPQDRWRADNRAIAVTGFRDKLEALAGE

SEQ ID NO: 60203 - protein, 305 aa, Klebsiella pneumoniae
MIIRPEQHWFLRLFDWHGSVLSKIIFRLLLNVLMSIIAIISYQWYEQLGIHLTVAPFSLLGIAIAIFLGFRNSASYSRFVEARNLWGTVLIAERTLVRQLRNILPAEHDAHRRIVSYLVAFSWSLKHQLRKTDPTADLRRLLPEERVTEILASSMPTNRILLLAGNEIGQLREAGKLSDITYGLMDNKLDELAHVLGGCERLATTPVPFAYTLILQRTVYLFCTLLPFALVGDLHYMTPFVSVFISYTFLSWDSLAEELEDPFGTAANDLPLNAMCNTIERNLLDMTGQHPLPETLRPDRYFNLT

SEQ ID NO: 60204 - protein, 262 aa, Klebsiella pneumoniae
MEAFILSAVEQGVMTITLNRPDRLNSFNDLMHHQLAECLKQAERDDGVRCLLITGAGRGFCAGQDLNDRNVDPSGPPPDLGMSVERFYNPLVRRLAALPKPVICAVNGVAAGAGATLALGCDIVLAARSAKFVMAFSKLGLVPDCGGSWFLPRVAGRARAMGLALLGDSLSAEQAAQWGIIWQLVDDSELADTSLQLARHLAAQPTFGLGLIKKALLASETNSLDAQLDLERDYQRLAGRSDDYREGVSAFLAKRPPQFSGK

SEQ ID NO: 60205 - protein, 280 aa, Klebsiella pneumoniae
MLSYRHSFHAGNHADVLKHTVQSLIIESLKEKEKPFLYLDTHAGAGRYQLSGEHAERTGEYLEGIARIWQQDDLPAELEPYISVVEHFNRNGQLRYYPGSPLIARQLLREQDSLQMTELHPSDFPLLRAEFQKDSRARVDKADGYQQLKAKLPPVSRRGLILIDPPYEIKTDYQAVVTGINEGYKRFATGTYALWYPVVLRAQIKRMIKELEATGIRKILQIELAVRPDSDQRGMTASGMIVINPPWKLEQQMNNVLPWLHSKLVPTGTGHATVSWIVPE

SEQ ID NO: 60206 - protein, 176 aa, Klebsiella pneumoniae
MAKPKYSPETKLAVVNHYLSGKDGEQSTADLFGIERTSVRRWVRAWQFHGAEGLTAKNNHYSDEFKLVVVRAVISDRLTMREAAARFNLSAEILVRRWLDVYNDAGAEGLLNMQCGRPGQMTKPKNIPPLTDKELEKLSPEELRAELRYLRAENAYLKKLKALVQSEKNGKSPDNQ

SEQ ID NO: 60207 - protein, 438 aa, Klebsiella pneumoniae
MSERSSSALVSVVIPVHDAAEYISDTLSSILSQSLQDIEVIIIDDNSADDTLKLLQSFAANDSRIRLLNNSQNIGAGASRNMGLKIASGEYIIFLDDDDYADANMLKRMYDHAALLQADVVICRCQSLDLQTHSYAPMPWSVRVDLLPQKELFSSDEITHNFFDAFIWWPWDKLFRRQAILDTGLQFQDLRTTNDLFFVSAFMLLTKRMAFLDEILISHSINRSGSLSVTREKSWHCALDALRALYSFIDSKHLLPSRGRDFNNYAVTFLEWNLNTISGPAFDSLFTASREFIASLDIDESDFYDDFIKAAHYRLIRLTPEEYLFSLKDRVLHELESSNLSSEKLQASIASQDQVLKAREEEIDELRASVAQKKERIDRLVQRNAYLETEYQKQQDQLTKLQNELNNAAQRYSVLISSLSWKVTRPLRLIKALITRKM

SEQ ID NO: 60208 - protein, 382 aa, Klebsiella pneumoniae
LIKSALLVLEDGTQFHGRAIGATGTAVGEVVFNTSMTGYQEILTDLPIPANRHSYLPHIGMSAPTPPMKNLLRYMAQGLVIRDLPLIASNFRSTEDLSSYLKRHNIVAIADIDTRKLTRLLREKGAQNGCIIAGDSPDAQLALEKAKAFPGLNGMDLAKEVTTAETYSWTQGSWTLAGDLPEAKAESELPFHVVAYDFGAKRNILRMLVDRGCRLTVVPAKTSAADVLALNPDGIFLSNGPGDPAPCDYAIEAIEKFLETDIPVFGICLGHQLLALASGAKTIKMKFGHHGGNHPVKDIDNNVVMITAQNHGFAVDEATLPANLRVTHKSLFDGTLQGIPSYRQTGVQLPGATLKRARGRTMAAPLFDHFIELIEQYRQSAK

SEQ ID NO: 60209 - protein, 364 aa, Klebsiella pneumoniae
MAKMRVGIVFGGKSAEHEVSLQSAKNIVEAIDKSRFDVVLLGIDKQGLWHINDAGNYLLNAQDPARIALRPSTVTLAQIPGREAQQLINAESGQPLAAIDVIFPIVHGTLGEDGSLQGMLRMANLPFVGSDVLGSAACMDKDVTKRLLRDAGLAVAPFITLTRANRAQFSFADVEAKLGLPLFVKPANQGSSVGVSKVKNEEQYHQAVALAFEFDHKVVVEQGIKGREIECAVLGNDHPQASTCGEIVLNSEFYAYDTKYIDDQGAQVVVPAAIAPEINDKIRAIAVQAYQTLGCSGMARVDVFLTADNEVVINEINTLPGFTNISMYPKLWQASGLDYTSLITRLIELALERHAADRALKTSM

SEQ ID NO: 60210 - protein, 471 aa, Klebsiella pneumoniae
MAGNKPFNKPQTETRERDPQLAGLKVPPHSIEAEQSVLGGLMLDNERWDDVAERVVADDFYTRPHRHIFTEMARLQESGSPIDLITLAESLERQGQLDSVGGFAYLAELSKNTPSAANISAYADIVRERAVVREMISVANEIAEAGFDPQGRTSEDLLDLAESRVFKIAESRANKDEGPKNIADVLDATVARIEQLFQQPHDGVTGVNTGYDDLNKKTAGLQPSDLIIVAARPSMGKTTFAMNLVENAAMLQDKPVLIFSLEMPSEQIMMRSLASLSRVDQTRIRTGQLDDEDWARISGTMGILLEKRNIYIDDSSGLTPTEVRSRARRIAREHGGIGLIMIDYLQLMRVPSLSDNRTLEIAEISRSLKALAKELQVPVVALSQLNRSLEQRADKRPVNSDLRESGSIEQDADLIMFIYRDEVYHENSDLKGIAEIIIGKQRNGPIGTVRLTFNGQWSRFDNYAGPQYDDE

SEQ ID NO: 60211 - protein, 273 aa, Klebsiella pneumoniae
MHDAQIRVAIAGAGGRMGRQLIQAALQMEGVALGAALEREGSSLVGSDAGELAGAGKAGVAVQSSLAAVKDDFDVLIDFTRPEGTLNHLAFCREHGKGMVIGTTGFDDAGKQAIRDAAQDIAIVFAANFSVGVNVLLKLLEKAAKVMGDYTDIEIIEAHHRHKVDAPSGTALAMGEAIAGALNKDLKDCAVYSREGYTGERVPGTIGFATVRAGDIVGEHTAMFADIGERIEITHKASSRMTFANGAVRSALWLKGKKNGLFDMRDVLDLNSL

SEQ ID NO: 60212 - protein, 167 aa, Klebsiella pneumoniae; identical to SEQ ID NO: 56103

SEQ ID NO: 60213 - protein, 922 aa, Klebsiella pneumoniae
MRGDLAKREPGMLARWTDDDLYGIIRAAKKGKKTFILHDGPPYANGSIHIGHSVNKILKDIIVKSKGLTGYDSPYVPGWDCHGLPIELKVEQEYGKPGEKFTAAEFRAKCREYAAEQIDGQRKDFIRLGVLGDWSHPYLTMDFKTEANIIRALGKIIGNGHLHKGAKPVHWCVDCRSALAEAEVEYYDKTSPSIDVAFHAVDKAAVLAKFGVADVNGPVSLVIWTTTPWTLPANRAISLSPEFDYALVQVDGQALILAKDLVESVMKRVGATDYTILAAVQGSELELMRFKHPFLDFDVPAILGDHVTLDAGTGAVHTAGGHGPDDYTISQKYGLEIANPVGPDGAYLPGTWPSLDGINVFKANDIIVEMLRERGALLHVEKLQHSYPCCWRHKSPIIFRATPQWFVSMDQKGLRAQSLKEIKGVQWIPDWGQARIESMVANRPDWCISRQRTWGVPMSLFVHKETHELHPRTLELMEEVAKRVEVDGIQAWWDLDSRDILGDDADSYEKVPDTLDVWFDSGSTHSSVVDVRPEFAGHAADMYLEGSDQHRGWFMSSLMISTAMKGKAPYRQVLTHGFTVDGQGRKMSKSIGNTVSPQDVMNKLGADILRLWVASTDYTGEMAVSDEILKRAADSYRRIRNTARFLLANLNGFDPAKDMVKPEEMVVLDRWAVGCAQAAQEDILKAYESYDFHEVVQRLMRFCSIEMGSFYLDIIKDRQYTAKADSVARRSCQTALFHIVEALVRWMAPIMSFTADEIWGYLPGEREKYVFTGEWYEGLFGLADDEAMNDDFWDELLKVRGEVNKVIEQARADKKVGGSLEAAVTLYADADLAAKLNALGDELRFVLLTSGANVADYASASADAQQSELLKGLKVALSKAEGEKCPRCWHYTTDIGKVAEHAEICGRCVSNVAGDGEQRKFA

SEQ ID NO: 60214 - protein, 427 aa, Klebsiella pneumoniae
MAQQKPHDVNEPSRRRLLKGIGALGGALAITGGCPVAHAAKAESSPGTLTPDARQEKQPFYGRHQAGILTPQQASMMLVAFDVLAADKADLERLFRLLTQRIAFLTQGGPAPDTPNPRLPPMDSGILGPWIAPDNLTITVSVGHSLFDERFGLADKAPKKLQPMTRFPNDSLDAALCHGDLLLQICANTQDTVIHALRDVIKHTPDLLSVRWKREGFISDSAARSKGKETPINLLGFKDGTANPASHDSALMDKVVWVTADQDEPAWTVGGSYQAARIIQFHVEFWDRTPLKEQQTIFGRDKHTGAPLGMKNEHDTPDYSKDPNGEVIALDSHIRLANPRTPETQSSLMMRRGYSYSLGVTNAGQLDMGLLFVCYQHDLEKGFLTVQKRLNGEALEEYVKPIGGGYFFVLPGVVDEKHYLGESLLQA

SEQ ID NO: 60215 - protein, 471 aa, Klebsiella pneumoniae
VDYLPLFAELKQRPVLVIGGGEIAERKIKFLLRAQAQVQVVAETLSPALADLAARQALSWRAAEFSDSLVDDVFLVIAATEDEALNQRVFAAANARYRLVNVVDNQALCSFVFPSIVDRSPLLVAISSSGKAPVLSRILREKIEALLPTNLGRLAESASYWRNHLKTRLTTTEARRRFWERVFTGRFASLMVAGNSAEAEKALQDELDKPERETGEIILVGAGPGDAGLLTLRGLQAIQQADVVFHDHLVTQPVLELVRRDAELICVGKRAGEHSVPQHETNQLLVEAAKAGKTVVRLKGGDPFIFGRGAEELQAAAEAGIPFQVVPGVTAAAGATAYAGIPLTHRDYAQSAVFVTGHYKPDSAPFDWSLLAKSQQTLAIYMGTMKAAEISAQLIAHGRDSDTPVAVISRGTRDDQQTITGTLQQLEHLAKDAPMPALLVVGEVVQLHQQLAWFQHTSSAEGFNASVVNLA

SEQ ID NO: 60216 - protein, 281 aa, Klebsiella pneumoniae
LIISELRHEHALRDLLRAAGMSRSTWYYNMNALKQGDRYAGLKENIRKIYHYHKVRYGYRRITLALRKQGLRINHKTVQRLMAELSLRSMIRAKKYRAWKGRTGEPRPNILSRNFGASKANEKWVTDVTEFPVQGKKLYLSSVLDLFNREVIAYSLSERPVMEMVNTMLDGAFPKLRPGDAPLLHSDQGWHYRMRSYQERLKAHGMTQSMSRKGNCLDNAVMENFFGTLKSECFYLREFRSVSALRKAVEDYIHYYNNERISLKLKGLSPVEYRTQALRAA

SEQ ID NO: 60217 - protein, 397 aa, Klebsiella pneumoniae
MERFDAIVVGAGAAGMFCAAQAGQLGCRVLLLDNGKKPGRKILMSGGGRCNFTNMYVEPAAYLSQNPHFCKSALARYTQWDFIELVGKYGIAWHEKTLGQLFCDDSAEQIVNLLLAECEKGGVQIRLRSEILSVERDEQGYRLQVNGETLVTKKLVIASGGLSMPGLGASPFGYKVAEQFGLKVLPTRAGLVPFTLHKPLLEQLQVLSGVSVPSTITAENGTLFRENLLFTHRGLSGPAVLQISSYWQPGEFVTVNLLPDCDLDDFLNEQRSAHPNQSLKNTLAMQLPKRLVECLQQLGQIPDVTLKQLNVRDQQTLVETLTAWRVQPNGTEGYRTAEVTLGGVDTNELSSRTMEARKAPGLYFIGEVMDVTGWLGGYNFQWAWSSAWACAQALVEG

SEQ ID NO: 60218 - protein, 36 aa, Klebsiella pneumoniae
MDDVNVKATTTEKLGFTGRGEGIACEAVALLRKADK

SEQ ID NO: 60219 - protein, 36 aa, Klebsiella pneumoniae
FHELSGRAKDMGSAAVLLAIIIALITWGTLLWSHYH

SEQ ID NO: 60220 - protein, 731 aa, Klebsiella pneumoniae
MPWILLLLAALFTAPLSAATLPGVPTANTDKNSASEPDVEQKRAAYAALADVLANDSARQELIDQLRKAAATPPPDSTPTLTPPAVKEETTVLENVTQISREYGEQLSSRFSQLWRNITGSPHKPFNPQTFTSAAWHFLLLAGLVFAFWWLVRLAALPLYRKMGEWGRHKNRDRGNWLQLPLTIAGAFIIDLLLLALTLFVGQLLSDRLNGNNPTIAFQQSLFLNAFALIEFFKAILRLIFCPRIPALRPFNLSDEAASYWSLRLSALSSLIGYGLIVAVPIISNQVNVKVGALANVVIMLCITLWALYLIFHNKAVITQGLIHLADHSLAFFSLFIRAFALVWHWLACAYFVVLFFFSLFDPGNSLKFMMGATLQSLAIIGGAALVSGILSRWIAKTITLSPATQRNYPELQKRLNGWISASLKAARILTVCVAIMLLLSAWGLFDFREWLHNDAGQKTVDVLIRIALILFFSAIGWTVLASLIENRLASDIHGRPLPSARARTLLTLFRNALAVVISTITVMILLSEIGVNIAPLLAGAGALGLAISFGAQTLVKDIITGIFIQFENGMNTGDLVTIGPLTGTVERMSIRSVGVRQDTGAYHIIPWSSITTFANFVRGIGSVVANYDVDRHEDLDKASQALKAAVDDLLAQEEIRGLIIGEPSFAGLVGLSNTAFTLRVSFTTLPLKQWTVRFALDTQVKKHFDRAGVRAPVQTWQQLPMPGADSPAAE

SEQ ID NO: 60221 - protein, 276 aa, Klebsiella pneumoniae; identical to SEQ ID NO: 43399

SEQ ID NO: 60222 - protein, 79 aa, Klebsiella pneumoniae; identical to SEQ ID NO: 42723

SEQ ID NO: 60223 - protein, 1065 aa, Klebsiella pneumoniae
  MISC_FEATURE (983)..(983): X=any amino acid
  MISC_FEATURE (987)..(987): X=any amino acid
  MISC_FEATURE (996)..(996): X=any amino acid
  MISC_FEATURE (1024)..(1024): X=any amino acid
  MISC_FEATURE (1057)..(1057): X=any amino acid
MPKRTDIKSILILGAGPIVIGQACEFDYSGAQACKALREEGYRVILVNSNPATIMTDPEMADATYIEPIHWEVVRKIIEKERPDAVLPTMGGQTALNCALELERQGVLAEFGVTMIGATADAIDKAEDRRRFDIAMKKIGLDTARSGIAHTMEEALAVAADVGFPCIIRPSFTMGGTGGGIAYNREEFEEICERGLDLSPTNELLIDESLIGWKEYEMEVVRDKNDNCIIVCSIENFDAMGIHTGDSITVAPAQTLTDKEYQIMRNASMAVLREIGVETGGSNVQFAVNPEKRSPDRYRNEPARSRSSALASKATGFPIAKVAAKLAVGYTLDELMNDITGGRTPASFEPSIDYVVTKIPRFNFEKFAGANDRLTTQMKSVGEVMAIGRTQQESLQKALRGLEVGATGFDPKVSLDDPEALTKIRRELKDAGAERIWYIADAFRAGLSVDGVFNLTNIDRWFLVQIEELVRLEEKVAEVGINGLDADFLRTLKRKGFADARLAKLAGVREAEIRKLRDQYDLHPVYKRVDTCAAEFATDTAYMYSTYEEECESNPSVDRDKIMVLGGGPNRIGQGIEFDYCCVHASLALREDGYETIMVNCNPETVSTDYDTSDRLYFEPVTLEDVLEIVRIEKPKGVIVQYGGQTPLKLARALEAAGVPVIGTSPDAIDRAEDRERFQHAVDRLKLKQPANATVTAIEQAVEKAKEIGYPLVVRPSYVLGGRAMEIVYDEQDLRRYFQTAVSVSNDAPVLLDRFLDDAIEVDVDAICDGEMVLIGGIMEHIEQAGVHSGDSACSLPAYTLSKEIQDVMREQVQKLAFELQVRGLMNVQFAVKDNEVYLIEVNPRAARTVPFVSKATGVPLAKVAARVMAGKTLAQQGVTKEIIPPYYSVKEVVLPFNKFPGVDPLLGPEMRSTGEVMGVGRTFAEAFAKAQLGSNSTMKKQGRALLSVREGDKERVVDLAAKLLKFGFELDATHGTAIVAGXSGHXPASGEQGAXRSSAHSGPHQEWRIYLHHQHHRRSPGDXRLQADSPQRAAVQSALRHHPERRLCHRDGAERXRHREGDFG

SEQ ID NO: 60224 - protein, 660 aa, Klebsiella pneumoniae
MNHFILSDSRKCIGCQACEVACVMAHNEEQHVLTPQRFLPRITVIKAEGQRNAITCRHCEDAPCVRSCPNDAIAQSGDSVQVRQEKCIGCKSCMVACPFGVMQVVVTPQAADLVKASAHKCDLCQGREAGPACVENCPAQALTLADDETLITLAKQRRLRSACQEVQPWQRATPLCSQPNAGAKVRQMAMTPPRGEPDKLAAEVRKSHFEEIYQPFTPQQAQQQAARCLTCGEHSICEWTCPLHNHIPQWIELVKAGNIAAAVALSHQTNCLPEITGRVCPQDRLCEGACTLRDESGAVTIGNIERYISDQALASGWRPDLSQVKPSGKRVAIIGAGPAGLACADMLVRHGVQPVVFDRHAEIGGLLTFGIPAFKLDKSLLARRRAIFSEMGIRFELNCEVGKDISMATLLADYDAVFVGAGTYRSMKAGLPNEEAPGVYDALPFLIANTKQVMGLAASAQEPYVNTAGLNVVVLGGGDTAMDCVRTALRHGARQVTCAYRRDEANMPGSKKEVKNAREEGALFEFNVQPVTLELDENGRVNGVRFLRTELGAPDAGGRRRPTPIPGSEFVMPADAVIMAFGFHPHRMPWLEAAGVALDSQGRIKAGVESRYRYQTSQEKIFAGGDAVRGADLVVTAMAEGRHAAQGILDYLARKTTPLH

SEQ ID NO: 60225 - protein, 123 aa, Klebsiella pneumoniae
KPVMEMVNTMLDGAFPKLRPGRAPPLHSDQAGHYRMRSYQERLKAHGMTQSMSRKGNCLDNAVMENFFGTLKSECFYLREFRSVSALRKAVEDYIHYYNNERISLKLKGLSPVEYRTQALRAA

SEQ ID NO: 60226 - protein, 320 aa, Klebsiella pneumoniae
MIKKIGVLTSGGDAPGMNAAIRGVVRAALTEGLEVFGIYDGYLGLYEDRMVQLDRYSVSDMINRGGTFLGSARFPEFREEHIRAVAIENMKKRGLDALVVIGGDGSYMGAMRLTEMGFPCIGLPGTIDNDIKGTDYTIGFFTALSTVVEAIDRLRDTSSSHQRISVVEVMGRYCGDLTLAAAIAGGCEFIMVPEVEYTRDDLVAEIKAGIAKGKKHAIVAITEHMCDVDELASYIEKETGRETRATVLGHIQRGGSPVPYDRILASRMGAYAIELLLQGHGGRCVGIQNEKLVHHDIIDAIENMKRPFKNDWLDCAKKLY

SEQ ID NO: 60227 - protein, 190 aa, Klebsiella pneumoniae
IGQYELLGESIDDAAGEAFDKTAKLLGLDYPGGPMLSKMASQGTEGRFVFPRPMTDRPGLDFSFSGLKTFAANTIRSNGDDEQTRADIARAFEDAVVDTLMIKCRRALEQTGFKRLVMAGGVSANRTLRAKLAEMMQKRGGEVFYARPEFCTDNGAMIAYAGMVRLQTGAKAELGVTVRPRWPLAELPAA

SEQ ID NO: 60228 - protein, 256 aa, Klebsiella pneumoniae
MLRIADKTFESHLFTGTGKFAAPEVMVEAIRASGSQLVTLAMKRVDLRQRNDAILAPLLAAGVSLLPNTSGAKTAEEAVFAARLAREALGTHWLKLEIHPDARWLLPDPIETLKAAELLVREGFVVLPYCGADPVLCKRLEEVGCAAVMPLGAPIGSNQGLETKAMLEIIIEQATVPVVVDAGIGVPSHAAQALEMGADAVLVNTAIAVADDPVAMARAFRMAIDAGLLARQAGPGARSTQAQATSPLTGFLEALA

SEQ ID NO: 60229 - protein, 214 aa, Klebsiella pneumoniae
MNMIPVIIVAVLVALGLKFIPEKMINGFQIFAKFLVALITIGLAAAVIKFLLGWELIPGLDPIFMAPGDQPGEVMRAIEVIGSISCVLLGAYPMVLLLTRWFEKPLMRVGNLLKINNMAAGGMVATLANNIPMFGMMKQMDTRGKVINCAFSVSAAFALGDHLGFAAANMNAMIFPMIVGKLVGGVTAIGVAMLLVPKDENVPAPANNEAEAHS

SEQ ID NO: 60230 - protein, 222 aa, Klebsiella pneumoniae
MFDLIDTAITGDQFLLALHDTLIMVAVSLGFGALIGVPLGIVLVVCRPGGIVANPVVHQALNPLINVLRSLPFIILLIVILPFTRLLVGTTIGTAGAIVPLIVFVAPYIARLVESSLLEVDEGILEAADAMGATPLQTVWHFMLPEAAASLILALTTATIGLLGATAMAGTVGGGGIGDLAITYGYQRFDAFATLTTALVLIVIVQLIQTLGTRLARRLRRD

SEQ ID NO: 60231 - protein, 217 aa, Klebsiella pneumoniae
MNQTLLSSFGTAFERVEHALDALREGRGVMVLDDEDRENEGDMIFAAETMTVEQMALTIRHGSGIVCLCLTEERRKQLDLPMMVENNTSAYGTGFTVTIEAAEGVTTGVSAADRVTTVRAAIADGAKPSDLNRPGHVFPLRAQPGGVLTRGGHTEATIDLVTLAGFKPAGVLCELTNDDGTMARAPECIKFAQQHNMAVVTIEDLVAYRREHERKAS

SEQ ID NO: 60232 - protein, 104 aa, Klebsiella pneumoniae
MELEEQVMGIIINAGQSRSLCYEALHAAKAGDFATADAKMQEAAHYSREAHLVQTQLIEADEGEGKTKMTLVMVHAQDHLMTSILAKELIAELIAIYRAQPLHA

SEQ ID NO: 60233 - protein, 220 aa, Klebsiella pneumoniae
MMKKIIAVAAFLLCTTAAQAGIVMGGTRVIYQEGKREAAISVTNADTHTPYLVQSWVENYAENDKARVPFIVTPPLFRLDPEQNNVLRINFIGASLPRDRESVFWLNVKSIAPTPQGEVNKLQVNIKSKFKIFYRPNDLAGDPAKAWQQLKFSQSGGRLTVINPTPYFVSFYAVEVGGQSIDDPGMVAPFGEKTWPVSGHGTVKWRAINDYGGVSDFAQQ

SEQ ID NO: 60234 - protein, 727 aa, Klebsiella pneumoniae
MSAISLIQPDRDLFSWPQYWAACFGPAPFLPMSREEMDQLGWDSCDIILVTGDAYVDHPSFGMAICGRMLEAQGFRVGIISQPDWNSKDDFMRLGKPNLFFGVTAGNMDSMINRYTADRKLRHDDAYTAGNVAGKRPDRATLVYTQRCKEAWKDVPVILGGIEASLRRTAHYDYWSDTVRRSVLVDSKADMLMFGNGERPLVEVAHRLAMGETIDQIRDVRNTAIMVKEALPGWSGVDSTRLDTPGKIDPIPHPYGEDLPCADNKPVAPKKQEAKSITVQPPRPKPWEKTYVLLPSFEKVKGDKVLYAHASRILHHETNPGCARALMQKHGERYIWINPPAIPLSTEEMDSVFALPYKRVPHPSYGDARIPAYEMIRFSINIMRGCFGGCSFCSITEHEGRIIQSRSEDSIINEIEAIRDTVPGFTGVISDLGGPTANMYMLRCKSPRAEQTCRRLSCVYPDICPHMDTNHEPTINLYRRARELKGIKKILIASGVRYDIAVEDPRYIKELATHHVGGYLKIAPEHTEEGPLSKMMKPGMGSYDRFKELFDTYSKQAGKEQYLIPYFISAHPGTRDEDMVNLALWLKKHRFRLDQVQNFYPSPLANSTTMYYTGKNPLGKIGYKSEEVVVPKGDKQRRLHKALLRYHDPANWPLIRQALEAMGKKHLIGSRRDCLVPAPTLDEMREARRQNRHTRPALTKHTPIAHQRQTPAAAGAKKRVKPKAVSR

SEQ ID NO: 60235 - protein, 667 aa, Klebsiella pneumoniae
MMDALLNLTAQMAREGIRRLLVLSGDESWTLQQAQALRERLGGDGLWVGPEPVSAPCVAPGALKTLLGREVMHAFFDARRGFDVAAMAALSGTLRAGSWLVLLTPPFADWPTRADEDSLRWSDTPDPIVTPNFVHRCCRQFIADPEVLLWRQSDRPRFPLAAPRPDWHPADGRPQAEQAAILEQLIRLPPGIAAVTAERGRGKSALAGMLLRQLGGEAIVTAPTRSAVEVLASFAGETLRFMAPDALLASKEKAAWLIVDEAAAIPAPLLRQLVSRFPRTLLTTTVQGYEGTGRGFLLKFCASLPHLQSFTLNAPIRWAAGCPLESAIGQLLIFNDEAFRDAPMGELALEAVNQSCWQTQPALPEAMYQLLSGAHYRTSPLDLRRMMDAPGQAFRCARAGGAVAGALWLVAEGGLSRELSRAVWAGFRRPRGNLVAQSLAAHGGSPLAATLRGLRVSRIAVHPTRQREGLGRKMIADIAADAAGYDYLSVSFGYTAELWRFWQRCGFTLVRLGTHREASSGCYTAMALYPLTAAGRQLAQREAQRLQRDEYWLRPWREESAPLPAVADAMLSDEDWLEAASFAFAHRPLAAALGCLNRLLMQADMPLPALRGRLQGKEEAALCAVLQLTGRKALQARWRREAADALRFLDAARAEALRQQVAHLQFF

SEQ ID NO: 60236 - protein, 416 aa, Klebsiella pneumoniae
MSRTTTVDTVPAGEVSVAGASRPDPFIKRGTPQFMRVTLALFSAGLATFALLYCVQPILPVLSNEFGVSPASSSISLSISTAMLAVGLLFTGPLSDAIGRKPVMVTALLLAACCSLLSTMMTSWHGILIMRALIGLSLSGVAAVGMTYLSEEIHPSFVAFSMGLYISGNSIGGMSGRLLTGVFTDFFGWRVALAAISGFALAAAIMFWRILPESRHFRPTSLRPKTLLINFRLHWRDRGLPLLFVEGFLLMGAFVTLFNYIGYRLMMSPWSLSQAVVGLLSVAYLTGTWSSPKAGAMTVRFGRGPVMLGFTAVMLCGLLLTLFSSLWLIFIGMLLFSAGFFAAHSVASSWIGPRARRARGQASSLYLFSYYLGSSLAGTLGGVFWHHYGWNGVGGFIALLLLAALLTGTCLHQRLK

SEQ ID NO: 60237 - protein, 294 aa, Klebsiella pneumoniae
MIMTQHDQLHRYLFENYAVRGELVTVSETLEQILANHTYPQPVKTVLAELLVATSLLTATLKFAGDITVQLQGDGPLQLAVINGNNQQQLRGVARVQGEIADDADLKTMVGNGYLVITISPEEGERYQGVVGLEGDTLAACLEDYFQRSEQLPTRLIIRTGDHEGQPMAGGMLLQVMPAQDAQTADFEHLATLTETIKAEELFTLPANDVLWRLYHEEEVTVYDPQSVEFKCTCSRERCAGALKTLPDEEIDSILADEGEIDMHCDYCGNHYIFNAMDIAEIRNNASPADPQVH

SEQ ID NO: 60238 - protein, 283 aa, Klebsiella pneumoniae
MKAMNTLQSTNWLQYGIKDIKHLKHANMHDPLIPFEPVFSPQGPTLLVAVRQSEVIRETPRHHHSCGQLIGAIRGLLTVDGGDCRWVVPATHAVWIPPGVPHGLRSHGPYSGWSVYVSAKACGELPDKPSVLSMTNLLREAITRAAAWQGVELTASQKRLAGVILDEIGSLPRVNLGLPMPQDSRLLRIAQALSANPDDGRRLEEWAAWAGMSSRTLTRRFRAETGFSFNEWRQRIRLLRALELLAAGKPVTAIALDLGYDNVSAFIALFRRMFGTTPGRYKI

SEQ ID NO: 60239 - protein, 426 aa, Klebsiella pneumoniae
MNTYSVSRLALALAFGVTLSACSSTPADQQPSTQTAPGTTARPILNAEEAKNFTPAAYFQSLAPNAAAWTPSAISLPAQPDFIVGPAGTQGVTHTTIQAAVDAAIARHSNRRLYIAIMPGEYPGTVYVPAAPGALTLYGTGDKPIDVKITRSIDSRDDRNTWRRLVNPGGKYMPGKPAWYMFDSCQAIRGDRRVMCSAVFWSQNNGLQLQNLTIANNLGDSVDADTHQAVALRSDGDQVQINKVNILGRQNTFFVTNSGVQNRLQDNRQTRTLVTNSYIEGDVDIVSGRGAGGVDNTDFRVVNSRTQKEAYVFAPATLKSVTYGFLATNSRFTASGDNVAQLGRALDVDGNSNGQVVIRDSAINEGFNIAQPWAAAVGSGRPFSGNTGSADDKGNLQRNLNDNGFNRMWEYNNRGVGSTVVAEPKQ

SEQ ID NO: 60240 - protein, 259 aa, Klebsiella pneumoniae
MNQVAVVIGGGQTLGEFLCRGLAAEGYRVAVVDIQSEKASRVAQEINAEYGEGMAYGFGADATSEASVTALAHGVDEIFSRVDLLVYSAGIAKAAFISDFALGDFDRSLQVNLVGYFLCAREFSRLMIRDGIKGRIIQINSKSGKVGSKHNSGYSAAKFGGVGLTQSLALDLAEYGITVHSLMLGNLLKSPMFQSLLPQYATKLGIDESEVEQYYIDKVPLKRGCEYQDVLNVLMFYASPQASYCTGQSINVTGGQVMF

SEQ ID NO: 60241 - protein, 140 aa, Klebsiella pneumoniae
MLKTISPLISPELLKVLAEMGHGDEIIFSDAHFPAHSMGPQVIRADGLRVSDLLQAIIPLFELDSYAPPVVMMAAVEGDALDPTVEQRYRQALSAQAPCPDIVRIDRFAFYDRAQKAFAIVITGECAKYGNILLKKGVTP

SEQ ID NO: 60242 - protein, 77 aa, Klebsiella pneumoniae
MNPTIKTAINIVGSQKKLGEACDVSQQAVYKWLHNKAKVSPEHVNSIVNATNGEVQAHQIRPDLPKLFPSPKGVPAA

SEQ ID NO: 60243 - protein, 447 aa, Klebsiella pneumoniae
MDQTCTLEGFLTRVQQRDPHQTEFAQAVREVMTTLWPFLEENPRYRQLALLERLVEPERVIQFRVVWVDDRNQVQVNRAWRVQFNSAIGPYKGGMRFHPSVNLSILKFLGFEQTFKNALTTLPMGGGKGGSDFDPKGKSDGEVMRFCQALMTELYRHLGPDTDVPAGDIGVGGREVGFMAGMMRKLSNNSACVFTGKGLSFGGSLIRPEATGYGLIYFTEAMLKRHGLGFEGARVAVSGSGNVAQYAIEKAMELGARVVTASDSNGTVVDEAGFTKEKLARLIDIKERAHGRVADYAREFGLTYLEGQQPWSVPVDIALPCATQNELDVDAARQLIANGVKAVAEGANMPTTIAATDLFLEAGVLFAPGKAANAGGVATSGLEMAQNAARMGWKAEKVDARLHHIMLDIHHACVQYGGEAKQTNYVRGANIAGFVKVADAMLAQGVI

SEQ ID NO: 60244 - protein, 447 aa, Klebsiella pneumoniae
MSANHAAFNLIFRFVENYISPIAGRISSQRHVMAIRDGFISAMPFMIVGSFLLVFAYPPFSPDTTWGFARAWLELAKEFEGRILTPFDMTMGIMSIYICAAISYNLGKHYEKSNQLDPFMCAMLSIMAFLLIAAPKTNGTLPVDSLGGTGIFTAILVAIYCVEMMRFLKAHNIGIRLPDQVPPMIKNSFDLLIPVLVVVLTLYPLSLFIQHHFDMLIPQAIMAIFKPLVSAADSLPAILLAVLIGHLLWFAGIHGAAIVSGMLQMFWLTNLGMNQQALAQGAPLPHIFMEAFWTFFIVVGGSGATMGLVFCYLRSRSAHLRSIGRLSVVPSLFNINEPVIFGTPIVMNPVFFIPFLLAPMVNAVLAWAAMKLDLIGRVISVVPWTAPAPIGGAWALGWDFRAAILVIVLACVSAIIYFPFFKVYEKQLLAQEAEEAERAEQESQQTA

SEQ ID NO: 60245 - protein, 776 aa, Klebsiella pneumoniae
MMNDSLCRIIAGELQARAEQVEAAVRLLDEGNTVPFIARYRKEVTGGLDDTQLRNLETRLGYLRELEDRRQAILKSIAEQGKLTDALEKAINTTLSKTELEDLYLPYKPKRRTRGQIAIEAGLEPLADLLWNEPAHDPEAEAAKYIDADKGVADSKAALDGARYILMERFAEDAALLAKVRDYLWKNAHLVSTVVSGKEEEGAKFRDYFDHHEPIATVPSHRALAMFRGRNEGVLQLSLNADPQFDEPPKESHGEQIIIDHLGLRLNNAPADSWRKGVVSWTWRIKVLMHLETELMGTVRERAEDEAINVFARNLHDLLMAAPAGLRATMGLDPGLRTGVKVAVVDATGKLVATDTIYPHTGQAAKAAVAVAALCEKYNVELVAIGNGTASRETERFFLDVQKQFPKVTAQKVIVSEAGASVYSASELAAQEFPDLDVSLRGAVSIARRLQDPLAELVKIDPKSIGVGQYQHDVSQTQLARKLDAVVEDCVNAVGVDLNTASVPLLTRVAGLTRMMAQNIVAWRDENGQFQNRQQLLKVSRLGPKAFEQCAGFLRINHGDNPLDASTVHPEAYPVVERILAATQQALKDLMGNSSALRHLKAVDFTDEKFGVPTVTDIIKELEKPGRDPRPEFKTAKFADGVETMNDLLPGMILEGAVTNVTNFGAFVDIGVHQDGLVHISSLSDRFVEDPHTVVKAGDIVKVKVMEVDLPRKRIALTMRLDEQPGDSNARRGGGQERPQGNRPAAKAAKPRGREAQPAGNSAMMDALAAAMGKKR

SEQ ID NO: 60246 - protein, 617 aa, Klebsiella pneumoniae
MPLEYPHYPCAGVVMSSNAQVRRRAVQAARGESPFDLLLIDAQIVDMATGEIRPADVGIVGEMIASVHPRGSREDAHEVRSLAGGYLSPGLMDTHVHLESSHLPPERYAEIVLTQGTTAVFWDPHELANVLGVAGVRYAVDASRHLPLQVMVAAPSSVPSTPGLEMSGADFAGEEMETMLGWPEVRGVAEVMDMHGVLHGSERMQEIVQAGLNSGKLIEGHARGLSGADLQAYLAAGVTSDHELTSADDALEKLRAGLTIEIRGSHPYLLPDIVAALKTLPHLSSQITVCTDDVPPDMLLEKGGIIALLNLLIEHGLPAVDALRFATLNAAIRLQRHDLGLIAAGRRADLVVFDSLEKLVAREVYVGGKLLARAGNLLTPIAPAAGVTPPRDTLQIAPLRADDFILRVQGIRHGIARLRHIRGARFTQWGEVEVQVRDGKVQLPAGFSLIWVKHRHGRHQATPQIALLEGWGELRGAIATSYSHDSHNLVVLGRDANDMALAANQLIASGGGMALAQQGEILAHVAMPIAGMLSDLPAAELARQFRELRDLSSQVADWEPPYRVFKAIEGTCLACNAGPHLTDLGLTDGGSRQIVDPLIACREIPEPTDHNNNPQGA

SEQ ID NO: 60247 - protein, 402 aa, Klebsiella pneumoniae
LAVVIIAGAAYWFWHDRGTSGSGAPAAVARARSAPGGARPCAALAPTLAPVQAATCTDRAVPRYLTGLGTVTAANTVTVRSRVDGQLLSLHFQEGQQVKAGDLLAQIDPSQFKVALAQAQGQLAKDQATLANARRDLARYQQLVKTNLVSRQELDTQQSLVVESAGTVKADEAAVASAQLQLDWTRITAPIDGRVGLKQVDIGNQISSGDTTGIVVLTQTHPIDVVFTLPESSIATVVQAQKAGKTLSVEAWDRTNKQKISVGELLSLDNQIDATTGTIKLKARFSNLDDALFPNQFVNARLLVDTQQNAVVIPAAALQMGNEGHFVWVLNDENKVSKHSVTPGIQDSQKVVISAGLSAGDRVVTDGIDRLTEGAKVEVVTASSGEQAQPAPRQSGKHGARS

SEQ ID NO: 60248 - protein, 345 aa, Klebsiella pneumoniae
MTRTTFSRRRFLQLSGGLALAGVSLPLWAHDMADMAGGDAHPALRLPEPYKIKLAINKSAVCLAPVAVAEQQKIFSKYNLDVEFVNFGNSTDVLLEAIATGKADAGVGMALRWLKALEQGFDVKLTAGTHGGCLNLLTAKDSPFGGLESLKGQTIGVTDMAGPDKNFFAILLKRHGIDPISDVQWKVYPADLLSVALDKREIAAISGSEPFSYRLLETGKYQLIASNMTGDYANLSCCVLGVSGSLARDHKPAAAALTQAILEAHSYAAAHPESVAQSFLAHALNTSEAEVSGILHGQGHGHHAVGEAFVKELTQYAVDLQRVQVIKPGTDPHQFAESIYANVFA

SEQ ID NO: 60249 - protein, 455 aa, Klebsiella pneumoniae
MISVFDIFKIGIGPSSSHTVGPMKAGKQFTDDLIARGLLAEVSKVVVDVFGSLSLTGKGHHTDIAIIMGLAGNLPDTVDIDAIPGFIQDVNTHGRLMLANGQHEVDFPVDQCMNFHADNLSLHENGMRITALAGDKVLYSQTYYSIGGGFIVDEEHFGQTTEAPVAVPYPYKNAADLQRHCRETGLSLSGLMMQNELALHSKEALEQHFAAVWEVMSAGIERGITTEGVLPGKLRVPRRAAALRRMLVSQDTTNSDPMAVVDWINMFALAVNEENAAGGRVVTAPTNGACGIVPAVLAYYDKFIRKVNSNSLARYMLVASAIGSLYKMNASISGAEVGCQGEVGVACSMAAAGLAELLGGSPGQVCIAAEIAMEHNLGLTCDPVAGQVQVPCIERNAIAAVKAVNAARMALRRTSEPRVCLDKVIETMYETGKDMNAKYRETSRGGLAMKIVACD

SEQ ID NO: 60250 - protein, 100 aa, Klebsiella pneumoniae
MELTPREKDKLLLFTAALVAERRLARGLKLNYPESVALISAFIMEGARDGKSVASLMEEGRHVLTREQVMEGVPEMIPDIQVEATFPDGSKLVTVHNPII

SEQ ID NO: 60251 - protein, 298 aa, Klebsiella pneumoniae
MNLKQLYYFKRLSETEHYTEAASSLCITQPSLSHAISELEKELGVALFARQGRNVKITQNGKRFLPYVEDALASLENGRMILQKNGAENKENIRIAFIYTMGEYVVPQLINKYSLSPECHNVTFSFTQGTSLTLLQELKAGKVDLAICSYIADEPDIDFIPVIQQELVVVTAKDHPLARLYEHEVDLVETIHYPYIYFSENSGLRPFIDNVFMQQKLVPEIACYVDEDTAMAGLVSIDYGIAIMPRITALSYYNVHILKIKNTIPPRYIYLATMKDKGLSPALESFKNVVIHDSQKIC

SEQ ID NO: 60252 - protein, 341 aa, Klebsiella pneumoniae
  MISC_FEATURE (19)..(19): X=any amino acid
CHVTNSNVNNILLSGYQIXTSPLVSFTAVFLTSLTMEKNGLFSQRIRLRHLHTFVAVAQQGTLGRAAETLNLSQPALSKTLNELEQLTGTRLFERGRLGAQLTLVGEQFLTHAVKVLDALNSAGQALNRKEGLNNDIVRIGALPTAALGILPTVIGQFHKQQKDITLQVATMNNTMLLAGLKSGEIDIGIGRMSDPELMSGLHYELLFLESLKLVVRPGHPLLQETVTLSRVMEWPVVVSPKGTVPRQNAEALLQSQGCKMPAGCIETLSASLSRQLTVDFDYVWFVPSGAVKDDLRRGVLTALPITTQGAGEPIGILTRVDATLTPGTQTLLSAIRKSMP

SEQ ID NO: 60253 - protein, 181 aa, Klebsiella pneumoniae
MTAHRHNQYDNGSTNPGPTMDKDTVVTLLKYKRWIDLATLQAIRAIDGTVHGEKRHLTIRLMNHIHVVDMIFRANLRGRPHGYTALNTPETPTVDELETAMTACTDEYIQYVSAMTPADFHERIAFKFVDGGDGNMTAMEMLNHMLFHGAYHRGAVGWMIGECGGVPPKEVLTVFLRDHHS

SEQ ID NO: 60254 - protein, 479 aa, Klebsiella pneumoniae
MKVDWLFKNVTVIDGSGGPQYRADVAVKGDRIMAIAPALDVAAEQVIDGQGRVLAPGFIDVHTHDDINVIRMPEYLPKLSQGVTTVIVGNCGISAATATMRGEVPDPMNLLGEQQHFIYPTVEAYAHAVEAARPSLNVGTLIGHTALRNNHMDDLFRPANETEIAGMRVQLRDALRQGALGLSTGLAYASAFQSTTEEVMALAEELAAGKGVYTTHLRSEFEPILEALDEASRIGRHGNVPVVVSHHKCAGAKNWGRTKETLAFFDEMRQQQDIACDCYPYSASSSTLDMKQVTDEFDIVITWSEAQPEQAGKTLQQIADEWQVSLHDAAARLMPAGAIYHNMDEQDVRRVMRYPVTMIGSDGLPNDPMPHPRLWGAFPRVLGHYSRDEQLFPLTTAVHKMTGLSAARFQLADRGLVKIGYFADLVLFDPQTVRDVASFSDPKRPADGIEAVMVNGVMSYGSDKKITGRAGRFLRRRMD

SEQ ID NO: 60255 - protein, 270 aa, Klebsiella pneumoniae
MERRYKLMSALGVRNLAGYNEKIAEAARMGRPIPDPYWKPGDSMDAVHPVLEKLPYIVVLVDEFADLMMTVGKKVEELIARLAQKARAAGIHLVLATQRPSVDVITGLIKANIPTRIAFTVSSKIDSRTILDQGGAESLLGMGDMLYSGPNSTTPVRVHGAFVRDQEVHAVVQDWKARGRPQYVDGITSDSESEGGGGGFDGGEELDPLFDQAVNFVTEKRKASISGVQRQFRIGYNRAARIIEQMEAQGIVSEQGHNGNREVLAPPPFE

SEQ ID NO: 60256 - protein, 300 aa, Klebsiella pneumoniae
MKYIILLIIVIAVLYVHYRGRVRYRFWRQLSDHSTFTAPLNGFMYLFSRVPNTPYLRPEMFPELAILQQNWQVIRDEGLHLQQLEQIKAADKYNDAGFNSFFKTGWKRFYLKWYEDAHPSASQLCPQTTALLRDIPSVKAAMFATLPDGSRLPRHRDPYAGSLRFHLGLATPNDDRCFIEVDGQRYSWRDGEGVLFDETYIHYAENTSGENRLILFCDIERPMRYRWAQKVNHWLGRHLMSAASAPNDIGDRTGGINRAFRYIYQIRIVGKRLKKWNKTVYYIVKWLLFGGIAWLIWSAF

SEQ ID NO: 60257 - protein, 139 aa, Klebsiella pneumoniae
MKKVLALVVAAAMGLSSAAFAADAVSTTQAPAATHSTAAKTTHHKKHHKAAAKPAAEQKAQAAKKHKKAEAKPAAAQKAQAAKKHKKVAAKPAAPQKAQAAKKHHKAAAKPAAQKAQAAKKHHKTTKHQAAKPTAQPAA

SEQ ID NO: 60258 - protein, 436 aa, Klebsiella pneumoniae
QTMAMQLGGHVEGSNEREFGYAQVEVVNDSALVRGIEDSLTADGKPLLDVWMSHGDKVTAIPADFVTVASTDNCPFAIMANEEKRFYGVQFHPEVTHTRQGMRMLERFVRDICQCEALWTPAKIIDDAVERIRQQVGDDKVILGLSGGVDSSVTAMLLHRAIGKNLTCVFVDNGLLRLNEAQQVMEMFGDHFGLNIVHVEGEQRFLDALAGESDPEAKRKIIGRVFVEVFDEEALKLDDVKWLAQGTIYPDVIESAASATGKAHVIKSHHNVGGLPKEMKMGLVEPLRELFKDEVRKIGLELGLPYDMLYRHPFPGPGLGVRVLGEVKKEYCDLLRRADAIFIEELHKADLYNKVSQAFTVFLPVRSVGVMGDGRKYDWVVSLRAVETIDFMTAHWAHLPYDFLRRVSNRIINEVNGISRVVYDISGKPPATIEWE

SEQ ID NO: 60259 - protein, 159 aa, Klebsiella pneumoniae
MISLIAALAVDRVIGMENAMPWNLPADLAWFKRNTLNKPVVMGRLTWESIGRPLPGRKNIVISSKPGSDDRVQWVSSVEEAIAACGDVEEIMVIGGGRVYEQFLPKAQKLYLTHIDAEVEGDTHFPDYDPDEWESVFSEFHDADAQNSHSYCFEILERR

SEQ ID NO: 60260 - protein, 299 aa, Klebsiella pneumoniae
MLDNTRLRIAIQKSGRLSEDSRELLSRCGIKVNLHTQRLIALAENMPIDILRVRDDDIPGLVMDGVVDLGIIGENVLEEELLSRRAQGEDPRYFTLRRLDFGGCRLSLATPVDEAWNGPAALDGKRIATSYPHLLKRYLDQKGISFKSCLLNGSVEVAPRAGLADAICDLVSTGATLEANGLREVEVIYRSKACLIQRDGEMADAKQQLIDRLLTRIQGVIQARESKYIMMHAPTERLEEVVALLPGAERPTILPLAGDKQRVAMHMVSSETLFWETMEKLKALGASSILVLPIEKMME

SEQ ID NO: 60261 - protein, 98 aa, Klebsiella pneumoniae
QVGELAKRAGLTVRTLHHYEQTGLLTPSARSEAGYRLYNLSAVQRLHMIKALAQAGLTLATIKDYLDRQTLSLPELLTQQIDMLNAQLRDVGRLRDRL

SEQ ID NO: 60262 - protein, 30 aa, Klebsiella pneumoniae
MSENANAIVIQYQGKPYVQLNGGSWVPYPQ

SEQ ID NO: 60263 - protein, 155 aa, Klebsiella pneumoniae
MDIRKIKKLIELVEESGISELEISEGEESVRISRSAPAASYPVMQQAYAAPMMQPQAPAAATAAPAAAAEAPAKAEISGHIVRSPMVGTFYRTPSPDAKAFVEVGQKVNVGDTLCIVEAMKMMNQIEADKSGVVKAILIESGQPVEFDEPLVVIE

SEQ ID NO: 60264 - protein, 66 aa, Klebsiella pneumoniae
MLPLVSNHRTRIFEAIMAGEPEQAREASHRHLAFIEEILLDRSREQSRRERSLRRLQQRKDENSGS

SEQ ID NO: 60265 - protein, 575 aa, Klebsiella pneumoniae
MVEMADEVVSPSQYLIDWMLSKHWNVPEERHVILNCEPFQGFVTRDDVTVKINEKPASGVELVFFGRLETRKGLDIFLRALRKLSDEDKESISGVTFLGKNVTMGKTDSFTYIMNQTKNLGLAVNVISDYDRTNANEYIKRKNVLVIIPSLVENSPYTVYECLINNVNFLASNVGGIPELIPQEHHAEVLFIPTPVDLYGKIHYRLKNINIKPGLAESQDNIKEAWFAAVERKNNRAFKKINEANSPLVSVCITHFERHHLLQQALASIKSQTYQNIEVILVDDGSTTEDSHRYLNLIENDFNSRGWKIVRSSNNYLGAARNLAARHASGEYLMFMDDDNVAKPFEVETFVTAALNSGADVLTTPSDLIFGEEFPSPFRKMTHCWLPLGPDLNIASFSNCFGDANALIRKEVFEKVGGFTEDYGLGHEDWEFFAKISLQGYKLQIVPEPLFWYRVANSGMLLSGNKSKNNYRSFRPFMDENVKYNYAMGLIPSYLEKIQELESEVNRLRSINGGHSVSNELQLLNNKVDGLISQQRDGWAHDRFNALYEAIHVQGAKRGTSLVRRVARKVKSMLK

SEQ ID NO: 60266 - protein, 139 aa, Klebsiella pneumoniae
MKPAARRRARECAVQALYSWQLSHNDIADVEYQFLAEQDVKDVDVLYFRELLSGVATNSAYLDGLMKPYLSRQLEELGQVEKAVLRIALFELSKRDDVPYKVAINEAIELAKTFGAEDSHKFVNGVLDKAAPVIRPHKK

SEQ ID NO: 60267 - protein, 401 aa, Klebsiella pneumoniae
MSGSMTREDFDAYLVPCFAPAPFIPVRAAGSRVWDQQGKEYIDMAGGIAVNALGHAHPALAQALQDQLAKLWHIGNGYTNEPVLQLAKTLVQSTFADKVFFCNSGAEANEAALKLARKYAHDKFGGEKSEIIAFNHAFHGRTLFTVSVGGQPKYSSDYAPLPQGITHLPYNDIEAVTAAISSRTCAVIVEPIIGEGGVIPADPAFLQALRTLCDRHHATLIFDEVQTGAGRTGHLYAYQHYNVVPDILTSAKGLGGGFPIGAMLAKEAWAQVFQPGTHGTTFGGNPLAATVANAVLAHLDAPLLAGVGERHALIVDQLNAISARYDAFSAVRGTGLLIGAELAGPLRGKAKTLTNLAAEEGLIALIAGPDVLRFAPALNIPLADIAEAFVRLDRAVARLTR

SEQ ID NO: 60268 - protein, 434 aa, Klebsiella pneumoniae
MDSTISVQPGEAPDSLHRARRAAWGSFAGAVVDWYDFLLYGITAALVFNREFFPQIGPAMGTLAAFATFGVGFLFRPLGGIIFGHFGDRLGRKRMLMMTVWMMGIATACIGLLPSFNQIGWWAPVLLVFLRAVQGFAVGGEWGGAALLSVENAPQGKKAFYSSGVQVGYGVGLLLSTGLVSLISSLTSDQQFLSWGWRVPFLFSVVLVLIALWIRNGMAESQEFEAQQSLDNAPQMKKRLPVVEALLRHPGAFLLIIALRLCELLTMYIVTAFALNYSTQNLGLPRELFLNIGLLVGGLSCLTIPCFAWLADRFGRRRIYITGALIGTLSGFPFFMALESQSVFWILFFALMLANIAHDMVVCVQQPMFTELFGASYRYSGAGVGYQVASVVGGGFTPFIAAALVTFSGGSWHSVALYLTAGCLLSALTALLMK

SEQ ID NO: 60269 - protein, 450 aa, Klebsiella pneumoniae
MSKHYDYLAIGGGSGGIASINRAAMYGQKCALIEAKELGGTCVNVGCVPKKVMWHAAQIREAIHLYGPDYGFDTTINHFDWEKLVASRSAYIDRIHTSYDNVLGKNKVDVIKGFARFVDAHTVEVNGEIITADHILIATGGRPSHPDIPGVEYGIDSDGFFELPALPKRVAVVGAGYIAVELAGVINGLGAETHLFVRKHAPLRSFDPLIVETLVEVMNAEGPQLHTNAIPKAVVKNADGSLTLELEDGRSQTVDCLIWAIGREPATDNFNLAATGVKTNDKGYIIVDKFQNTNVPGIYAVGDNTGAVELTPVAVAAGRRLSERLFNNKPEEHLDYSNIPTVVFSHPPIGTVGLTEPQAREQYGDDAVKVYKSSFTAMYTAVTSHRQPCRMKLVCVGPEEKIVGIHGIGFGMDEMLQGFAVALKMGATKKDFDNTVAIHPTAAEEFVTMR

SEQ ID NO: 60270 - protein, 860 aa, Klebsiella pneumoniae
IKLNGKTPVKFVKYLLILAVCCVLLGAGSIFGLYKYIEPQLPDVATLKDVRLQIPMQVYSADGELIAQYGEKRRIPVTLQQIPLELVKAFIATEDSRFYEHHGVDPVGIFRAASVAMFSGHASQGASTITQQLARNFFLSPEKTLMRKIKEAFLAIRIEQLLNKDEILELYLNKIYLGYRAYGVGAAAQVYFGKPIDQLTLSEMAVIAGLPKAPSTFNPLYSMDRATARRNVVLSRMLSEGYITQAQYDEARSEPIDASYHAPKIAFSAPYLSEMVRQEMVNRYGEQAYEDGYRVYTTITRKNQQAAQQAVRNNVLDYDMRHGYRGPASVLWKVGETPWETKKIVDSLKRQSGYGPLFPAVVTSANAQEAVALLANGDSVSLTMEGVRWARRFISDTQQGATPRKVNDVVQAGQQIWVRKVGDSWWLSQLPDVNSALVSINPQNGAIIALVGGFDFNQSKFNRATQALRQVGSNIKPFLYTAAMDKGLTLASMLNDVPISRWDAGAGSDWRPKNSPPQYAGPIRLRQGLGQSKNVVMVRAMRAMGVDYAAEYLQRFGFPAQNIVHTESLALGSASFTPLQVARGYSVMANGGFLVNPFFISKIENDQGGVLFEERPKIACPQCDLPVIYGDTPKSNVLENKDVEDVATSAEPQNGNVPPQPQLEQANQSLVAQSGAQEYAPHVINTPLAFLIKSALNSNIFGEPGWMGTGWRAGRDLQRHDIGGKTGTTNSSKDAWFSGYGPGVVTSVWIGFDDHRRDLGRTTASGAIKDQISGYEGGAKSAQPAWDSFMKSVLEGVPEEPLTPPPGIVTVNIDRSTGQLANGGNSRAEYFIEGTQPTQQAVREVGTTLTDGGGETHELF

SEQ ID NO: 60271 - protein, 313 aa, Klebsiella pneumoniae
MLDKVLKIATRQSPLALWQAQYVKARLEQAHPGLKVELVPMVTRGDVILDTPLAKVGGKGLFVKELELAMLEGRADIAVHSMKDVPVEFPEGLGLVTICERDDPRDAFVSNRYASIDELPAGSVVGTSSLRRQCQLAATRPDLAIRSLRGNVGTRLSKLDNGEYDAIILAAAGLKRLQLEARIRQPLSPEQSLPAVGQGAVGIECRLDDAWTRGLLAPLNHTETAVRVLAERAMNTRLEGGCQVPIGSYAELKDGELWLRALVGAPDGSQLVRGERRGPAEQAEALGISLAEELLDNGAREILAAVYDGEAPR

SEQ ID NO: 60272 - protein, 765 aa, Klebsiella pneumoniae
MKWLCTVGVAVSLALQPALADELFGNHPLTPQARDAFVTDLLKKMTVDEKIGQLRLISVGPDNPKEAIREMIKNGQVGAIFNTVTRPDIRVMQDQVMQLSRLKIPLFFAYDVLHGQRTVFPISLGLASSFNLDAVKTVGRVSAYEAADDGLNMTWAPMVDVSRDPRWGRASEGFGEDTYLTTMMGQAMVESMQGKSPADRYSVMTSVKHFAAYGAVEGGKEYNTVDMSPQRLFNDYMPPYKAGLDAGSGAVMVALNSLNGTPATSDSWLLKDVLRDQWGFKGITVSDHGAIKELIKHGVASDPEDAVRVALKSGINMSMSDEYYSKYLPGLVKSGKVTMAELDDATRHVLNVKYDMGLFNDPYSHLGPKDSDPQDTNAESRLHRKEAREVARESLVLLKNRLDTLPLKKSGTIAVVGALADSKRDMMGSWSAAGVADQSVTVLTGIKEALGDNGKVIYAKGANVTDDKGIVDFLNLYENAVQVDPRSPQEMIDEAVAAAKQSDVVVAVVGEAQGMAHEASSRTDITLPQSQRNLIAALKATGKPLVLVLMNGRPLALVKEDQQADALLETWFAGTEGGHAIADVLFGDYNPSGKLPMSFPRSVGQIPTYYSHLNTGRPYNPEKPNKYTSRYFDEANGPLYPFGYGLSYTTFSVSDVNMSSATMPRDGSVTASVQVTNTGNREGATVIQLYLQDVTASMSRPVKMLRGFKKVTLKPGETQTVSFPIDVDALKFWNQQMKYVAEPGKFNVFIGVDSARVKQSEFELL

SEQ ID NO: 60273 - protein, 257 aa, Klebsiella pneumoniae
MPELLNPAPVAHLRHLLRAHSPLVHCMTNDVVQTFTANVLLAVGASPAMVIDPREAAQFAAIADALLINVGTLTEDRAVAMRAAVEHARQAGKPWTLDPVAVGALTVRTAFCHELLALQPAAIRGNASEILALAGMSAGGRGVDTTDTAAAALPAAQALARRLATVVAVTGEVDYVTDGERVLSVAGGNPLMTRVVGTGCALSAVVAASAALPGDRLENVAAACGLMKQAGEIAARQGGPGSFIPAFLDALYQEVQG

SEQ ID NO: 60274 - protein, 313 aa, Klebsiella pneumoniae
MLDWTDRHCRYFLRLLSRHTLLYTEMVTTGAIIHGKGDYLAYSEEEHPVALQLGGSDPQALAQCAKLAEARGYDEINLNVGCPSDRVQNGMFGACLMGNAPLVADCIKAMRDVVSIPVTVKTRIGIDDQDSYEFLCDFIETVSGKGECEMFIIHARKAWLSGLSPKENREIPPLDYPRVWQLKRDFPHLTMAINGGIKSLDEARVQLEHMDGVMVGREAYQNPGILASVDREIFGVAGADADPVAVVRAMYPYIERELSKGTYLGHITRHMLGLFQGIPGARQWRRYLSENAHKAGADIAVLEHALKLVADKR

SEQ ID NO: 60275 - protein, 322 aa, Klebsiella pneumoniae
MKTLLKNRELSAFFAIVALFVVLVALNPAYFSLQTLAMIFSSSQILCLLALGATLVMLTRNIDVSVGSTVGLCAIAVGVALNNGYGLATAIAFALAIGALAGAFNGLLVVGLRIPAIVATLGTLGLYRGVMLLWTGGKWIEGLPDSLKSLSEPAFIGVSPLGWLVLALLLAGGWLLSRTAFGRDFYAAGDNLAAARQLGVAVNRTRMLAFTLNGMLAACAGIVFAAQIGFVPNQTGSGLEMKAIAACVLGGISLLGGTGTLLGAFLGAFFLTQIDTVLVLFRLPAWWNDFIAGLVLLGVLVLDGRLRQALARHQRALKYSRF

SEQ ID NO: 60276 - protein, 507 aa, Klebsiella pneumoniae
MAKEKKRGFFSWLGLGQKEQAQETETEQKVEEQQAVAEEIPAVETPAEPSAPKADPEAFAEDVVEVTETVVESEKAHLAEPASAQEEEWVETPVLTEETPVVEPEPAVSEPPEQPAVVEPLAEEVIAEPVVAEAVAEQPVEGIVVQPQETEAPEEDAPLSDEELEAQALAAEAAEEAAVVVPAPEDEAPLEALAQEQEKPTKEGFFARLKRSLLKTKQNLGSGFISLFRGKKIDDDLFEELEEQLLIADVGVETTRKIITNLTEGASRKQLRDAEALYGLLKEEMGEILAKVDEPLNVEGKTPFVILMVGVNGVGKTTTIGKLARQFEQQGKSVMLAAGDTFRAAAVEQLQVWGQRNNIPVIAQHTGADSASVIFDAIQAAKARHVDVLIADTAGRLQNKSHLMEELKKIVRVMKKLDVDAPHEVMLTIDASTGQNAISQAKLFHEAVGLTGITLTKLDGTAKGGVIFSVADQFGIPIRYIGVGERIEDLRPFNAGDFIEALFARED

SEQ ID NO: 60277 - protein, 477 aa, Klebsiella pneumoniae
MKVTLPEFERAGVLVVGDVMLDRYWYGPTSRISPEAPVPVVKVENIEERPGGAANVAMNIASLGATSRLVGLTGIDDAARALSQALANVNVKCDFVSVPTHPTITKLRVLSRNQQLIRLDFEEGFSGVDPQPMHERIQQALGSIGALVLSDYAKGALTSVQTMIRLAREAGVPVLIDPKGTDFERYRGATLLTPNLSEFEAVVGKCQDEAQIVERGMKLIAEFELSALLVTRSEQGMTLLQPGRPPLHMPTQAQEVYDVTGAGDTVIGVLAATLASGNTLEEACYFANAAAGVVVGKLGTSTVSPVELENAVRGRAETGFGVMSEEELKQAVAAARKRGEKVVMTNGVFDILHAGHVSYLANARKLGDRLIVAVNSDASTKRLKGETRPVNPLEQRMIVLGALEAVDWVVSFEEDTPQRLIAGILPDLLVKGGDYKPEQIAGSEEVWANGGEVLVLNFEDGCSTTNIIKKIQKDSDK

SEQ ID NO: 60278 - protein, 174 aa, Klebsiella pneumoniae
MASRGVNKVILVGNLGQDPEVRYMPSGGAVANFTLATSESWRDKQTGEMKEQTEWHRVVLFGKLAEVAGEYLRKGSQVYIEGQLRTRKWTDQSGQDKYTTEVVVNVGGTMQMLGGRQGGGAPAGGGQQQGGWGQPQQPQGGNQFSGGAQSRPQQQAPAAPSNEPPMDFDDDIPF

SEQ ID NO: 60279 - protein, 304 aa, Klebsiella pneumoniae
MACVFNKQLLHPRNWLTWFGLGILWLIVQLPYPLLHFIGTSAGRLSRRFLKRREHIARRNIELCFPDMSPAARETLIDQNFMSLGMGLIETGMAWFWSDERVKKWFDVEGFANLNHALSGGKGVMVVGVHFMSLELGGRAMGLCRPMMATYRPHNSPLMEWVQTRGRLRSNKAMIDRNNLTGLVHALKSGEAVWFAPDQDYGPKGSVFAPFFSVPQAATTNGTYVLSRLSGAKMLSISMVRKLDRRGYSLHISEVMNDYPGEDKQIAAGYINKVIEREILRAPEQYLWVHRRFKTRPLGEPSVY

SEQ ID NO: 60280 - protein, 375 aa, Klebsiella pneumoniae
MTTHARVTLLSGLIISALLLTGCDNSDNQQPHAQAPQVTVHVVNSAPLSVTTELPGRTSAFRVAEVRPQVSGIILKRNFVEGSDVEAGQSLYQIDPATYQAAWNSAKGDEAKAEAAAAIAHLTVKRYVPLLGTKYISQQEYDQAVATARQADADVIATKAAVETARINLAYTKVTSPISGRIGKSSVTEGALVTNGQSDALATVQQLDPIYVDVTESSNDFMRLKQESLQRGGNTKSVELVMENGQAYPLKGSLQFSDVTVDESTGSITLRAIFPNPQHVLLPGMFVRARIDEGVDPQAILVPQQGVTRTPRGDASVMLVNDKNQVETREVVATQAVGDKWLITSGLKPGDKVIVSGLQKVRPGVTVKAEAERAA

SEQ ID NO: 60281 - protein, 324 aa, Klebsiella pneumoniae
MTDLITRPRRLRQSAALRALFEETTLSLNDLVLPIFVEEEIDDYKAIEAMPGVMRIPEKYLAREIERIANAGIRSVMTFGISHHTDATGSDTWNENGLVARMSRICKSTVPEMIVMSDTCFCEYTSHGHCGVLCDHGVDNDATLENLGKQAVVAAAAGADFIAPSAAMDGQVQAIRRSLDAAGFTNTAIMSYSTKFASSFYGPFREAAGTALKGDRKTYQMSPMNRREAIRESLLDEAQGADCLMVKPAGAYLDILRDIRERSDLPLGAYQVSGEYAMIKFAAQAGAIDEEKVVLESLGAIKRAGADLIFSYFALDLAEKKILR

SEQ ID NO: 60282 - protein, 462 aa, Klebsiella pneumoniae
MYKTTLSGQVWRFDSLKTLMAKASPARSGDALAGIIATSAEERMAAKMALAEVPLTDILDNPLIPYEQDEVTRLILDTHDAQGFAALRHLTVGDFRDWLLDDATDTATLQRVARAITPEMAAAVSKLMRNQDLILAASKCQVVTRFRNTIGLPGHLSVRLQPNHPTDDLKGIAASMLDGLLYGAGDAVIGINPASDSLPVLAQLNVMLDDIIQRFAIPTQSCILTHVTNTLQLIERGAPVDLVFQSVAGTEAANSGFGINLAMLQEAREAALSLRRGTLGNNVMYFETGQGSCLSANAHHGVDQQTCEARAYAVARHFEPLLVNTVVGFIGPEYLYDGKQIIRAGLEDHFCGKLMGLPIGCDVCYTNHAEADQDDMDTLLTLLCAAGLTFLIGVPGADDIMLNYQSTSFHDALYARRLLGLKHAPEFADWLAKMQIIDPHGALRLTDARHPLLSVLPQGASV

SEQ ID NO: 60283 - protein, 774 aa, Klebsiella pneumoniae
MRVLPRVKRRWRWLAAFIFLLWLAVLAADRLWPLPLHDVTPARVVVAEDGTPLWRFADAQGVWRYPVTLADVSPRYLQALIQYEDRWFWRHPGVNPFAVLRAAWQDLTSGRVISGGSTLTMQVARLLDPHPRTFGGKLRQLWRALQLEWHLSKSDILTLYLNRAPFGGTLQGIGAASWTYLGKPPARLSYGEAALLAVLPQAPSRLRPDRWPQRAQAARDKVLTRMVSQGVWPEQAVKEAMEEPVWLFPRQMPQLAPLFSRRALATSRDEKVVTTLDAGLQRQLEDLALNWKSRLPPRSSLAMVVVDHTDMKVRGWVGSADITDDSRFGHIDMVSAVRSPGSVLKPFIYAMAMDEGLIHPASLLQDVPRRFSDYRPGNFDSGFHGPVSASEALVRSLNLPAVQVLEAYGPKRFAANLRNAGLPLTLPAGAEPNLSLILGGAGARLEDIVAAYSAFARHGKAARLRLKPSDPLTERALMSPGAAWIVRRILAGEAQPVPDASLPQAVPLAWKTGTSYGYRDAWAVGLNARYLIGIWTGRPDGTPVVGQFGFASAVPLLNQVNNLLLARPAMSRGGLPSDPRPATVSQGTICWPGGQDLPAGDSNCRRRLASWLLDASQPPTLLLPGQESVRGIRFPVWRNEHGERVAADCPGARESQVEVWPLPLDPWLPASERRRARLGPASESCPPLQTQDTAPLVLSGIRDGAVIKRLPGEARVMLPLQTSGGEGRRWWFINGDPLEAAGARTTLMLDKPGEWQLVVMDEAGQTAAASFTLQ

SEQ ID NO: 60284 - protein, 159 aa, Klebsiella pneumoniae
MTLVYIALGSNLASPLEQVQAAIRALGEIPHSRVVAVSSFYRTPPLGPQDQPNYLNAAVALETALPPETLLDHTQRIELQQGRVRKAERWGPRTLDLDIMLFGDAVINSERLTVPHYDMKNRGFMLWPLFEIAPDLHFPDGLALRAVLDNLGAEKPASW

SEQ ID NO: 60285 - protein, 179 aa, Klebsiella pneumoniae
  MISC_FEATURE (18)..(18): X=any amino acid
GSSAQNNMIKSAPLRGTXTRRKSMNIIEANVATPDARVAITIARFNNFINDSLLEGAIDALKRIGQVKDENITVVWVPGAYELPLAAGALAKTGKYDAVIALGTVIRGGTAHFEYVAGGASNGLAHVAQDSEIPVAFGVLTTESIEQAIERAGTKAGNKGAEAALTALEMINVLKAIKA

SEQ ID NO: 60286 - protein, 438 aa, Klebsiella pneumoniae
MPLVIVAIGVALLLLLMIRFKMNGFIALVLVALAVGLMQGMPLDKVIVSIKNGVGGTLGSLALIMGFGAMLGKLLADCGGAQRIATTLINKFGKKHIQWAVVLTGFTVGFALFYEVGFVLMLPLVFTIAASARIPLLYVGVPMAAALSVTHGFLPPHPGPTAIATIFHADMGKTLLYGTILAIPTVILAGPVFARFLKGIDKPIPEGLHNPKVFTEEEMPGFGVSVWTSLVPVILMAMRAVAEMILPKGHAFLPIAEFFGDPVMATLIAVLIALFTFGLNRGRSMEQINDTLTSSIKIIAMMLLIIGGGGAFKQVLVDSGMDKYIASIMHESNMSPLFMAWSIAAVLRIALGSATVAAITAGGIAAPLIATTGVSPELMVIAVGSGSVIFSHVNDPGFWLFKEYFNLTIGETIKSWSVLETIISVCGLVGCLLLGMVV

SEQ ID NO: 60287 - protein, 429 aa, Klebsiella pneumoniae
METTQTSTIVSGETRSGWRKTDTMWMLGLYGTAIGAGVLFLPINAGVGGMIPLIIMAILAFPMTFFAHRGMTRFVLSGKNPGEDITEVVEEHFGVGAGKLITLLYFFAIYPILLVYSVAITNTVETFMAHQLHMTPPPRAILSLILIVGMMTIVRFGEQMIVKAMSVLVFPFVIALMVLALYLIPQWNGAALETLSLSGASVTGNGLLMTLWLAIPVMVFSFNHSPIISSFAVAKREEYGEGAEKKCSSILARAHIMMVLTVMFFVFSCVLSLSPADLAAAKEQNISILSYLANHFNAPIIAWMAPIIAMIAITKSFLGHYLGAREGFNGMVIKSLRSKGKSIEINKLNKLTALFMLITTWIVATLNPSILGMIETLGGPIIAMILFLMPMYAIQKVPAMRKYSGHISNVFVVIMGLIAISAIFYSLFS

SEQ ID NO: 60288 - protein, 401 aa, Klebsiella pneumoniae
MRLLHTSDWHLGQNFYSKSRAAEHDAFLTWLLDRAQEHEVDAIIVAGDIFDTGSPPSYARELYNRFVVQLQQTGCRLVVLAGNHDSVAMLNESRDILAFLHTTVVANAGYAPIELPLRDGTPGAIFCPVPFLRPRELVTSQAGHSGREKQQQLLHAISDYYQEQYQQACALRGDRPLPIIASGHLTTVGASKSDAVRDIYIGTLDAFPAQHFPPADYIALGHIHRAQMVGGCEHIRYSGSPLPLSFDETGKAKSVHLVSFSEGRLSAVETLEVPVTQPLAVIKGDLAAITAQLEQWRGVEQDPPVWLDIEITTEDYLHDIQRHIQALTEDLPVEVLLVRRSREQREKILLNAQRETLSELKVEEVFERRLALTEIDEMKRARLHELFAHTVHTLTAEDENA

SEQ ID NO: 60289 - protein, 559 aa, Klebsiella pneumoniae
MTNKKTTAAPLPLWQYWRGLGGWNFYFLVKFALLWAGYLNFHPMLNLVFLAFLLVPIPREKLHRIRHWIAIPLGFALFWHDTWLPGPESIFSQGSQIAGFSASYIWDLIVRFINWSMVGAFFVLLVLWLFISQWLRVTVFVSAMVVWLAVSPLLPAFTLWPSGQPTTAAATTAQANTGANAAAGAASSPANSDIPPQTEPPTSANLTNWLNAFYAAEQKRKTPFPDQLPADAQPFDLLVINICSLSWSDIEAAGLMDHPLWKHFDIVFKNFNSATSYSGPAAVRLLRASCGQLSHTNLYQPSGADCYLFENLAKLGFNQQLMLGHNGLFGDFLKELRSLGGMQSPLMDQTGLPVSLQAFDGSPVYEDLAVLNRWLKTEEASSNPRNATFYNTLPLHDGNHFPGQSKTADYKVRAQKLFDDLDNFFTELEKSGRKVMVVVVPEHGGALKGDKMQVSGLRDIPSPSITNVPTAVKFFGMKAPHEGAPIIIDQPSSYLAVSELVVRALDGKMFSEDSVNWQQYVANLPQSAAVSENANAIVIQYQGKPYVQLNGGSWVPYPQ

SEQ ID NO: 60290 - protein, 653 aa, Klebsiella pneumoniae
MRLHNHRLELLSPARDAGIAREAILHGADAVYIGGPGFGARHNASNSLSDIAGLVPFAHRFGAKVFVTLNTILHDDELEPAQRLITDLYDAGVDALIVQDMGIMELDLPPIELHASTQCDIRSVEKAKFLSDAGFSQIVLARELNLSQIKAIYDHTDATIEFFIHGALCVAYSGQCYISHAQTGRSANRGDCSQACRLPYTLKDDQGRVVAYEKHLLSMKDNDQTANLAALIDAGVRSFKIEGRYKDMSYVKNITAHYRQMLDAIIEDRGDLARASAGRTEHFFIPSTDKTFHRGSTDYFVNARKGDIGAFDSPKFIGLPVGEVLKVGKDHLDVEVSEPLTNGDGLNVMIKREVVGFRANTVEKTGENRYRVWPNEMPADLHKVRPHQPLNRNLDHNWQQALLKTSSERRIAVDVTLSGWQEQLVLTMTCEDGVSVTHTLDGEFAEANQAEKALANLRDGVTKLGQTIYYAREVQVNLPPLFVPNSLLNQLRRETAEMLDEARLNAWQRGTRKPVSVPPPVYPETHLSFLANVYNHKARAFYQRYGVQLIDAAYEAHEEKGDVPVMITKHCLRFAFNLCPKQAKGSIKSWKATPMQLIHGDEVLTLKFDCRPCEMHVVGKIKNHILKMPHPGSIVASVSPDDLMKTLPKRKGA

SEQ ID NO: 60291 - protein, 266 aa, Klebsiella pneumoniae
MAKSLSFALAALLLLAPAWLLAAPRVITLSPANTELAFAAGITPVGVSSYSDYPSQAKTIEQVASWQGMNLERIVALKPDVVLAWRGGNAERQVNQLQSLGIHVLWVQTSTIEEIIATLRELAQWSPQPEKAQQAAQAMQQEYDALKARYANAPKKRVFLQFGSAPLFTSGPGSIQDQVLRLCGGENIFATSRVPWPQVSREQVLARQPQAIVVTGDASRIAEAQRFWQHQLTISLIALHSDWFERAGPRIILAAKQLCAALDQVK

SEQ ID NO: 60292 - protein, 258 aa, Klebsiella pneumoniae
MSDTKNELETLLEKAATEPAHRPAFFSALLEATVWVPGRAADGEQIVEDSALDLQHWEKDDGTSVIPFFTSLEALQQAVADEQAFVMMPARTLMAMTLGESLFLNPKLPSGKEFTPREISHLLGEEGSPLSTQTVLEGGEALLLSEVAEPPAQMVDSLTTLFKTLKTVKRAFLCSIKERADAPANLLIGIEAEGDIEAIIQTTGSVATDTLPGDEPIDICQVVEGEKGISHFMIAHITPFYEKRWGSFLRDFKQNRII

SEQ ID NO: 60293 - protein, 818 aa, Klebsiella pneumoniae
LDGLSCGHCVKRVKESLEQRPDVEQAEVTLTEAHVTGSASAQALIDTVKQAGYGAELSHPKAKPLAESSIPSEALTAATPELPAAHDEDDSQQLLINGMSCASCVSRVQNALAAVPGVSQARVNLAERTALVMGSASAAELVQAVEKAGYGAEAIEDDLQRRERQQETALATMKRFRWQAIVALLVGVPVMVWGMIGDNMMVSDDNRSLWLVIGLVTLAVMVFAGGHFYRSAWKSLKNGTATMDTLVALGTGVAWLYSMSVNLWPQWFPMEARHLYYEASAMIIGLINLGHMLEARARQRSSKALEKLLDLTPPSARVVTPEGEKDLPLAEVQAGMTLRLTTGDRVPVDGMISQGEAWFDEAMLTGEPVPQQKGDGDAIHAGTVVQDGSVLFTASAVGSQTTLARIIRMVRQAQSSKPEIGQLADKISAVFVPAVVVIALISAAIWYFFGPAPQIVYTLVIATTVLIIACPCALGLATPMSIISGVGRAAEYGVLVRDADALQRASELDTLVFDKTGTLTEGKPQVVAVKTFAGVDEHTALRLAAALEQGSSHPLARAILDKAADGPLPEVSGFRTLRGPGVSGEAEGHRLLLGNQALLNEQHINTAEVESEMTAQASRGATPVLLAVDGRAAALFAIRDPLREDSVDALARLHRQGYRLVMLTGDNPTTAKAIAKEAGIDEVIAGVLPDGKADAIKRLQSQGHKVAMVGDGINDAPALAQADVGIAMGGGSDVAIETAAITLMRHSLHGVADALAISKATLRNMKQNLLGAFVYNSLGIPIAAGILWPLTGTLLNPVVAGAAMALSSITVVSNANRL

SEQ ID NO: 60294 - protein, 91 aa, Klebsiella pneumoniae; identical to SEQ ID NO: 43000

SEQ ID NO: 60295 - protein, 436 aa, Klebsiella pneumoniae
MTVIPREQHAISRKDISENALKVMYRLNKAGYESWLVGGGVRDLLLGKKPKDFDVTTNATPDQVRKLFRNCRLVGRRFRLAHVMFGPEIIEVATFRGHHEGHTTDRVTSQRGQNGMLLRDNIFGSIEEDAQRRDFTINSLYYSVADFTVRDYVGGMKDLQDGVIRLIGNPETRYREDPVRMLRAVRFAAKLNMTISPETAEPLPRLAALLHDVPPARLFEEVLKLLQAGYGYQTYMLLREYSLFQPLFPTITRYFTERGDSPMERIISQVLKNTDTRIHNAMRVNPAFLFAVMFWYPLLETAQKIAQESGLAYYDAFALAMNDVLDEACRTLAIPKRITTLIRDIWQLQLRMSRRQGKRAWKLMEHPKFRAAYDLLELRAGAENNHELQRLTKWWGEFQVAAPPAQKDMLNDLGDDPAPRRRHRRPRKRAPRQGSA

SEQ ID NO: 60296 - protein, 110 aa, Klebsiella pneumoniae
MLPLRLRRPSFPIKEEGPAGIRRGLVLMRFFLWSKLQLNQRDRFLHRAKGHRIGRGRMAGEVDSFQLSGHFFTHFHRRNDVNDIEDLFDNQLAGNHIGNQLVVFGKMLRH

SEQ ID NO: 60297 - protein, 167 aa, Klebsiella pneumoniae; identical to SEQ ID NO: 56103

SEQ ID NO: 60298 - protein, 315 aa, Klebsiella pneumoniae
MIEFQGVSKVFAGHPAVKDLTLELREGAFSVLVGTSGSGKSTTLKMINRLLEPDRGTIRFAGEDIRQQPVLTLRRRMGYAIQSIGLFPHWTVAQNIATVPQLQRWPRARIADRIDELMALLGLEATLRDRYPHQLSGGQQQRVGVARALAADPEVLLMDEPFGALDPVTREALQQEMLRIHRLLGRTIVLVTHDIDEALRLADHLVLMDGGEVVQQGAPLEMLLRPKNSFVQTFFGRSELGVRLLSLREVGDYLRPDERLAGEGLTITMTLREALSQFVARRCETLPVVDAEGRPCGTLHFADLLRQEMSHEGAS

SEQ ID NO: 60299 - protein, 477 aa, Klebsiella pneumoniae
MAKITKEMIARILAHVGGAANVAQAGNCMTRLRLTLRDESLADSAAIRQIDGVMGVIVSDEQFQVVLGPGKAQTAAEMMNGLLEAAPAAAPTLADVAAEKKQALKGRQTSAVQKFLAKFATIFTPLIPGFIAVGLLLGFATLAEQVFVLENAHPNASLVALIGYMKVFSKGMFTFLSILIGYNAQKAFGGSGVNGAIIASLFVLGYNPEATSGFYAGISTFFGHGIDPRGNIIGVLIAAILGAWVERQVRRVMPANLDMILTSAVTLLIMGAVTFTVIMPIGGWLFTGMSWLFLHLNGNPFGSAVLAGLFLLAVMFGVHQGFVPVYFALVDAQGFNSLFPILAMAGAGQVGAALALFWRAKRDSLLRTQIKGAIIPGFLGIGEPLIYGVTLPRMKPFVTACLGGACGGFFVGLIAWLGLPVGLNTVFGPSGLVALPLMTSGSGIYAGMAVYAGGLAVSYLCGFVLTWLFGSKNVDLS

SEQ ID NO: 60300 - protein, 40 aa, Klebsiella pneumoniae
MAQCFSPCFAVGTPLHSWQLVSQGLSSTLELQLLEFYSVT

SEQ ID NO: 60301 - protein, 432 aa, Klebsiella pneumoniae
MAQEIELKFIVAQDGVETLREQLNALEAKHTPAGQLLNIYYETADNWLRRHDMGLRIRGDQGRYEMTLKIAGRVVGGLHQRPEYNIPLDKPELALERLPAEVWPQGELPAALAEHVQPLFSTDFARERWVIQEGKSEIEIALDRGEVKAGEHQEPICELELELLAGETTDLLRLAHRLLESGVLRQGSLSKAARGYHLAQGNNERPVTRLAVLPVAAKASVEQGLEAALESALAHWLNHDEIWLRGNAKAKAEILLAIARVRHALVLFGGIVPRKATTHLRALLNDADAVLLAADTADEALFRTEVVGAKLALTEWLVQRGWRPFLNEAGEKKIAGSFKRFADIHLSRVAAELRSAVQHLAVEDAADQLPKLSRDIDSVQLLAGAYGDAVAPWLENWQELQRAIEHDDRSVFEYFRRQALAAEPFWLHSGKR

SEQ ID NO: 60302 - protein, 249 aa, Klebsiella pneumoniae
MKAIKNKGQDKTMNETTRRFARLVDLSAVQATSTEADVRACAELAARYNIISVHVLPCWTRFLSTLLPQQGTGEVMIGGPVGFPGGGHTTDTKVQEVRQLIADGAREVDMVVNIGKVLSGDYDYVREDLRRVVEAAAPVPAKVILETHYLNEEQIRRVCEIAVEVGMKWVKTSTGWAPTGATVEKVSIIADQLKGRIDIKGAGGIRDLATVRALYQLGVRRFGMSHGAVTKVLAELEQHPERFPELNAD

SEQ ID NO: 60303 - protein, 418 aa, Klebsiella pneumoniae
MTFSLFGDKFTRHSGITRLMEDLNDGLRTPGAIMLGGGNPAQIPEMNDYFQQLLADMLDNGKALDALCNYDGPQGKSELLALLANMLRDELGWEIEPQNIALTNGSQSAFFYLFNLFAGRRADGTTRKVLFPLTPEYIGYADAGLEEDLFVATRPNIELLPEGQFKYHVDFEHLQVTEETGMICVSRPTNPTGNVITDEELIKLDALANQHGVPLVIDNAYGVPFPGIIFSDARPLWNPNIVLCMSLSKLGLPGSRCGIIIANEKIITAISNMNGIISLAPGGIGPAMMCEMIKRQDLLRLSETVIKPFYYQRVQETIAIIRRYLPEERCLIHKPEGAIFLWLWFKDLPISTELLYQRLKKRGVLMVPGDYFFPGLDKPWPHTHQCMRMNYVPDPQKIEAGVKILAEEVEFAWREQEA

SEQ ID NO: 60304 - protein, 359 aa, Klebsiella pneumoniae
MQAATVVINRRALRHNLQRLRELAPASKLVAVVKANAYGHGLLETARTLTDADAFGVARLEEALRLRAGGIAQPILLLEGFFAAEDLAVIAAQRLHTAVHSPEQLAALEQADLPEPVTVWMKLDTGMHRLGVRPEEAEAFYQRLSQCKNVRQPVNVVSHFARADEPTCGATERQLDIFTTFTEGKPGLRSIAASGGILLWPQSHYDWVRPGIILYGVSPLDDRSTGKDFGCQPVMTLTSSLIAVREHKAGEPVGYGGTWISERDTRLGVVAMGYGDGYPRAAPSGTPVLVNGREVPIVGRVAMDMICVDLGPQAQDKAGDAVVLWGEGLPVERIAEIAKVSAYELITRLTSRVAMKYLD

SEQ ID NO: 60305 - protein, 219 aa, Klebsiella pneumoniae
MYQHHNWQGALLDYPVSKVVCVGSNYAKHIKEMGSVTPEEPVLFIKPETALCDLRQPLVLPEGLGSVHHEVELAVLIGSTLRQATEEHVLKGIAGYGVALDLTLRDLQAKMKKAGQPWEKAKGFDNACPISGFIPAAEFHGDPQNTSLSLKINGEVRQQGTTADMIHRIVPLIAYMSRFFTLKAGDVILTGTPEGVGPLHSGDELEVGFNGLALTTRVL

SEQ ID NO: 60306 - protein, 660 aa, Klebsiella pneumoniae
MPTMKRLRKMLPALLILTPLLFSPAAAEEFSASFKGTDIQEFINTVSKNLNKTVIIDPSVRGTITVRSYDMLNEEQYYQFFLSVLDVYGFAVINMNNGVLKVVRAKDAKTSAVPVASAAAPGEGDEVVTRVVPLTNVAARDLAPLLRQLNDNAGAGSVVHYEPSNVLLMTGRAAVIKRLLTIVERVDNAGDRSVVTVPLSWASAAEVVKLVTELNKDTSKSALPGSMVANVVADERTNAVLVSGEPNSRQRIIAMIKQLDRQQAVQGNTKVIYLKYAKAADLVEVLTGISSSLQSDKQSARPVAAIDKNIIIKAHGQTNALIVTAAPDVMNDLERVIAQLDIRRPQVLVEAIIAEVQDADGLNLGIQWANKNAGMTQFTNSGLPISTAIAGANQYNKDGTISSSLASALGSFNGIAAGFYQGNWAMLLTALSSSTKNDILATPSIVTLDNMQATFNVGQEVPVLTGSQTTSGDNIFNTVERKTVGIKLKVKPQINEGDAVLLEIEQEVSSVADSASSTSSDLGATFNTRTVNNAVLVGSGETVVVGGLLDKTVTDTADKVPLLGDIPVIGALFRSDSKKVSKRNLMLFIRPTIIRDRDEYRQASSGQYTAFNNAQTKQRGKESSEASLSNDLLHIYPQQETQAFRQVSAAIDAFNLGGRP

SEQ ID NO: 60307 - protein, 261 aa, Klebsiella pneumoniae
MSRSTWYYNMNALKQGDRYAGLKENIRKIYHYHKGRYGYRRITLALRKQGLRINHKTVQRLMAELSLRSMIRAKKYRAWKGRTGEAAPNILSRNFGASKANEKWVTDVTEFPVQGKKLYLSSVLDLFNREVIAYSLSERPVMEMVNTMLDGAFPKLRPGDAPLLHSDQGWHYRMRSYQERLKAHGMTQSMSRKGNCLDNAVMENFFGTLKSECFYLREFRSVSALRKAVEDYIHYYNNERISLKLKGLSPVEYRTQALRAA

SEQ ID NO: 60308 - protein, 299 aa, Klebsiella pneumoniae
MFAFSRFLLYFTEVARQGSFRKASEALHVSASSIDRQILRVEQELAMPLFERHPTGLRLTAAGELLLHAANNWKKDFTRVCEQLDDLRGLRRGHVRIATIDAINRHFFSTMLKEVHKHYPNISFTLTTINNIHIQQALISGEADFGIMLNPQTSRELQVRAFAEMNMGIVVPTGHPLASRSAVRFCQCLDYPFILPSAPLMISEPVEALVNISGNEVKEVAVSNNIHMIRTLIKEQMGIGILCRLDILDEIESGQLAFVPLTDPQLKPFTLALCVSPARQLSLAASMMLNQLEILFSQL

SEQ ID NO: 60309 - protein, 449 aa, Klebsiella pneumoniae
MLDKIVIANRGEIALRILRACKELGIKTVAVHSTADRDLKHVLLADETVCIGPAPSVKSYLNIPAIISAAEITGAVAIHPGYGFLSENANFAEQVERSGFIFIGPKADTIRLMGDKVSAITAMKKAGVPTVPGSDGPLTDDMDANRAHAKRIGYPVIIKASGGGGGRGMRVVRSDAELAQSISMTKAEAKAAFNNDMVYMEKYLENPRHIEIQVLADGQGNAIYLAERDCSMQRRHQKVVEEAPAPGITPELRRYIGERCAKACVDIGYRGAGTFEFLFENGEFYFIEMNTRIQVEHPVTEMITGVDLIKEQLRIAAGQPLSIKQDEVVVRGHAVECRINAEDPNTFLPSPGKITRFHAPGGFGVRWESHIYAGYTVPPYYDSMIGKLICYGESRDVAIARMKNALQELIIDGIKTNVDLQMRIMSDENFQHGGTNIHYLEKKLGLQEK

SEQ ID NO: 60310 - protein, 581 aa, Klebsiella pneumoniae
MIKTTIWRQVVIAALLAGGSFTVAANPPPPPPVSYGVEEDVFHPVRARQGMVASVDALATRVGVDILRQGGNAVDAAVAVGYALAVTHPQAGNIGGGGFMMLRTKDGKTTAIDFREMAPEQATRDMFLDDQGNPDSKKSLTSHLASGTPGSVAGFSLALEKYGTMPLNKVIRPAIKLAEEGFIVNDALADDLKTYGSEVIPQHENSKAIFWKNGEPLKKGDRLVQKNLGKSLELIAEHGPDAFYKGAIADQIADEMKKHGGLITKADLAGYKAVERTPVSGEYRGYEVYSMPPPSSGGIHIVQILNILENFDMQKYGFGSADAMQVMAEAEKHAYADRSEYLGDPDFVNVPWQALTSKAYAKAIAAEIDVNKAKPSSQIRPGKLAPYESNQTTHFSVVDKDGNAVAVTYTLNTTFGTGIVAGNSGILLNNQMDDFSAKPGVPNVYGLVGGDANAVEPKKRPLSSMSPTIVVKDGKTWLVTGSPGGSRIITTVLQMVVNTIDFGMNVAEATNAPRFHHQWLPDELRVEKGFSPDTLKLLEAKGQKVALKEAMGSTQSIMVGPDGMLYGASDPRSPDDLTAGY

SEQ ID NO: 60311 - protein, 242 aa, Klebsiella pneumoniae
MSVYNEIRQLLPNLHYIYAFDNVAFPYGEKSEEFIVERVVEIVTAVQQRYPLALAVIACNTASTVSLPALREKFAFPVVGVVPAIKPAARLTANGIVGLLATRGTVKRPYTRELIDRFANECRIEMLGSAELVELAEAKLHGEPVPLEELRRILRPWLRMQEPPDTVVLGCTHFPLLQEELQRVLPEGTRLIDSGAAIARRTAWLLEHEAPDAKSSDENKAFCMALTAETEQLLPVLRRYGF

SEQ ID NO: 60312 - protein, 387 aa, Klebsiella pneumoniae
MEQVVIVDAIRTPMGRSKGGAFRHVRAEDLSAHLMRSLLSRNPSLEASAIDDIYWGCVQQTLEQGFNIARNAALLAEIPHSVPANTVNRLCGSSMQALHDATRMIMTGDASVCLIGGVEHMGHVPMSHGVDFHPGLSRNVAKAAGMMGLTAEMLARLHGISREMQDQFAARSHARAWAATQSGAFKAEIIPTGGHDADGVLKSFNYDEVIRPETTVETLSTLKPAFDPVTGTVTAGTSSALSDGAAAMLLMSESRARELGLKPRARVRSMAVVGCDPSIMGYGPVPASKLALKKAGLSTSDIDVFEMNEAFAAQILPCIKDLGLMEQIDEKINLNGGAIALGHPLGCSGARISTTLINQMERKDAQFGLATMCIGLGQGIATVFERV

SEQ ID NO: 60313 - protein, 459 aa, Klebsiella pneumoniae
MTEHTTTLKRTLGSFRLWGIAVGLVISGEYFGWSYGWSQAGTMGFMVVALAIAAMYCAFIFSFTELTTAIPHAGGPFAYAYRAFGPTGGFIAGFATLIEFVFAPPAIAMAIGAYLNVQFPALDPKWVACGAYVIFMTLNILGVGIAATFELIVTLLAIFELLVFMGVVAPGFSWSHFTTNGWAGADSFSGLALPGMFAAIPFAIWFFLAIEGASMAAEEAKDPQRTIPRALGGGILTLTVLAIGVMVFAGGVGDWRALSNINDPLPQAMKTVVGNGSGWLHMLVWLGLFGLVASFHGIIMGYSRQIYSLARAGYLPAGLASLNRRTRTPHLAILAGGVVGIAAIFSDSLITISGMPLTACIVTMSVFGAIVMYITSMAALFKLRRSEPKLIRPFRAPLYPLAPAFALGMAVLCLVAMVWYNLLLALIFAAMMLGGYLWFRKTAAARERAPVDPQLRTVS

SEQ ID NO: 60314 - protein, 245 aa, Klebsiella pneumoniae
MKALREPLWWLIALFIGLLAGLPYSAPLFSRLFPELPRPVYQQESFWALTLDHGWLVVASSLAATAIGLGAGVAVTRPAGSAFRPLVETIAAIGQTFPPVAVLAMAVPVLGFGWLPALIALALYGILPVLQGTLAGLGSIPPGVSGVAEGMGMTGWQRLYKVELPLAAPVILAGIRTSVIVNIGTATIASTVGASTLGTPIIIGLSGFNTAYIVQGALLVALAAIIVDRAFERLTRWISRHRHAQ

SEQ ID NO: 60315 - protein, 621 aa, Klebsiella pneumoniae
MSKGSTSSDAPFGTLLGYAPGGVAIYSSNYSSLNPQDYPDDATFRSYIGNEYMGHKWQCVEFARRFLFLTYGFVFTDVGMAYEIFSLRFLREVVNDNILPLQAFANGSRRPPIAGSLLIWQKGGEFKHTGHVAVITQLVGNKVRIAEQNVIHSPLPQGQQWTRELTLEVNDGRYTIKDTFADTEILGWMIQTADTEHSLPQPVLPGEAMAIKGARLPNNGQFRGKWLNEKDPLQKAYVAANGHFINQDPYQYFTISESAEQELIKATNELHLMYLHATDKVMKDDNLLALFDIPKILWPRLRLSWQRRRHHMITGRMDFCMDERGLKVYEYNADSASCHTEGGLILEQWLKQGYYGTGHNPAEGLLDELAGAWKHSRARPFVHIMQDKDLEENYHAQFIQRSLTQAGFESKILFGLDELRWDAAGQLIDADGRLVNCVWKTWAWETAIEQVREVSAEEYAAVPIRTGHPQNEVRLIDVLLRPEVLVFEPLWTVIPGNKAILPVLWSLFPHHRYLLDTDFEVNDELAKTGYAVKPISGRCGNNIDLIGPQDELLDKTSGQFVDRKNIYQQLWCLPKVDGKYIQVCTFTVGGNYGGTCLRGDSSLVVKKESDIEPLIVLKDKA

SEQ ID NO: 60316 - protein, 641 aa, Klebsiella pneumoniae
MTVQTQDTGKAVSSVIAQSWHRCSKFMQRETWQTPHQAQGLTFDSICRRKTALLTIGQAALEDAWEFMDGRPCALFILDESACILSRCGEPQTLAQLAALGFRDGSYCAESIIGTCALSLAAMQGQPINTAGDRHFKQALQPWSFCSTPVFDNHGRLFGSISLCCLVEHQSSADLSLTLAIAREVGNSLLTDSLLAESNRHLNQMYGLLESMDDGVMAWNEQGVLQFLNVQAARLLHLDAQASQGKNIADLVTLPALLRRAIKHARGLNHVEVTFESQHQFVEAVITLKPIVEAQGNSFILLLHPVEQMRQLMTSQLGKVSHTFEQMSADDPETRRLIHFGRQAARGGFPVLLCGEEGVGKELLSQAIHNESERAGGPYIAVNCQLYADSVLGQDFMGSAPTDDENGRLSRLELANGGTLFLEKIEYLAPELQSALLQVIKQGVLTRLDARRLIPVDVKVIATTTVDLANLVEQNRFSRQLYYALHSFEIVIPPLRARRNSIPSLVHNRLKSLEKRFSSRLKVDDDALAQLVAYSWPGNDFELNSVIENIAISSDDGHIRLSNLPEYLFSERPGGDSASSLLPASLTFSAIEKEAIIHAARVTSGRVQEMSQLLNIGRTTLWRKMKQYDIDASQFKRKHQA

SEQ ID NO: 60317 - protein, 762 aa, Klebsiella pneumoniae
MNQSLLVTKRDGTTERINLDKIHRVLDWAAEGLNNVSISQVELRSHIQFYDGIKTADIHETIIKAAADLISRDAPDYQYLAARLAIFHLRKKAFGQFEPPALYDHVVKMVEKGKYDHHLLEDYTEEEFQQMDGFLDHWRDMNFSYAAVKQLEGKYLVQNRRHRRRVYESAQFLYILVAACLFSNYPRETRLDYIKRFYDAVSTFKISLPTPIMSGVRTPTRQFSSCVLIECGDSLDSINATSSAIVKYVSQRAGIGINAGRIRALGSPIRGGEAFHTGCIPFYKHFQTAVKSCSQGGVRGGAATLFYPMWHLEVESLLVLKNNRGTDANRVRHMDYGVQINKLMYTRLLKGGDITLFSPSDVPGLYDAFFADQDEFERLYTQYEQDDSIRKQRIKAVELFSLMMQERASTGRIYIQNVDHCNTHSPFDPVVAPVRQSNLCLEIALPTKPLEDVNDENGEIALCTLSAFNLGAIDSLDELEELAVLAVRALDALLDYQDYPIPAAKRGAMGRRTLGIGVINFAYYLAKHGKRYSDGSANNLTHKTFEAIQYYLLKASNELAIEQGACPWFNETTYAQGILPIDTYKKDLDGIVSEPLHYDWEALRESIKTHGLRNSTLSALMPSETSSQISNATNGIEPPRGHVSIKASKDGILRQVVPDYENLQNAYELLWEMPNNDGYLQLVGIMQKFIDQSISANTNYDPTRFPSGKVPMQQLLKDLLNAYKFGVKTLYYHNTRDGAEDAQDDLAPSIQDDGCESGACKI

SEQ ID NO: 60318 - protein, 208 aa, Klebsiella pneumoniae
MKIVEVKHPLVKHKLGLMREHDISTKRFRELASEVGSLLTYEATADLETEKVTIEGWNGPVEVEQIKGKKITVVPILRAGLGMMEGVLEHVPSARISVVGIYRNEETLEPVPYFQKLVSNIDERMALVVDPMLATGGSMIATIDLLKNAGCTSIKVLVLVAAPEGIAALEKAHPDVELYTASVDKGLNEHGYIIPGLGDAGDKIFGTK

SEQ ID NO: 60319 - protein, 275 aa, Klebsiella pneumoniae
MESLLNLPLAGEARVRILQITDTHLFAEKHETLLGINTWDSYQAVLSAIHASQRPCDLIVATGDLAQDHSSAAYQHFAEGIASFAAPCVWLPGNHDFQPAMYSTLQEAGISPAKRVFLGDRWQILLLDSQVFGVPHGELSDFQLEWLEHKLAEAPERYTLLLLHHHPLPAGCSWLDQHSLRNAGALDSALSAWPRVKHLLCGHIHQELDLDWNGRRMMATPSTCVQFKPHCANFTLDTVSPGWRWLELHPDGTLTTEVCRLEGAAFHPDIASEGY

SEQ ID NO: 60320 - protein, 321 aa, Klebsiella pneumoniae
MRIGHHQLRNRLIAAPMAGITDRPFRTLCYEMGAGLTVSEMMSSNPQVWESDKSRLRMVHIDEPGIRTVQIAGSVPEEMAAAARINVESGAQIIDINMGCPAKKVNRKLAGSALLQYPDQVKSILTAVVNAVDVPVTLKIRTGWEPEHRNCVEIAQLAEECGIQALTIHGRTRACLFNGDAEYDSIRAVKQKVSIPIIANGDITDPLKARAVLDYTGADALMIGRAAQGRPWIFREIQHYLDTGELLPPLPLAEVKRLLCAHVRELHDFYGQAKGYRIARKHVSWYLQEHAPDDQFRRTFNAIEDASEQLEALEAYFENFA

SEQ ID NO: 60321 - protein, 436 aa, Klebsiella pneumoniae
MGNTTIPTQSYRAMESGQSKSYIIPFALLCSLFFLWAVANNLNDILLPQFQQAFTLTNFQAGLIQSAFYFGYFIIPIPAGMLMKKFSYKAGILTGLFLYACGAALFWPAAEVMNYTLFLIGLFIIAAGLGCLETAANPFVTVLGPESGGHFRLNLAQTFNSFGAIIAVVFGQSLILSNVPHQPQEVLDKMTPEQLSAWKHSLVLSVQTPYMIIVAIVLLVALLIVCTRFPSLQSDDHSDSAQSTFFASLTRLMRIRHWRWAVLAQFCYVGAQTACWSYLIRYAIEEIPGMTAGFAANYLTATMVCFFIGRFTGTWLIRRFAPHNVLAIYAFIAMLLCLLSAFSGGHVGLLALTLCSAFMSIQYPTIFSLGIKHLGQDTKYGSSFIVMTIIGGGIVTPVMGFVSDAAGNIPTAELVPALCFAIIFIFARFRSQAATN

SEQ ID NO: 60322 - protein, 424 aa, Klebsiella pneumoniae
MAKNIQAIRGMNDYLPGETALWQRIEGSLKQVLGSYGYSEIRLPIVEQTPLFKRAIGEVTDVVEKEMYTFEDRNGDSLTLRPEGTAGCVRAGIEHGLLYNQEQRLWYVGPMFRHERPQKGRYRQFHQIGAEVFGLQGPDIDAELIMLTARWWRELGISEHVSLELNSIGSLEARANYRDALVAYLEQFTDKLDEDSKRRMYTNPLRVLDSKNPDVQALLNDAPALGDYLDEESKAHFAGLCALLDDAGIRYTVNQRLVRGLDYYNRTVFEWVTTSLGSQGTVCAGGRYDGLVEQLGGRATPGVGFAMGLERLVLLVQAVNPEFKADPVVDIYLVASGTDTQSAAMRLAEQVRDALPGVKLMTNHGGGNFKKQFARADKWGARVALVVGESEIADGNVVVKDLRSGEQTTVTQESVAAHLRTLLG

SEQ ID NO: 60323 - protein, 487 aa, Klebsiella pneumoniae
MYLGIDLGTSEVKALVIDENHEVIASHSAPLSIQRPHQHWSEQAPELWWEATEYLMATLREKCAQHWPAIKAIGLSGQMHGAVLLDAEGKAIRPAILWNDTRCAAECAELEAMAPELHQVAGNLAMPGFTAPKLLWVRRHEPEHFQRTATVLLPKDYLRYRMTGKKVSDMSDAAGTLWLDVAKRDWSDALLDKCGLSRSQMPTLVEGCEISATLDPQVAARWGLNASVVVAGGGGDNAVSAIGVGAVSPGDAFISLGTSGVLFVVTDAYRPAPQSAVHAFCHVLPNLWHQMSVMLSAASCLQWFCRLTGTTEVALLAEIAELSEEDKANAPFFLPYLSGERTPHNDPDARGIFWGMTHASLRAQLGYAVLEGVSFGINDGLQALKESGTPIAQCSLVGGGARSPFWAQLLADILAMPVVTHKGGETGGALGAARLACLAAGKPVAAVCEKPEVWQTWRADPIRHHILMQRYAQFKALYLNDLHYRQH

SEQ ID NO: 60324 - protein, 140 aa, Klebsiella pneumoniae
MKRYTPDFPEMMRLCETNFAQLRRLLPRTDAAGEKVSYQVGSAQYRLTIVESTRYTTLVAIEQTLPAVSYWSLPSMTVRLYHDAMVAEVCSSQQIFRFKARYDYPNKKLHQRDEKHQINQFLADWLRYCLAHGAMAIPVC

SEQ ID NO: 60325 - protein, 474 aa, Klebsiella pneumoniae
MQDSVNQPGFLFHDYETFGTSPSLDRPAQFAAIRTDAELNVLGEPEVFYCKPADDYLPQPQAVMITGITPQEALAKGDNEAAFARRIHDLFTVPQTCIVGYNNVRFDDEVTRNIFYRNFYDPYAWSWQHDNSRWDLLDVMRACYALRPEGIAWPENDEGLPSFRLEHLTVANGIEHQNAHDAMADVYATIAMAKLVKTRQPRLFDYLYSHRNKRKLATLIDVPQMKPLVHVSGMFGAARGNTSLVAPLAWHPENRNAVIMVDLAGDMAPLLELDADALRERLYTPRAELGDLPAAPIKLVHLNKCPVLAQANTLRPQDADRLGISIQGCLENAQLLRANPQVREKVVAVYAEAEPFVPSENVDAQLYNGFFSDADRAAMKIVLETEPRNLPALDITFADKRIERLLFNYRARNFPGTLDEHEQQRWLEHRRQVFTPEFLQAYADELQMLYQQYADDKEKLVQLKALWQYAQDIV

SEQ ID NO: 60326 - protein, 582 aa, Klebsiella pneumoniae
MVLKKKTKSAASFTPIRFGLLCVAILGCLGLLLVRVGWLQIISPDNLVKQEDMRSLREEPVAVERGMISDREGRPLAVSVPVSAIWIDPQTTMEKGGVGYGPRWQAMAEALHLNLGELAQRVQSHPHARFLYLARQINPEQAEWIDKLHLPGVYLRDESRRFYPAGHVAANLLGFTNVDNQGIEGVEKSFNAQLTGKPGRRLVRKDKHGNVIENITEVPPVPAHNLQLSIDERLQTVTEDALDNAVRWNKAESGAAVLIKIDTGEILAMASYPDFNPNNRDSATLDDFRNRAISDTFEPGSTVKPLVIMTALQQGIVQPDSVVDTHPFVLDGHRIRDVGYYPELSLTGILQKSSDTGVSHLSLAMPVQHLIDTYKAFGFGEPTGLGLTGESAGLMPHRRYWGQLDRATFAFGYGLMVTPLQLAHVYATIGGFGIARPLSITRIDPPVMGTRVMPESIVHSVEHMMESVALPGGGGTKAAVRDYRVAVKTGTAKKIGPDGKYIDKYVAYTAGVAPASRPQFALVVVMNDPSNGSYYGGAVSAPVFSQIMGDVLRLENVMPDGMPQGAENLIVMHDSHPQGPAL

SEQ ID NO: 60327 - protein, 300 aa, Klebsiella pneumoniae
MGSSKKGMLNVLIAAVLWGSSGVCAQFIMQESQMSSPFLTMTRLLFAGLILLMLGFVHGDRIFRVLQNRRDALSLLFFSLFGALTVQFTFLMTIEKSNAATATVLQFLSPTIIVAWFALARKARPTPLVLGAICTSLAGTFLLVTHGNPTTLSISPAALFWGIASAFAAAFYTTYPSTLIARYGTLPIVGWSMLFGGAMLLPFYGGQGTDFVVNGSLLLAFFYLVVIGTSLTFSLYLNGAQKIGGAKAGILSCAEPLSSALLSLLLLGITFTLPDWLGTLLILASVVLIAIDSRRRVRSA

SEQ ID NO: 60328 - protein, 540 aa, Klebsiella pneumoniae
MRVNHGLTPQDLKAYGINDVQDIVHNPSYDMLFQEELDPNLEGYERGVLTTLGAIAVDTGIFTGRSPKDKYLVRDDTTRDTVWWSDKGKGKNDNKPLSQETWQHLKGLVTQQLSGKRLFIVDAFCGANADTRLSVRFITEVAWQAHFVKNMFIRPSDEELAEFVPDFIVMNGAKCTNPQWKEQGLNSENFVAFNLTERIQLIGGTWYGGEMKKGMFSIMNYLLPLKGIASMHCSANVGEKGDVAIFFGLSGTGKTTLSTDPKRRLIGDDEHGWDDDGVFNFEGGCYAKTIKLSEAAEPDIYHAIRRNALLENVVVRADGTVDFDDGSKTENTRVSYPIDHIDNIVKPVSKAGHATKVIFLTADAFGVLPPVSRLTADQTQYHFLSGFTAKLAGTERGVTEPTPTFSACFGAAFLSLHPTQYAEVLVKRMQAAGAQAYLVNTGWNGTGKRISIKDTRAIIDAILNGSLDNAETFTLPMFNLQIPTALPGVDTHILDPRSTYGSPEQWQEKADQLAKLFIENFEKYTDTPAGAALVAAGPQR

SEQ ID NO: 60329 - protein, 538 aa, Klebsiella pneumoniae
MKASEHPPRVRQRALPLKLSTAVSLMIGSVIGAVLLLVYALWYMQISNATRDGLKETALAVARTMADMPQVKRGLEAPPQQQIIQPLAQAITRRNDLLYAIVTDMQGIRYSHPDSSIIGKPFIGHDIQPTLQGKENVAINHGVLAPALRVFTPVFNERHQQIGVVVVGISLSKVDEQIANSRWDVLLTILFSALVCALGTWSLVRGLKRVLLGLEPHEISTQFQQRQAMLHALKEGVVAVDAHGEVNLINPAAEEILFSGPDKTLVHSPLLDDLQTVLQSGEPMYDRELGCNGLLLIGNTVPIRSQGAVVGAICTFRDKTEVSQLLQRLDGMMSYVDALRTTSHEFMNKLHVILGLLNMKSYGKLEEYVLQTAHRYQADIGDIQHRIKSPVVAGFLISKIQRATECGFTLTLAEESLVPDCPNEKQVTVLVTVLGNLIENALDAMSGQAEGEIGLLLHYQDGWLSGEVSDDGPGIPENNIDAIFNKGFSTKGENRGVGLFLANQQLRELGGTLAVESEPGVFTQFFVHLPWDSKRKPA

SEQ ID NO: 60330 - protein, 448 aa, Klebsiella pneumoniae
MTLMQFSGLLVVWLLSTLFIATATWFEFRRVRFNFNVFFSLLFLLTFFFGFPLTSILVFRFDVSVAPPEILLQTLLIAVCFYAVYYVTYKTRLRSASREVAHRPLFTMNRVETHLAWGILMGLALLCVGIFFAHNGFLLFKLNSYSQIFSAEVSGVALKRFFYFFIPAMLVVYFLRQDYKAWIFFLVSTVAFGLLTYAIVGGTRANIIIAFAIFLFIGIIRGWISLWMLAAAGVLGIVGMFWLALKRYGMNVSGDEAFYTFLYLTRDTFSPWENLALLLQNYDKIDFQGLAPMIRDFYVFIPSWMWHGRPTMVLNTANYFTWEVLNNHSGLAISPTLIGSLVVMGGVWFVPLGAVAVGLIIKWFDWLYELGNRESNRYKAAILHSFCFGAIFNMIVLAREGLDSFGSRVVFFLVIFGICLLAAKLLYWFLDSVGLIHKRVKPLSQPQV

SEQ ID NO: 60331 - protein, 300 aa, Klebsiella pneumoniae
MSIDLSKLLTERRNANSANIDTLSTLEMLTVINQEDQQVAQAITPYLPQIAEVVDKVAAALQAGGRLIYIGAGTSGRLGILDASECPPTFGTRPEQVVGIIAGGHKAILSAVENVEDNKAQGAMDLQNLNFSNRDVLVGLAASGRTPYVIGAMEYAHSQNAFVAIVSCNPHGEMAQLADVAITPVVGPEVVTGSTRLKAGTAQKLVLNMISTGAMIRVGKVYSNLMVDVEATNAKLIERQVSIVMEATDCDRATAQKALEACGRHCKTAIVMVLADLSAAEAQSLLAKNNGYIRKALSNT

SEQ ID NO: 60332 - protein, 558 aa, Klebsiella pneumoniae
MHHATPLITTIVGGLVLAFILGMIANKLRISPLVGYLLAGVLAGPFTPGFVADTKLAPELAELGVILLMFGVGLHFSLKDLMAVKSIAIPGAIAQIAVATLLGMALSAALGWSLMTGIVFGLCLSTASTVVLLRALEERQLIDSQRGQIAIGWLIVEDLVMVLTLVLLPAIAGMAEKGNVGFASLALDLGITIGKVVAFIAIMMLVGRRLVPWIMSRSAATGSRELFTLSVLALALGIAFGAVELFDVSFALGAFFAGMVLNESELSHRAAHDTLPLRDAFAVLFFVSVGMLFDPMVLVQQPLAVLATLAIIIFGKSAAAFFLVRMFGHSPRTALTIAASLAQIGEFAFILAGLGMALNLLPQAGQNLVLAGAIISIMLNPVLFTLLEKYLDKTETLDEQTLEEVLEDEKQVPVDICNHALLVGFGRVGSLLGEKLMAQGIPLVVVETSRTRVDELRERGISAVLGNAANEEIMELAHLDCARWLLLTIPNGYEAGEIVASAREKCPNIEIIARAHYDDEVDYIIDRGANQVVMGEREIARAMLRLLETPPAGEVVTG

SEQ ID NO: 60333 - protein, 381 aa, Listeria monocytogenes
MKFVIERDRLVQAVNEVTRAISARTTIPILTGIKIVVNDEGVTLTGSDSDISIEAFIPLIENDEVIVEVESFGGIVLQSKYFGDIVRRLPEENVEIEVTSNYQTNISSGQASFTLNGLDPMEYPKLPEVTDGKTIKIPINVLKNIVRQTVFAVSAIEVRPVLTGVNWIIKENKLSAVATDSHRLALREIPLETDIDEEYNIVIPGKSLSELNKLLDDASESIEMTLANNQILFKLKDLLFYSRLLEGSYPDTSRLIPTDTKSELVINSKAFLQAIDRASLLARENRNNVIKLMTLENGQVEVSSNSPEVGNVSENVFSQSFTGEEIKISFNGKYMMDALRAFEGDDIQISFSGTMRPFVLRPKDAANPNEILQLITPVRTY

SEQ ID NO: 60334 - protein, 208 aa, Listeria monocytogenes
MKAIFITLEGPDGSGKTTVGTLLNQKMTEAGIDFIKTREPGGSPISEKVRNIVLGIGNEEMDPKTEVLLIAGARRQHVVETIRPALAAGKSVLCDRFMDSSLAYQGAGRDMNMEQVLQVNLYAIEDTLPDRTYYLDVPAEVGLARIAANKGREVNRLDKEDITYHEKVQAGYEKVINMFPERFMRVDATKTPEEITETILADILRQLA

SEQ ID NO: 60335 - protein, 290 aa, Listeria monocytogenes
MKVKKAVIPAAGLGTRFLPATKAMPKEILPIVDKPTIQFIVEEAVASGIEDILIVTGKGKRAIEDHFDSVPELENNLREKNKLDLLHLVEETTNINLHFIRQSKPKGLGDAILQAKGFIGNEPFVVMLGDDIVQSKTPCAKQLIDQYEKTHSSVIGVQNVPREETYRYGIIDPDKEVSDRLYNVTGFVEKPNVEDAPSNLAILGRYLLTPEIFKYLETQEAGSGGEIQLTDAINRLNEIQPVFAYDFEGERFDVGDKFGFIETTLKFALKHPEIKDDVRDLIIRLGDELK

SEQ ID NO: 60336 - protein, 300 aa, Listeria monocytogenes
MHILLTGATGFIGDHLVHELEKSDHELYILTRQKLKNRANVHYIEWLNEDKLPNLEDLPVDVCINLAGAGLMDEKWTYDRKKVIVNSRIEATSALLSIVKKMKSKPKLWINASAIGAYTSSKSTIYLDTEENTYADNFLGKTVYEWEKTASAASDLGIRVVYARFGLVLGTNGGSFPVFEKLFQTYTGGRFGNGRQWYSWIHVDDVVAAILFIFDHEQINGVVNFTAPHPVQEKKFAERLGKKMHKPYKTPVPKKIIKFILGERAMTILDSQRAYPEKLMSNHFEFRFETLQEALDDLLD

SEQ ID NO: 60337 - protein, 580 aa, Listeria monocytogenes
MVENLKQLQERVAVSDGRAKADLVIKNGRIINVFSGEIMDGDIAIKNGYIAGIGSFPDAEKIIDAAGAFIAPGFIDAHVHVESAMVTPAEFARVLLPNGVTTIVTDPHEIANVAGEKGIEFMLEDAKGAPLDMFVMLPSSVPATEGEHNGETLHAEKLHPLYRHEKVIGLAEVMDFPSVAKGSDDILRKIIDAKKEGGRIDGHGAGLTSADLNNYLAVGIRTDHESTTAKEATDRLRAGMFVMLREGTVGRDLLQTIPAVSEKNSHRFCFCTDDKLINDLITEGSINYNIKLAIKNGIDPITAIQMATINAANCHNLPYLGAVAAGYQADIVFLTDIETVEISKVLKNGEVVVDNGVRNEAAFKQQAAVPFVSPPINHHVHLQDLALPLTKETCYVIGMQPNSLFTEKRIEQVTIQGGKFVPTVENDLLKMAVVERHHDTGCVGVGIVKGFGLTEGAIATTVAHDSHNIVAVGVSDEAMKAAIDHITQTGGGIAVVNGAGQVLHDLALPIAGLLSDKSYEEVENDLAGLLNAFKQISTANGFDPFLTLSFLTLPVIPELKLTDQGLFDFATFQIISNEVN

SEQ ID NO: 60338 - protein, 731 aa, Listeria monocytogenes
MNAKELVDGLNPEQRRAVESTEGPLLIMAGAGSGKTRVLTHRIAYLVRERGVNPYNILAITFTNKAAREMKSRIGNLMGGEAESIWISTFHSMCVRILRRDIDRIGYERNFTILDGSDQLSVIKGILKEKNVDPKKFEPRGILASISNAKNELITASEYIKEASGFYDKMVGEVYEKYEKKLKKNQALDFDDLIMVTIQLFERVPDVLEYYQRKFQYIHVDEYQDTNHAQYLLVKQLASRFKNLCVVGDSDQSIYGWRGADISNIMSFEKDYPNAKTILLEENYRSTKRILEAANRVIENNGNRKPKNLWTSNAEGKKIFYHKALTEKEEAAYVVMKIQEEVNNSNRPLSDFAILYRTNAQSRVMEEYFMKSNMAYTMVGGTKFYDRKEIKDILAYLRLISNNEDDISLTRIVNVPKRGVGPGTLDKLNNVATTYDLSLFEVLNRIELAGISPKISKDLVAFHDLIRGFTQMQDFLSVTELVEEILEKTGYRAMLKNERTIEAQTRLENIDEFLSVTQNFEKENDDKTLIAFLTDLALVADVDKLEEDNEEQNGAVTLMTLHSAKGLEFPVVFLVGMEEGIFPHSRAIYEEDEMEEERRLAYVGITRAEEELFLTSAYSRMLYGRPSSNQESRFIGEIPRDLLELGNENKLKADKPYAKPRIPQKTTTAYKSSGAETLGWTVGDKASHKKWGVGTVVSVKGEGSGMELDIAFPSPTGVKRLLAEFAPIEKV

SEQ ID NO: 60339 - protein, 368 aa, Listeria monocytogenes
MAETLKETLEETNAELETVEVVETEEKTTTSADSGISRREKAALIIWSLDEQIATEVVDLLPDASKQRLAREMAKMKEMDGGAVEEATREFLGELELLSGGIAKLDREHLQRLFPDMTTEELNQLIYGVEAESRIGETALDILREIDDVDSLFTIISDESPQTIAMIASYMKPEEASKLLALLPEEKMINTVIGIASLEQFDSEVMQNVSNLLRIKLDTMSNSSLNKTDGIKNVANILNNVTRGLERTIFEHLDAEQAELSERIKEKMFMFEDIILLDNMTLQQVLAEIQDNNKIARALKNEKEELKEKILSCVSKNRRDMITEELEVLGPIRLSDVEQAQQDIANVVKNLEKDGKIVIQRGEQDVLI

SEQ ID NO: 60340 - protein, 192 aa, Listeria monocytogenes
MNLPNKLTVIRIFMIPIFVILCVVPFDWGSVTWLDSTIPVTSLVATIIFIVAALTDWFDGHLARKYNLITNFGKFADPMADKLLVAAAFIILVEMHIAPSWVVILIISRELAVTGLRLLLVEGGEVLAAGQLGKIKTFTQMIAIPLMLLNNFPFAWTGIRVDLVFLYVCAFFAVWSGIDYFYKNRGVFKGSM

SEQ ID NO: 60341 - protein, 141 aa, Listeria monocytogenes
MAKKVIKEVKLQIPAGKANPAPPVGPALGQAGVNIMGFCKEFNARTADQAGLIIPVVITVFEDRSFTFITKTPPAAVLLKKAAKVEKGSGEPNKTKVASVTRAQVQEIAETKMPDLNAANVESAMLMVEGTARSMGITIQD

SEQ ID NO: 60342 - protein, 236 aa, Listeria monocytogenes
MIYAEILAGGKGTRMGNVNMPKQYLPLKGKPIIVHTIEKFILNDRFEKIIIATPKDWINHTQDIIKKYIFDSRVIVIEGGTDRNETIMNGIRYVEKEFGLNEDDIIVTHDAVRPFITHRIIEENIDMALEFGSVDTVIPAVDTIVESTNHDFITDIPVRGNIYQGQTPQSFNMKTIQKHYNNLTDDEKQILTDACKICLLAGEKVKLVNGGISNIKITTPYDLKVANAIVQERINS

SEQ ID NO: 60343 - protein, 141 aa, Listeria monocytogenes [sequence omitted]

SEQ ID NO: 60344 - protein, 178 aa, Listeria monocytogenes
MNQNKITAGGLEFLVRFALPTDRLKINGLMMDTARWLKESGSTQWSDILHGFDVHNIEQRIELGEVALFETEAGKLAGTMIIRKTPSDWDTDLWDNLAIDKAYYLHRIMVSREFSGISLSKQMIYFAEKLGIEMSVPFIRLDCIESNKTLNQMYLRYGFQFLGTKNGFHLYQKKLPQK

SEQ ID NO: 60345 - protein, 407 aa, Listeria monocytogenes
MIEKRNTIRMEQAREVLCNQITHLPVEKKHVTEALNQVLQEPIFAPFPAPYFRRSGYDGFAITEVDDGNYPITLRVVAEVPCGETYDKPLKPGETVRIMTGAKVPDNASKIIMLEQSREADNENEIILINTQKSSNITEIGTEFAKGDLLLDRGHILNAGSISLLSSFGIQEVQVIRKPKVAILSTGSELVPAGNPLPDGKIFNSNQPLLENLLKVHHAEICAAEQLPDNYEDTKNRLLELTKIADLIVTTGGVSVGDFDYMADIAKQEAELLFNKIQMRPGSPTTGMWLDKTLIIALSGNPGACFTGFYLLVEPVLTTLMGKDTTETTQVRAKMASDYTKNNGYDRFLRGTYRLSDEGEYLVELVGSDMSSALGNLHLTTCLFKIPRGQVGKLKGEEVEAWLLYSK

SEQ ID NO: 60346 - protein, 1186 aa, Listeria monocytogenes
MLLKRLEMNGFKSFADKVAIDFVPGMTAVVGPNGSGKSNITEAIRWVLGEQSAKSLRGGRMGDVIFAGSDTRKPINFAEVSLILENEDHFLPLDYSEVAVTRRIYRNGDSEFLINKENCRLKDIVDLFMDSGLGRESFSIISQGKIDEILNSKPEERRSIFEEAAGVLKYKHRKKQAENKLFETEENLNRVQDILYELEGQLEPLEMQASIAKDYLFQQEELEKYEVTLLASEISSLTEKLAEVRKEFGENQTVLIKLREELHAEEAVISREKQALNETDIALDKLQERLLVETEKLEQLEGERNLQLERKKHSSENEQVYAETLAVITEKITALEEQKEVLSSSKLEKETALEIAIKSKKVLEATLAKYDDLSEEAIENRKSDYIDLRHTQTTINNDLGYIERQIGQITSRIDKLDLENSHHVDDRKDMLAQIETTKTHLTKIQSELTEQMEIYREVQQTLAKQEAVFGTQERALYKHYETVQQMKSRKETLEELADDYAGFFQGVREVLKAKKEIPGILGALVELVEIPAKYQQAMETALGASAQNVVVEDDRVAREAISFLKKTKSGRATFLPLSTIQPRELPAATKNALSNQPAFIALASEVISFDEKVSPVILNALGTTILAKDLKGANTLARLVNFRYRIVTLEGDVVNAGGSMTGGATKGGKSSILTRKHELGQLAEKIAELNESTREMESAVQLAKDSMAKKREELEETRVIGENLRLQEKELLGKLDRETENLERFNKQLQLYDIEKADGSEELNKLLERKETLLQEQVEIAKQIEVTDEEIKAMTSSSKALESKRAADLESLSSLKAQIAAKREQLQSATEAVERVTTTLHENYEQKEAAEQKLASLKTNLTSVHTSEETARKSIEELRKDKTETSEKLTQTRQTRAELQEKLELLEAELTQKNNQISFYMEQKNNAEISIGRLEVDIANRIDRLQEAYLLTPEQAEEKILSEVNTEQARSKVRLLKRSIDELGIVNIGAIEEFERIQERFDFLTGQQADLLAAKETLFKVMDEMDEEMKIRFSESFEAIKTEFAIVFPELFGGGSAELVLLDPENLLTTGIDIVVQPPGKKLQNLSLRSGGERALTAIALLFAIIRVRPVPFCILDEVEAALDEANVTRFSRYLKQFESGTQFIVITHRKGTMEEADVLYGVTMQESGVSKLVSVRLEETAELIK

SEQ ID NO: 60347 - protein, 59 aa, Listeria monocytogenes
MAKLEITLKRSLIGRPQPQRKTVQALGLGKTNSVVVKEDNPAIRGMITKVSHLVDVKEV

SEQ ID NO: 60348 - protein, 197 aa, Listeria monocytogenes
MKKLLFLGDSVTDAGRDFENDRELGHGYVKMIAEQLEKEDVTVINRGVSANRVADLHRRIEADAISFQPDVVTIMIGINDTWFSFSRWEDTSVTAFKEVYRVILSRIKEETNAELVLMEPFVLPYPEDRKEWRGDLDPKIGAVRELAAEFGATLIPLDGLMNALAIKHGPTFLAEDGVHPTKAGHEAIASTWLEFTK

SEQ ID NO: 60349 - protein, 425 aa, Listeria monocytogenes
MAIQPLAYRMRPKALDEIVGQTHLVGKDKIINRMVKAKQLSSMILYGPPGIGKTSIASAIAGSTKYAFRTLNAVTNNKKDMEVVAAEAKMSGTVILLLDEVHRLDKAKQDFLLPLLESGAIILIGATTSNPYIAINPAIRSRTQIFELKPLTIEDIMITMDRALSDKERGLGNYDVEIDEVAKKHFATASNGDVRSALNALELAVISSEPNEDGVIHITLDVAEECLQKKSLAHDKDGDAHYDVLSAFQKSVRGSDVNAALHYMGRLIEAGDLVSISRRMLVMAYEDIGLASPQAGAHTLAAIQTAEKVGFPEARIPLANAVIELCLSPKSNSAIMAIDAALADIRQGKSGEVPDHLRDGHYSVAEKLGRAIDYKYPHNYDNAWVDQQYLPDRLKNKLYYEPKFTSKFEQTIAGVYQKINENKAK

SEQ ID NO: 60350 - protein, 332 aa, Listeria monocytogenes
MKAVGLTKASTDFVDIEIDKPVPENHDLLVKIKAISINPVDTKQREAAKLSGEEVRILGWDAVGEVVDTGSEVTLFQTGQDVYFAGDVTRPGVYAEYTLIDERLVGLKPHNLNVEEAAAMPLTTITAWEALFDRLTITENDKGKSILIINGAGGVGSIATQLAANTGLEVIATASRSETVEWTKSHGANYVINHRENIPEQLEELGFKKGVDFILCLHNTSAHWDEMQEAIRPQGKICSIVELTEPVEMTLLKDKSATFSYEFMFTRSKYDTADKIRQHEILTEAAHMLDKGNLTTTLNQVLSPVNAATIEEAHKIISSGKMIGKLVVKGFE

SEQ ID NO: 60351 - protein, 212 aa, Listeria monocytogenes
MKKITAPRIPDGDLTVYPNDTYFIEDIGEVSEQIFRKTTLTGEIFEHFHLETIIFDGCVFDSVSLVSANLTDVVFKNCDLSNLDLMGAIIHRVRFENCKLIGMNFSDATLRNCVFVDCYADYVAFRYANLKWVAFEAGAYTNSDFSGAQLVDTYLERLDLNKAQFLNCALNGIDLSSCIFESITAMPQDLKGMSIDFSHAPALMPLFGIRVK

SEQ ID NO: 60352 - protein, 138 aa, Listeria monocytogenes
MVKKEERLGVLLWFRFSRFYNRNMKLTNQNLRAAGISTAQFDCIAQIGLDKEITQQQLAEKLVVTKGNVTQLLAKLEQLGYITRTKTGREKHITLTEKGQACYRENVPKQEAFQQAQFDKLTRDEQKELLKLLKKLGE

SEQ ID NO: 60353 - protein, 201 aa, Listeria monocytogenes
MTNNHYYTNDETIKHNRKTWQVMLKGFNMSFTSDNGVFSKNTVDFGSKLLIESFELETKIGKILDVGCGYGPMGLTVAKAFPDSQIEMVDVNLRALELAKENAEINKITNTHIYESSVYDNVTANDYQAIISNPPIRAGKKIVHAILEGAYDHLQETGELWIVIQKKQGGPSAEKKMEEVFGNVETVAKDKGYFIFKSVKN

SEQ ID NO: 60354 - protein, 241 aa, Listeria monocytogenes
MINIKNLHKHFGKLEVLKGIDLEIASGEVVVVIGPSGSGKSTFLRCLNLLEQPTTGTILFENKDLMAKQTNVNELRQKMGMVFQNFNLFPHKNVLENLMLAPMKVKNEDSAAAKKHALSLLEKVGLADKATSYPSQLSGGQQQRVAIARALAMNPDVMLFDEPTSALDPEMVGEVLSVMKSLAKEGMTMVVVTHEMGFAREVADRVVFMDAGVIQEQGTPEEVFGNPQNDRTKDFLGKVLA

SEQ ID NO: 60355 - protein, 444 aa, Listeria monocytogenes
MKKQKTVRAIALELIIKIENNQSYSHLLINDALKKQKLNPLDKGLLTELVYGTTQRKITLDYYLAPFLNKEPDNWVKNLLRMSVYQLTYLDKVPEHAILNEAGDIAKNMGHQGVTKFVNGVLRNVIRKGVPSIDAIKDPVQKIAVETSLPEWLAKRWADQYGIEQLREIGLAFLVAPHQSIRVNQTEIPTEQLIKELNDQGITVTRNEFIEEALLVEKGSVAETKAYKDGKCSIQDESSMLAAYALQLEDNLTVLDACAAPGGKTTHIAEKMHGTGMVHALDIHEKKTKLIDEAAKRLQLLNIRTAHLDARTASTMFEPETFDRILVDAPCSGFGVLRRKPDIKYAKTEKDIHKLAEIQLAILDDVSQLVKENGILVYSTCTIDKEENETVLRAFLEKHPDFTLEPVVLPEKLAQIKKDDFIQLLPTDIGSDGFFVSSLRKVKS

SEQ ID NO: 60356 - protein, 363 aa, Listeria monocytogenes
MTKRILMLEDGNYFIGDAIGSEKETIGEVVFNTGMTGYQETITDPSYYGQIITFTYPLVGNYGVNRDDFESINPAVKGVVVREAAEFASNWRNQITLNEFLKEKGIPGIAGIDTRKLTKLIRKEGTLKGILAAETADKEELLHHLRSVRLPVDQVHEVSSAKAFASPGDGKRVVLVDYGVKSSILRELNKRNCYVTVVPYNTSAEEILAMHPDGVMLSNGPGDPKDVPEALEMIRGIQGKLPLFGICLGHQLFALANGADTFKLKFGHRGANHPVKELATGRVDFTAQNHGYAVEKDSLIGTDLKVTHIELNDETVEGLAHKEYPAYTVQYHPEANPGPSDVNYLFDEFMEMMNGKEEGELHA

SEQ ID NO: 60357 - protein, 613 aa, Listeria monocytogenes
MSKIIGIDLGTTNSAVAVLEGGEAKIIPNPEGARTTPSVVGFKNGERQVGEVAKRAAITNPNTISSIKRHMGTNYKETIEGKDYSPQEISAIILQYLKSYAEDYLGETVDKAVITVPAYFNDAQRQATKDAGKIAGLEVERIINEPTAAALAYGMDKTETDQTILVFDLGGGTFDVSILELGDGVFEVHSTAGDNELGGDDFDKKIIDYLVAEFKKDNGIDLSQDKMALQRLKDAAEKAKKDLSGVTSTQISLPFITAGEAGPLHLEVTLTRAKFDELTHDLVERTIAPTRQALKDANLSASDIDQVILVGGSTRIPAVQETIKKELGKEPHKGVNPDEVVAMGAAIQGGVITGDVKDVVLLDVTPLSLGIETMGGVMTTLIERNTTIPTSKSQTFSTAADNQPAVDIHVLQGERPMAKDNKTLGRFQLADIPPAPRGIPQIEVSFDIDKNGIVTVRAKDLGTGKEQNIVIKSSSGLTDEEIEKMVQDAEANAEEDKKNKENAELRNNADQLVFTVDKTLKELEGKVEEEEVKKAEAARDELQEALKGEDFDAIKEKTESLNEIVQNLSVKLYEQAAAEQQAAGGAEGQEAPQNDDVVDAEFEEVNDDDKENK

SEQ ID NO: 60358 - protein, 321 aa, Listeria monocytogenes
MKLNFLYANMQKDIDSVEKELKKALSGAAADTTSAAALHLLEAGGKRIRPMFVCLSARLAANADFNAVKNASVAIELIHMASIVHDDVVDDADLRRGRETIKSKWGNHIAMYTGDFLFAKSLEYMTEIKDVAAHKMLSHVTVELSTGEIEQLKDKYNFDQSVRNYLRRIKRKTALLIAASCGLGGVVSGQSEADYQKLYRFGYYVGMAFQITDDVLDFVGTEKELGKPAGEDLRQGNVTLPVFFAMEDPFLKKRISQITEETPAEEIAVLVEEVKKTGAKQAEDVATTYLKKAVEILDSLPQVPELKPLKQIVRVLDKRNY

SEQ ID NO: 60359 - protein, 472 aa, Listeria monocytogenes
MAKQEIGVIGMGVMGRNLALNIESRGHTVSIFNRSTEKTKAVMEENADKKLVPTYSLEEFVESLEVPRRILIMVKAGDATDMMIEAVKPFLNEGDILIDGGNAFFKDTIRRNKELSEEGFNFIGTGVSGGEEGALKGPSIMPGGQRKAYDLVAPILREIAAVADGEPCVTYIGPDGAGHYVKMVHNGIEYGDMQLIAEAYTILKEIGGLSHDELADVFEEWNNGELDSYLIEITKNILKVKDEETGKPIVDVILDKAGQKGTGKWTSQSALDLGVPLSLITESVFARYISALKEERVYASTVLTGPSNYRFEGDKKAFVESVRRALYFSKIASYAQGFAQMRAASEEYNWDLQYGEIAKIFRAGCIIRARFLQKITDAYNQDKNLKNLLLDPYFKDIAHNYQGDLRTVVAEAVKAGIPVPTFTAAISYYDSYRSEVLSANLIQAQRDYFGAHTYERVDKPGVFHTEWPQVED

SEQ ID NO: 60360 - protein, 524 aa, Listeria monocytogenes
MKKFLLVAVISVFALVLTACGGSGASSDKANGSGKAKDGGSLIIGVTGDPEVINPNYASDRVTLTIQQAVYAPLFWEVDGKPALAKSLDISDDNLTYTVKLKDGLTWHDGKPLTADDVVFTVNSILDTKQNSPNRGNFVFDDKPVKVEAVDDTTVKFTLPTVAPAFENTIKTFFPIPKHIFEGVENIEKSDKNKNPIGSGPYKFVEYKTGEYVSLERFNDYFDGKPKLDKVTFRITKDQNAANLALQNGEINLKSIQPSDRNKVEKASAVNIITYPENRLSYATFNENQPALKSKELRQALSYALDREEIIDAAYGSDEYAKPASSFLTENTKYFTDKVETYDQDIAKAKKLVKESGFDTSQKLTVYYLNNSKSQESIALYLQQQYKEIGVTLDLKPTDPNALSNITLDRKNADYSIALNGYIMGNDPDAYKSLYLSDAPYNYSNYHNKDLDALWEKGAVTADDKERQEIYEKIQNTIADDAVIYPISYDNAVLALDSRYGGQKAATPQPVTMFRDLSKLYLTE

SEQ ID NO: 60361 - protein, 372 aa, Listeria monocytogenes
MSTELLDALHVLEHDKGISREVLVEAIEAALTSAYKRNFKDAQNVRVDLNMENGSIRVLARKEAVEQVFDSRLEISMEEAHKLNPVYQPGDVVELEVTPKDFGRIAAQTAKQVVTQRVREAERGIIYDEFIDREDDIMTGIVERQDSRFIYVNLGKIEAILSQNEQMPNETYHAHDRIKVYLTKVEKTTKGPQIFVSRTHPGLLKRLFEMEVPEIYDGVVEIKSVAREAGDRSKISVYTANEEVDPVGACVGPKGARVQTIVNELKGEKIDIVEWSEDPFTFVANALSPSKVLDVIVNEADQATTVIVPDYQLSLAIGKRGQNARLAAKLTGWKIDIKSETVATELGIYPRNGVEAPEVEEAESETFTEDEE

SEQ ID NO: 60362 - protein, 350 aa, Listeria monocytogenes
MLIWSILISFAVGIIMVPIIRKFAFRINAVDTPRERHKHTKTTATLGGLAIFISFSVGMILAPIDKSGFLPIYFGALIIIATGFIDDIFDLSPKWKMLGQILAALCVTVWGDITINFINVPFYGQVDFGYFAIPLSIIWIVAIVNALNLIDGLDGLAGGISIIALMTIAGMALLLKDVFVAPVALILVAAVAAFLIYNFPPASIFMGDTGALFLGYMIAVLSLMGFKNVTFISLLVPLIILGVPLSDTFFAIVRRLKERMPISSADRSHIHHRLMALGFTEKQTVLLIYCMALLFSMTGFVFSFSTTWGAMLLLLLLIFSIEIIVEFIGLIGEDYRPILNLLQKIHRKRK

SEQ ID NO: 60363 - protein, 102 aa, Listeria monocytogenes
MAKQKIRIRLKAYDHRILDQSAEKIVETAKRSGASVSGPIPLPTEKSIYTVLRAVHKYKDSREQFEMRTHKRLIDIVNPTPQTVDSLMRLDLPSGVDIEIKL

SEQ ID NO: 60364 - protein, 532 aa, Listeria monocytogenes
MTKYIFVTGGVVSSIGKGITAASLGRLLKNRGLSVTIQKFDPYINVDPGTMSPYQHGEVYVTDDGAETDLDLGHYERFIDINLNKYSNVTTGKVYSEVIKKERRGDYLGGTVQVIPHITNELKDRVFRAARMTNSDIIITEIGGTVGDIESLPFLEAIRQIKGDVGAENVLYIHTTLIPYIKAAGEMKTKPTQHSVKELRSLGIQPNIIVVRTEQPVSQEMKDKIALFCDIKASEVIESRDEETLYNVPLSLQKQKMDDIVLEHLQLEAPQAEMTDWKNLVHRVKNLSKKVRIGLVGKYVSLQDAYLSVAEALRHAGYDHDAEIEIDWIDSEKVTKENVAEIMKDVDGILVPGGFGDRAIEGKIAAIEYARVNKVPYFGICLGMQLATVEFARNVLGLEGAHSAEIEPETNHNIIDLLPEQKNIENMGGTLRLGLYPARIKQGTKAEAAYGTTLVEERHRHRYEFNNEYREQMEEAGMIVSATSPDGRLVEVVELIDHPWFVACQYHPEFISRPNRPQSLFKDFVGAALKNK

SEQ ID NO: 60365 - protein, 202 aa, Listeria monocytogenes
MFYHFAKNLVHFILIIIGGRFQVQNKDKIIEAPYVVVSTHTSWIEILYLGFALSPTPVHYMAKQELFKGKFLNWLMTHLNAFPVNRDNPGPSAIKAPIRMLKSGKVVGIFPSGTRKTTNLHLKRGAVTIAHKAKVPMLPAVYDGPKTFGEILKRKKIIIRFGDPVLFNDTELDQKELLEVKSQELMATFEQLQNEINQTKNK

SEQ ID NO: 60366 - protein, 576 aa, Listeria monocytogenes
MKKVKASETLVQTLKNWGIDHVYGLPGDSIDTVVDALRKEQEAIEFIHVRHEEVATLAAAAYTKLTGKIGVALSIGGPGAIHLLNGMYDAKMDHVPMLVLAGQVTTDVLNTGFFQEVNLPAIFEDVAVYNKQIDNAETLADVVDEAIRTAYKEKGVAVLTIPNDIPSQVIKASLEAKPVKFEQENPKLDEAAIQEAVTLIEKAEKPVILAGLGTKHAGPELIAFSEKLKIPIIHSLPAKTIVPDDHPNALGNLGKIGTKPAYEAMQETDLLLMFGNDYPYSDYLPKKTDCIQIDIDPAKISKRFPAIVGLVGDAAEIISDLTAKIAPVEERKFLQACQENMQEWWKWLEEDIAQTSDPIAPEVVMANIQKIADKDAVFSIDVGTATVWSTRYLHLTPENDFIVSAWLGTMGCGLPGAIAAKKAFPDRQAIAIVGDGGFSMVMQDFVTAVGLNMPMIVVVLNNQQLSFIKYEQQSAGELNYAIDLPDINYAKFAESCGGIGFRVEKMADLEAAFENAKLATKPVIIDVSVDSAAAPLPGKIVMDEALGYTKFEIQSVLEDHRFAKMPPLKTILRRFL

SEQ ID NO: 60367 - protein, 318 aa, Listeria monocytogenes
MANEMEFEKPILELKSKIADLKEYNETSDVDLTNEIEKLEKRLAKLESSIYSNMTAWDKFQVARHPERPTTLDYISLLFEDFMELHGDRTFGDDAAIVGGIATFKGIPVTVIGHQRGKDTKDNLHRNFGMPHPEGFRKALRLMKQADKFGRPIICFIDTKGAYPGRAAEERGQSEAIARNLYEMSDMKVPIISIVIGEGGSGGALALGVGNQIFMLENAVFSVISPEGAAAILWKDASLAKKAAESMRITAGDLFELGITDGIIPEVKGGAHRDLTAQAEEINKTITKSLHALMAFSEEQLIKQRYEKFKKIGVYETI

SEQ ID NO: 60368 - protein, 480 aa, Listeria monocytogenes
MKKFSRFILMMAIACVAAFIFTGNGLNAKAAEEIYLIGTDTTFAPFEFEKDGEHVGIDMDILKAIAKDQNFKYEIKAMGFNAAVQALEANQVDGVIAGMSITDERKQKFDFSDPYFDSGVVMGILKDNDEIKTYDDLKGKKVAVKTGTEGYAFAEKIKDKYDFDIVVFDDSAQMYDDVKTRNSVACFDDYPVLAYGVQTGNGLKIVTEKEKGNSYGFAVNKGKNQELLEKFNAGLVNIKASGEYEKILKNYLGKNAIKENTTEKGFMGIIKSSWPALLSGLWLTIRLAVVSLIIAFIIGITFGFMKVSNSKILRGIATVYVDIFRGTPLIVQAFFFYFGIPAALDFRMPVFLAGVIALSLNAGAYMVEIVRGGIQSVDKGQMEAARSLGLPHKKAMMKVVLPQAIRMMIPSFINQFVITLKDTSIMSAIGLVELTQSGKIIMARTFESTWTWLIIGIMYLIVITILTKISDRLERRLRND

SEQ ID NO: 60369 - protein, 252 aa, Listeria monocytogenes
MNKVVVKNVTFGEGAPKICVPMVGKTVAALKEEAEMLQTIDLDVVEWRVDFFEDVKDLAKVEAALGEIRAILPETPILFTFRSAKEGGELAVSDEFYFELNETLAGTGKIDLVDVELFNEEADVLRLIETAHKNNVKVVMSNHDFDKTPAKEEIVSRLTRMEALGADLPKIAVMPKSAGDVLTLLDATNTVFEKANQPIITMSMAGTGVISRLAGEVFGSAMTFGAAKKASAPGQIDVNELRHVLDLLHKQF

SEQ ID NO: 60370 - protein, 302 aa, Listeria monocytogenes
MTEEKGILLQSGTNELEIVTFTVGENLFCINVLKVKEIIHPLEVTPVPDSNPAIEGVSQVRGEIMPVVNLARVMKLPEIEPENTKFIITELNQMKIVFRVDEVHRIQRISWEQIEEPEKLSIGLEELAVGIVKLDGNLVLLLDYEKIIYEISGNADFAVTGEDRIARKVNREEKTIFIAEDSQMLRQLLEDTLHEAGYTNLQFFANGREAQEHIFKLLKEQKEQTFENVNLLITDIEMPQMDGHHLTKVIKEDEIGRELPVVIFSSLITEDLEHKGAGVGADAQVSKPNIHQLINILDELVL

SEQ ID NO: 60371 - protein, 648 aa, Listeria monocytogenes
MDDTEKRVHKYIEKHDLIRSDDKLLVAVSGGPDSLALLHFLWNSNLVPKEAISVAHLNHQLRENAAKEQRVVETFCERQGIPFYIEEVDIKSRAQSLQKGLEETARIVRYDFFEKVMAEKNINKLVLAHHADDQIETILMRLVRGSASIGWSGIQPKRELKGGQAIRPFLPITKAEIIDYAQKHELAYEIDESNTSQEYTRNRYRAQLLPFLKQENPAVYSHFERFSEETSEDFQFLEALASDLLKKNLIKNGKQTTLLLSSFKNEANPLQRRAIHLLLRYLYNEDASFITVNHIYQIIQMIQSDNPSSSIDLPNKLIANRAYDKLHFQFGEREAPSEFYHQLELNDRIELDNKASIRLKLKSSVVQTNGLNGMLLDAEEITLPLIVRNRVNGDRMTMKGQAGSKKLKDIFIDAKIPRQERDKLPVITDYTGKILWVPGVKKSAYDREFSRSKKQYIIRYTRNIGGNESMHNDIQKVLISEDELQEKIRELGRELTTEYEGRNPLVVGVLKGATPFMTDLLKRVDTYLEMDFMDVSSYGNGTVSSGEVKIIKDLNASVEGRDVLVIEDIIDSGRTLSYLVDLIKYRKAKSVKLVTLLDKPAGRNVEIEADYVGFVVPNEFVVGYGLDYAERYRNLPYIGILKPEIYSE

SEQ ID NO: 60372 - protein, 145 aa, Listeria monocytogenes
MRTTYMAKPGEVERKWYVIDATGVSLGRLSSEVASILRGKNKPQFTPHIDTGDFVIIINAGKIGLTGKKATDKIYYRHSQYPGGLKSRTAGEMRTNNPEKLLELSIKGMLPKNSLGRQLFKKLHVYGGSEHEHAAQQPEVYELRG

SEQ ID NO: 60373 - protein, 135 aa, Listeria monocytogenes
MFNQAKRISTFFTFNGNGEEAFNFYLDTFPDAKKVGLTYFTKPEQGGDIGKVLNATFEMKGASFMIMDMTNNASPNFSWATTTLYFADTEDEFDTLFEKLAKEGTVMMGPEAVEALRKVAWVTDKYGITWQLAFV

SEQ ID NO: 60374 - protein, 370 aa, Listeria monocytogenes
MLVGVPKEIKNNENRVAMTPASVFSYVNAGHTVYVEKDAGIGSNYQDADFVQAGAKIVETAKEAWDVDMVVKVKEPIASEYTYFKEGLLLFTYLHLANEPTLAKALMESKVNSVAYETVELADHTLPLLSPMSEVAGRMAAQIGAQFLQRTNGGMGVLLGGVPGVERSEVVIIGGGIAGTNAAKIAAGLGANVTILDMNLKRLRELDDIFGNQVQTLMSNDFNIETAVKKADLVIGAVLIPGAKAPKLVKEHVVKQMIPGSVLVDIAIDQGGIFETTDHVSTHDNPTYEKYGVLHYAVANMPGAVPRTSTLALTNATLPFGLKLANQGLEAAVQNDPFLLRGLNTYQGHITYKAVADSLDLPYTDSKELI

SEQ ID NO: 60375 - protein, 232 aa, Listeria monocytogenes
MTEIFAHRGSSGTHPENTLPAMKAAILSGADGIELDIHVLKSGELIVMHDERVDRTTNGTGFLKDYTLSEVKKLVIGKRLFRKIRVPTLEEIFKLVSGTDMILNIELKTDVFEYEGIEQKVLALADKFPEVKRMYSSFNPDTLIRLRDLNPTAKLALITHENLDEVLPLHEKIQLDAVHPPVKAMKNPILKQIAARYWTVNKEETITHFIDANVKGMMTDFPERAAALRNNK

SEQ ID NO: 60376 - protein, 331 aa, Listeria monocytogenes
MFKIGNVEIKNQVVVAPMAGISNSAFRLTVKEFGAGLVCCEMISDKGIAYRNAKTLDMLYIDEKEKPLSLQIFGGEKETLVEAAKFVAENTTADIIDINMGCPVNKIIKCEAGAKWLLDPNKVYDMVAAVVDAVDKPVTVKMRIGWDEEHVFAIENALAAERAGAAAVAMHGRTRVQMYEGSANWDVLRDVKRELKIPFMANGDVRTPEDAKRILEHTGADGVMIGRAALGNPWMIYRTVKFLETGELLLEPEPREKMQTAMLHLNRLVELKGENIAVREFRQHAAYYLKGARGSTRAKVAANQATKQSEMEAILNEFVLQYEEKALAKQD

SEQ ID NO: 60377 - protein, 457 aa, Listeria monocytogenes
MAKAKRTTKFVCQACGYESAKWMGKCPNCNEWNQMVEALEPSKKSRSAFNHTGEPSKATPITQIASETEKRVETNMPELNRVLGGGVVPGSMVLVGGDPGIGKSTLLLQVSAQLTLTNKKVLYISGEESIKQTKLRAERLQVSGDNLYVYAETNLEAVQETIDFVKPDFVVIDSIQTVYHSDVTSAAGSVSQVRECTATLMRIAKMQNIAIFIVGHVTKEGAIAGPRLLEHMVDTVLYFEGERHHAYRILRAVKNRFGSTNEMGIFEMRDVGLVEVANPSEVFLEERLEGASGSTVVASMEGTRPVLVEIQALVSPTMFGNAKRMATGIDYNKVSLIMAVLEKRVGLMLQNQDAYLKAAGGVKLDEPAVDLAVAVSVASSYRDKPTRSTDCFIGELGLTGEIRRVARIEQRVQEAAKLGFKRIFIPKNNEGNWKIPKDVQVVGVETIGEALKKALPD

SEQ ID NO: 60378 - protein, 450 aa, Listeria monocytogenes
MAFEGLAGRLQETMNKIRGKGKVNEADVKEMMREVRLALLEADVNFKVVKQFIKTVSERAVGADVMKSLTPGQQVIKIVQEELTSLMGGEESKIGTADRPPTVIMMVGLQGAGKTTTSGKLANLLRKKYNRKPLLVAADIYRPAAIKQLETLGKQLDMPVFSLGDQVSPVEIAKQAIAKAKEEHLDYVIIDTAGRLHIDETLMDELKQVKEIATPTEILLVVDSMTGQDAVNVAQSFNEQLEITGVVLTKLDGDTRGGAALSIRSVTGKPIKFIATGEKMEALETFHPDRMASRILGMGDVLSLIEKAQTDVDTEKMKAMEQKMKDNSMTLDDFLEQLQQVKQMGPLDELLKMMPGANKMKGLDNMNVDDKQLGHIEAIIKSMTKNEKDNPDIINASRRKRIARGSGRPVQEINRLLKQFAEMKKMMKQMTGGGKGKKGKNPFGNFKMPF

SEQ ID NO: 60379 - protein, 81 aa, Listeria monocytogenes
MKTGIHPEYRPVVFVDTSTDFKFLSGSTKSSSETIKWEDGNEYPLLRVEISSDSHPFYTGKQKHATADGRVDRFNKKYGLK

SEQ ID NO: 60380 - protein, 331 aa, Listeria monocytogenes
MTKVYYEDAVKNNALEGKTVAVIGYGSQGHAHSQNLRDNGNNVIIGIREGKSAESARNDGFDVYSVSEAADKADVIMILLPDETQGETYENEIKPNLKAGNSLVFAHGFNIHFDVINPPSDVDVFLVAPKGPGHLVRRTFVEGGAVPSLFAIYQDATGNARDTALSYAKGIGATRAGVIETTFKEETETDLFGEQAVLCGGATHLIQAGFETLVEAGYQPELAYFEVLHEMKLIVDLMYEGGMEKMRHSISNTAEYGDYVSGPRVVTADTKKAMKEVLTDIQNGNFAKSFINDNKNGFKEFHRMRKEQQGHQIEKVGAELREMMPFVKPQH

SEQ ID NO: 60381 - protein, 155 aa, Listeria monocytogenes
MLSIDEIKQLIELIDESTLDEFELETKDSKILLKKHKTVVATAVQEAPIAVTPAQTAPVTPAAAPQVEASTAEDVNLEVITSPMVGTFYASASPEDANFVSVGSKVSAQSVVCIVEAMKLFNEITADIDGEIAEILVSSGELVEFGQPLFKVRKK

SEQ ID NO: 60382 - protein, 623 aa, Listeria monocytogenes
MRNLKDRVLNSLKGNKKDIKISVVVPTYNTELEGLKNLMASIDKQTMNPDEYELVFVDDGSTTDTYERLQEFAETRPNMTVKQIENSGWGSRPRNIATKMAKGEYILYLDHDDTVFPETFERVYNFGKENNLDVVSGKEVRTNGWSWGWKQFSENNPHAEEMGIECLLPMTPHKFYKREFLLENDITFDDGARVLWEDVYFNSKAFIHGAKVGILADYPTYYWIATGANNSSSFGRDPHEKWNQINKLFNFFKDNIKEQRDLDFMLTHWYRSRVLGILGQWLLKNNNERIDIEFNYAKKLAEELIPAYISENLDKNNQVKDYLLRQGDLDSLKKLAQIDAGITALSYVEDAYFKEDKLFFKTSTKMTYEDKEDFFIEKTADRMERILPEEIKSKLPKEFFDYSDDLAEFTYEPSIKGRNSRATWKIDGSTSNVEVVNKKANLYKIEGEMSFSVQINDYILDAADKKQPWDIATRFTGLGYTSHRALTIGKILIKTALINNKTMIVYKNASGLISLDVGSSVRSIVEDSGVKREQILIDKTSGKVTIPLNEIHVFGESLIEGNAELKPVGISDADPINVKAKLIGEANKARVEVLLGDEKLSGEYHLVTNIQGKKDKQQIKITL

SEQ ID NO: 60383 - protein, 537 aa, Listeria monocytogenes
MSSKLMRGTAVLTAGTLLSKILGILYVIPFYWIAGGEQATILYQYGYVPYQIFLNIATAGVPLAVAKYISKYNSLNEYALSQRLYRSSTYLMIFTGIASFLIMYIFAPILAGMQEVSGGTSIEDITTVIRAVSFALLIIPVMSLLRGYFQGFHSMGPSAVSQVIEQIARIVFLLASTYIVLHLIGGSLVTAMSLATFAAFVGAFFSLICLIWYYRKRKPGIQKMIDGSDNKLRVSTFHLLKEISISAVPFIIVGMAMSLYQQIDLFTFARILTYDGMDGKTAEDLLSIFNFSVQKIIMIPGTLALAFSMTLVPLVAASFHKGRIREVHHHLTAVFQVLLFLVVPACLGIALLAVPLYTIFYGYNTDGSMLLQFFAPFAIFFSLFSVTAAILQGIDEQRYTVLSLLLGLLTKSVLQMPLILLFGAKGGALATGLGYIVSVVFTIFIIKKYAKYSFKYLFRRLILILGISAVMLLSVWLIYHGLILFLNPHARLSALVIVFVSAGFGAYIYAFLAAKAGLLNYILGDRMYKIRKKLHLI

SEQ ID NO: 60384 - protein, 305 aa, Listeria monocytogenes
MEKKIRTVLGDISKESLGFTYSHEHLWCCPPSVQKDRDFELTDYESSLEELKTFQSIGGQTLVDASTLDYGRDGNKLKTMSEESGVNVLGVTGFNKHIYFPDWVQEESIEQITDRLIYDIEKGMDGSDARAGILKSGSWYNLIHPLENKVTRAVAWAQKETGAPIWLHTEAGTMGQEMLAILEEEGVNMELVAVGHSDRNADPYYHLKLAEKGAYVQFDGCGKVKYYPDSTRVELVKNMLENGFGDKLLISGDMGRKSYLHAYGGGPGFRFIKTKFIPRLLEEGVTEQQIQTIFYDNPANWLAKF

SEQ ID NO: 60385 - protein, 664 aa, Listeria monocytogenes
MPEEKNTFYITTPIYYPSGKAHIGHAYTTVAGDAMARYKRLKGYDVFYLTGTDEHGQKIQAKAKERGISEQEYVDEIAEGFQELWKKLEISNTDFIRTTQDRHKTSVEKIFEQLLEQGDIYLGEYEGWYSVSDEEYFTETQLEEVYKDENGKVIGGKAPSGNEVELVKEESYFFRMSKYADRLVEYYNSHPEFILPESRKNEMINNFIKPGLEDLAVSRTTFDWGIKVPGNPKHVVYVWIDALSNYITALGYNTDNDTKFQKYWPADVQIVGKEIVRFHTIYWPIMLMALDLPLPKMVFGHGWILMKDGKMSKSKGNVVDPYMLIDRYGLDALRYYLLREVPFGSDGLFTPEDFVDRVNFDLANDLGNLLNRTVAMINKYFDGEIPAYQGNVTEFDQILVDFKNNVVKEYEGSMDHMQFSVALNQLWSLISRTNKYIDETAPWALAKDEDKRTELASVMTHLAENLRIIAVLLQPFLTRTPGEIFLQLGLQEENLKKWDSIYGYGEIPAGTTVVKKGTPIFPRLDAEVEVTYIQDEMKGSAPAPAEEVAEVEALETPQIGIEDFDKIDLRVAEVKQVDKVKKADKLLCFQLDLGEGKLRQVLSGIAEFYQPEELIGKKVIVVSNLKPVKLRGLMSEGMILSGEKDGKLSVIEASSALPNGAKVK

SEQ ID NO: 60386 - protein, 482 aa, Listeria monocytogenes
MSHRLLGRVMLLLGALGVILTMSFSYVAAAEKPNIDKPVKGLEQTEKAIVADDYNKAKDAFQEDKLWWSENKQVVKEKSYDLAGQIDRQIAEISLGILNNDKQQAMDGITSLHNLLKTYQDGTYTDNEGNTNITLSSYIAKLTATKKLVDEKEWAKAATQIQDLKTEWLAVEGDVVSQSQAAYDNTERDLMLLDAYINDPAKQAKTADVLDGMTEELKPFADVTYTWFDAALIPFREGLEALLIIATLLTYTKRTKTRTAKRWIIGGTAAGLVVSLALGMIVAFWLSALAFGDNNNLINGWAGLIASIMMLYVSYWLHRNSDITRWNNYMEGKSNQALSNGKMISFAFLAFLAILREGLETVVFLIGMVGRMSNFELLMGILAGLGVLLIIAFVMLRYSVHIPVKPFFMISSAIVFYLCFKFMGSGIHSLQLAGVIPTSVEDYLPSIPALSIYPSWYSFLPQVLLVIFGLTILIKQQIKKKS

SEQ ID NO: 60387 - protein, 151 aa, Listeria monocytogenes
MEYEQLLQNELGELEIIQEELQNKEYRGMIVKTAKDGTTIRTRLAKKTDKKAGYFVAFWEKDEFGKNCPFDENDCADFLCIVVIDGDLNGLFVFPRQCLIDKGILTSEASIGKMAARFYPTWCQDLNKTAKKTQAWQQVYFKNYSIRKEDH

SEQ ID NO: 60388 - protein, 476 aa, Listeria monocytogenes
MNFETVIGLEVHVELKTNSKIFSSAPAHFGAEPNTNTTVVDLGMPGVLPVLNKRAVEFGMKAAMAINCEIAEHTKFDRKNYFYPDNPKAYQISQFDKPIGEHGWIEIEVGGKKKKIGITRLHLEEDAGKNTHTSHGYSLVDINRQGTPLIEIVSEPDIRSAEEAYAYLEKLKSIIQYTGVSDVKMEEGSMRCDANISIRPIGQEEFGVKTELKNLNSFNNVRKGIEYEEKRQAEVLKSGGIIEQETRRFEEATGKTSLMRIKEGSDDYRYFPEPDLVDLFIDDAWKERIRAEIPELPDKRQIRYINDLGLPAYDAMVLTLTKEMSDFFEATLVAGADAKQASNWLMGEVSAYLNAEQKELHETGLTPENLAGMIKLIEAGTISSKIAKKVFRELAQNGGDAEQVVKDKGLVQISDEGALRTIISEILDNNEQSIVDFKNGKDRAVGFLVGQVMKATKGQANPPMVNKLLLEEMNKR

SEQ ID NO: 60389 - protein, 246 aa, Listeria monocytogenes
MKIKSFLGKSLTLVVLGVFLFSGWKIGMELYENKHNQTILDDAKAVYTKDAATTNVNGEVRDELRDLQKLNKDMVGWLTIIDTEIDYPILQSKDNDYYLHHNYKNEKARAGSIFKDYRNTNEFLDKNTIIYGHNMKDGSMFADLRKYLDKDFLVAHPTFSYESGLTNYEVEIFAVYETTTDFYYIETEFPETTDFEDYLQKVKQQSVYTSNVKVSGKDRIITLSTCDTEKDYEKGRMVIQGKLVTK

SEQ ID NO: 60390 - protein, 220 aa, Listeria monocytogenes
MSLFFEEWGPILWQGFLETLTMTGITLVISLAIGLPLGVFLTLTRKGGQSENLVAYSILNWVINILRSLPFIILLFLMIPVTRFVVGTTIGIQGVIMPLVVFTAPYIARLMESALLEVDRGVVEAYQAMGISTPKIIWSVVIREARSGIVLGLTIATIGLIGATAMAGLVGAGGLGTIAYQYGFQRFEPTVMYTTIIILIIMVQALQSFGNFLSRRLKKD

SEQ ID NO: 60391 - protein, 224 aa, Listeria monocytogenes
MSKLQELFPNVDFQMMWVATQETLYMTLVSLFAVFLLGIVLGLLLFLTNNKKHAGARILYWVTAILVNVFRSIPFIILIVLLLPMTKSLVGTVIGPKAALPALIISAAPFYGRMVEIAFREVDKGVIEAAKSMGANMFTIIGKVLIPEALPAIISGITVTAISLVGFTAMAGVIGAGGLGNTAYLEGFQRGQPDVTVLATIIILIIVFIFQFIGDFLTKRTDKR

SEQ ID NO: 60392 - protein, 231 aa, Listeria monocytogenes
MNTNRKKATPLFVIGGFCLILFITIASAIATESNWVARFDLSWIEKIRSGIQPDKTAIVKFLTTLGSAETTIILTIVVVLILFFLRKFVVGLWFGGTMLVCGVVLNLVLKSLVGRTRPASVNWLVSESGFSFPSGHATATAVFYGLAAMFLIFTVPKMWQKIVIGIIGYGFILFVMYTRVYLGVHFPTDVLGGFFLGTASVFISLGVYFLVRKPLHNLLVKWRIKDKSITE

SEQ ID NO: 60393 - protein, 92 aa, Listeria monocytogenes
MGRSLKKGPFVDDHLMKKVEAAAESEKKQVIKTWSRRSTIFPTFVGQTIAVYDGRKHVPVYVQEDMVGHKLGEFAPTRTYRGHAGDDKKTKR

SEQ ID NO: 60394 - protein, 396 aa, Listeria monocytogenes
MAKKVVTDLDLKDKKVLVRVDFNVPMKDGKITNDNRIVAALPTIEYILEQNGKAILFSHLGKVKTEEDKEGKSLRPVAVRLSELLGKEVKFVPTTRGPELEKAIDELKDGEVLLFENTRFEDIDGKKESKNDPELGKYWASLGDVFVNDAFGTAHRAHASNVGIASNLESAAGFLMEKEIKFIGGVVDNPARPLVAILGGAKVSDKIGVIENLLTKADKVLVGGGMTFTFMAAQGQEIGKSLLEADKVELAKGLLEKAGDKLVLPVDAVVSKEFSNDAPFHTVSADSIPADEMGLDIGQATIDLFTKELQGAKTVVWNGPMGVFELSNFAKGTIGVCEAIANLTDATTIIGGGDSAAAAMDLGFADKFTHISTGGGASLEYLEGKELPGVASISDK

SEQ ID NO: 60395 - protein, 340 aa, Listeria monocytogenes
MNVFEPRLSSWLENAGDDDDVVLSSRIRLARNLKDEQFPIYEQKEEIVDNIAEVFDDNFILIKMNQISLLQKALLVEKHLISPYMMNKSEYGAVLLNEEENVSIMLNEEDHLRIQCMTPGLRLFDALEAALQIDGYVEEKLSYAFDKEFGYLTSCVTNIGTGMRASVMVHLPGLVTTKRIKSVIEAIRSLGFVVRGIYGEGSMPASNIFQVSNQVTLGKTEAEIVEDLTQVMEQIIMQERVARTTLKQKFHIALEDRVFRSYGLLMNCRIISMKEAADAISDIRFGVELGFFEHISRQKMNELVLFSQPAFLRREAGRDMDELEEKVIRAKVIREILGDK

SEQ ID NO: 60396 - protein, 779 aa, Listeria monocytogenes
MSKVRVYEYAKEHQVSSKKVIEALKDLGIEVANHMSTINENALRQLDNAVDGTNKKAEAPKKETTSNENGNSKGPNKPNMTNSNEKSNKPNKPAGQANKPATANKSQGAKPATNKPANTSNQTQSSGTQQQAGGQKRNNSNRPGGGNSNRPGGNNRPNRGGNFNNKGRNTKKKGKLNHSTVPPTPPKPKELPEKIVFSESLTVAELAKKLYREPSELIKKLFMLGVVATINQSLDKDAIELICDDYGVQVEEEIKVDVTDLDVYFENELNEAVDESKLVERPPVVTIMGHVDHGKTTLLDSLRNTKVTLGEAGGITQHIGAYQLEIHDKKITFLDTPGHAAFTAMRARGAQITDITILVVAADDGVMPQTIEAINHAKAAGMPIIVAVNKIDKPQANPDRVMQELTEYELVPEAWGGDTIFAPISAKFGEGLENLLDMILLVSEVEELKANPDRRAIGSVIEAELDKGRGPVATLLVQDGTLNIGDPIVVGNTFGRVRAMVNDLGRRVKKVGPSTPVEITGLNDVPQAGDRFVVFEDEKTARNIGETRASRALVAQRSATNRVSLDNLFEHMKAGEMKEVNVIIKADVQGSVEALAASLRKIDVEGVNVKIIHTAVGAINESDITLAAASNAIVIGFNVRPTAQAREAAENESVDIRLHRVIYKAIDEIEAAMKGMLDPEFQEKIIGQAQVRQTINVSKVGTIAGCYVTDGKITRDSGVRIIRDGIVVFEGEIATLKRFKDDAKEVAKGYECGITVQNFNDIKEDDVIEAYVMEEIERK

SEQ ID NO: 60397 - protein, 308 aa, Listeria monocytogenes
MTIANSITDLIGKTPIVKLNRLPEAGSADVYVKLEFQNPGGSVKDRIANAMIESAEKSGALKPGDTIIEPTSGNTGIGLAMVAAAKGYQAIFVMPETMSLERRKLLQAYGAKLVLTPGPDGMKGAIAKAEELAKENNYFVPQQFHNPANPAVHEETTGPEIVEAFGKDGLDAFIAGVGTGGTVTGVGHVLKKNYPDVKIYALEPEESPVLSGGSPSPHKIQGIGAGFVPDTLDTKVYDGILKVSSEDALETAREVAKKEGILVGISSGATIKAALDLAKELGAGKKVLAIVASNGERYLSTPLYNFED

SEQ ID NO: 60398 - protein, 464 aa, Listeria monocytogenes
MTYKFPENFWWGSAASGPQTEGAADVDGRKPSIWDHWYKIEPGRFFNDVGPTNTSNFYYQYKEDIALMKQTGHNSFRTSIQWSRLIPDGIGEVNPKAVDFYNRVIDEMLANDVEPFMNLYHFDMPMSMQEKGGFESREVVDAYATFAKTCFELFGDRVKHWFTFNEPIVPVEAGYLYDMHYPNVVDFKRATQVAYHTTLAHALAVKEFHALEIPEGQIGIILNLTPSYPRSQNPADLKAAHIADLIFNRSFLDPVTKGEFPTDLVEIIREHDALPEYTEEDLAIIKNNIIDILGVNYYQPRRVKAKEYAAHPDAPFMPEHLFDNYEMPYRKMNPYRGWEIFERAIYDIAINLRDNYDNIPFFISENGMGVEGESRYRNADGMIEDTYRIDFIKSHLKWLHKAIEEGANCHGYHLWTFMDCWSWANAYKNRYGLVEVDLDNDFKRTVKASGHWYKELAENNGFED

SEQ ID NO: 60399 - protein, 389 aa, Listeria monocytogenes
MKEVVIIDAVRTPIGKFGGSLKDISAVDLGATALKGVLERANIAPERVDQVIFGNVLQAGLGQNVARQIAIKAGIPYKVPGVTINEVCGSGLKSVMLGRQAIQLGEADIVAVGGTENMSQAPLLLNPELAGEEINPKKLRNSMLIDGLTDVYGEYHMGITAENVAEKFSVTREEQDEFAHNSQMKAASAQEKKLFEEEIIPVKLPDGSFFEADETIRANSTLEKLATLKSVFKEGGTVTAGNASGINDGASAIILMSKEKAVAENIPYIATIKVTSEVGVDPALMGYAPYYAVNEALTKGGYSIDEIDLFHLNEAFASQSVAVARDLKIPEEKLNIYGGAIALGHPIGASGARIIASLLNELKHENKHIGVASLCVGGGIGIAIILERA

SEQ ID NO: 60400 - protein, 1157 aa, Listeria monocytogenes
MTLQIIAGRSGTGKTTHLMDEVGEKIKQNSKTYIFIVPDQMTFQMETSFLNKENLAGMLGTQIFSFSRLAWKILQETGGLSKTFLSQTGIEMVIRKAALDQKDKLKIFSRATSRKGFYSELANLFKEMKQEEVSIEDMVKSATNLSTSVNNKVHDISLIYQKYEELLADKFLENEDYLRLLAEKIADSDYLNQTEIVIDGFTSFSKQELTVIGELMRKCDKVTISLTLNVPEIQHGLDEYSMFKASTEAYYALLELAKLNGTQVEENKFFLENKRAKTESLAFLANTWGHNKFMSFKNEPQNLKIHQANNRRAEIEGIAREIRQQALNGYRYRDIAILTRNLGDYDVLCETVMEAYNIPTFIDKKRAMAKHPFIEFIRSSLDAILFNWKYEPIFQAVKTEFFFDITEKSSLNRRKADILENYVLENGIQNKWKWEKEGDWIYRKIRGLSTNVLPQTDEEIHMQSIINEMRNLIVNPLSTLELNLRKAKTGMEFALALYHYLEQVNAVERLESWRQRAEEQGYLELAREHEQAWSSISALLDEFVEVLGEETLDLDSFTEIIGTGLDALEFSLLPPSLDQVVLSDMENAKLLDMKVIFAIGMNDGVMPLRQKDKGIFSDQDRDALRAEDSKLKPSAKNNIGEEDLLAYKIISLPSDKLFLSYPAADEEGKVLSESNYLRKIKGQFNELNESVYLTDPSLLSDAEQSSYIRSKQATLGLLTSQLQMYKRGYTLSSVWWDAYNSYFENEKESIMAKQVLSSLYYENKTKPLQETTAKNLFGETIHASVSRMEKFFSCEFQHYAQYGLKLEERGHFQLQAVDMGEIFHGAMEWISAELKRNNLDWGNLTEEECKQMAKLAMTFLAPKIQHEILLSSKRMEYIQYKLLQIITRATTVLNEQAKSSAFRPVGLEVDFGLKGDIPPLKIPLQSDSELLLQGRIDRIDMAEQDDRTFLRIIDYKSSSHDLALTEVYYGLALQMLTYLDIVVTNAQKMIGKTAEPAGVLYFHMHNQYVQAEKELSDEAIAKELQKSSKMKGLILSDPVAVSLMDMTLEKGKASTIIPAEIKQNGELSARSRTATRAEFDKMRQFVRHKYQEAGNKILDGAVSINPYKLKERTPCQFCSFRSFCGFDPSLTSNQYRHLANEKAETILTKMDIEGGTQ

SEQ ID NO: 60401 - protein, 266 aa, Listeria monocytogenes
MDVESSPLMQKIDYSTRKKIDLVNNSILRYIVRAMLACLFLTLGTAVAVMIGDKVDHFAPGLGKITYAFMFSWSLVMIIYMNAELGTSNMMYMTTGVYQKIVKPGKALQILLLCIVCNLLGGILAGYLVSLTSVFHNLPADHFLFTAVSGKLEKAPLQIFVEGIFANIVVNTAVLCTLRMKDDAGKVIAMIFIIFIFAFLGFEHVIANFSSFSLAFFASGGTLAAMTAGNVTVNLVLALLGNFVGGGLVIGLGYAWLNRTKSIYKD

SEQ ID NO: 60402 - protein, 325 aa, Listeria monocytogenes
MAQKTMIQAITDALAVELEKDENVLVFGEDVGKNGGVFRATEGLQEKFGEDRVFDTPLAESGIGGLAIGLALEGFRPVPEIQFFGFVFEVMDSVAGQMARMRYRTGGTRNAPITIRAPFGGGVHTPEMHADNLEGLMAQSPGLKVVIPSTPYDAKGLLISAIRDNDPVIFLEHMKLYRSFREEVPEGEYTVEIGKAAVRREGTDVSIITYGAMVQESMKAAEALEKDGVSVEVIDLRTISPIDVETIIASVKKTNRAVVVQEAQKQAGIAANIVAEINDHAILSLEAPVMRVAAPDSVFPFSQAETVWLPNHNDIIERVKEVIAF

SEQ ID NO: 60403 - protein, 763 aa, Listeria monocytogenes
MKWGLQMTTYIVKDGGNRKLPFDKSRLDGYLEKIHEEFPKLDLEDYKRKVFNFVEKKEDYAADELVDYLIREAEARTDIHIPEWEHFAARLYLNKLYKKASKNRFYNDDDKYGSYVGLQESLGERGIYSGNILKNYSKEDLIAAGKLIDPEKDKLFTYNGLYLLATRYLATDSERNVYELPQERWLTIALYLMQNEPKEKRMKLVEEAYWALSNLYMTVATPTLANAGKVGGQLSSCFIDTVDDSLQGIYDSNTDVARVSKHGGGVGAYLGYVRSTGAAIRGVKGASGGVIPWIKQLNNTAVSVDQLGQRKGAIAVYLDVFHKDIESFLDLRLNNGDQRLRAHDVFTAVCIPDIFMEAVERRGEWYLFDPHEVKAKKGWYLQDFYDESKGEGTFREKYEELVADETISKKIVKAIDIMKRIMMSQLETGNPFMFYRDEVNRMNPNKHEGMVYSSNLCTEIMQNMSPTKMIQEIISGDQIVITKQAGDFVVCNLSSVNLGRAVVAEEGTLERLIEVEVRMLDNVIDLNELPVPQATITNQKYRSIGLGTFGWHHLLALKNIAWDSEEAEKYADELYEQINYLAIRASNKLAQEKGAYKVFKGSDWNTGEYFARRNYNSPEWQELAKEVAEKGLRNAYLVAVAPNMSTAQIAGSTASIDPIYSAFYYEEKKDYRRPVIAPDLNLSTYPYYEKGAYKVDQFASVRQNGRRQRHVDQSLSFNFYVPSGIKASKLLELHMTAWNEGLKTTYYVRSNDIDVEECEWCSS

SEQ ID NO: 60404 - protein, 301 aa, Listeria monocytogenes
MTERALQVTNLHKKIRKREIIKGISFEVMPGEVFGFLGPNGAGKTTTIRMIVGLIKPTSGTILIGGKDIRKNFTEAMRGLGSIVENPEFYTFLTGQENLAYFARMDSSIKKERIQEVTELVGLEKRINDRVSTYSLGMRQRLGIAQALLSNPKLLILDEPTNGLDPSGIHEMRDFIRALARNEGISVLVSSHLLSEIELLCDRVAIMTDGTIIKTDQVAHLLSSRAQLRWRVTPIEQAKAFLESVTEVEVDGEYLVTAMNEESAEWNEQLVAKGIKVHEIDKRKPSLEDLFLELTGGQSID

SEQ ID NO: 60405 - protein, 61 aa, Listeria monocytogenes
MSEDKGMKDKAKGLKDKVVGDAKDKFGKATDDKGKQVEGKAQKAKGEVEDKTGDAKKKLSE

SEQ ID NO: 60406 - protein, 84 aa, Listeria monocytogenes
MPNIKSAIKRVKTAETRNSRNASQRSAMRTAIKKFDEAAANNADNAKDLYVEASKKLDSAVSKGLIHKNNAARNKSRLAAKLAK

SEQ ID NO: 60407 - protein, 463 aa, Listeria monocytogenes
MMKHLTLWHTNDVHSHLEHWPRIFNFLKEKRTAADKENQSALFFDIGDFLDRVHPLTEGTNGLANTDLLNQLPYDVVTFGNNEGTTLAHEDLDKLYEHAVFPVVCCNFYTNKECTEQPDWVKSIVYKEIEQVKIAIIGATAPFRDYYEEMGWGIEEPISSIKKQVAGLDEDTDVVILLSHLGLPSDERIALEIPEVDVILGGHTHHLLETGKIEGNALLAAAGRWGEYIGKVDIELDENNQILTKTAMTFKTEDLPAAPNEANEIQGFFDKGRAELSEKVVAIPGKLAHNWFDDSEIAHILNEAVCEWTGAETFVMNAGIFMTDFEAGIVTDFDIHQMLPHPLNAIALTMSGEELEILIDGIYRKKAELQDIPLRGFGFRGEYFGTVLMERAGFDAENQVALFDNKPIDKTREYRIATHDTFVFAPFFPIVKQIKRKEVYTPELLRDILKWKLKKMYGQEEDK

SEQ ID NO: 60408 - protein, 135 aa, Listeria monocytogenes
MGYRKLGRTSSQRKALLRDLATDLIVFERIETTEARAKEIRKVVEKLITSGKKGDLHARRQAAAFIRHEVVEVVQVDAKGKDGSTVKKNRPVYALQKLFDDVAPRYAERQGGYTRILKKGPRRGDGAPMVIIELV

SEQ ID NO: 60409 - protein, 126 aa, Listeria monocytogenes
MISWIIAIIILVILLGYEIYQFVMRRKAVKVLTEEEFKKGYRKAQLIDVREPNEFDAGHILGARNIPVTQMKNRTTEIRQDLPVYLYCQTAQRSNRAAIMLYKRGYKQVYQLKGGYRKWTGKTKSK

SEQ ID NO: 60410 - protein, 308 aa, Listeria monocytogenes
MRVIDTHCDALYKLQAGKGKYTFQDAEELDVNFERLIEAKMLLQGFAIFLDEDIPVEHKWKKAVEQVNIFKQHVLHKGGIIHHVKKWCDLENLPEDKIGAMLTLEGIEPIGRDLDKLTQLLDGGVLSVGLTWNNANLAADGIMEERGAGLTRFGKDIIHLLNERKVFTDVSHLSVKAFWETLEQAEFVIASHSSAKAICAHPRNLDDEQIKAMIEHDAMIHVIFHPLFTTNDGVADIEDVIRHIDHICELGGMKNIGFGSDFDGIPDHVKGLEHAGKYQNFLETLGKHYTKEEVEGFASRNFLNHLPK

SEQ ID NO: 60411 - protein, 76 aa, Listeria monocytogenes
MEELILSIVKPLVDHPEDVVITPEETDTSLTYKLSVSKEDMGRVIGKQGRIAKAIRTLVYAVGSKNDKKIRLEIIE

SEQ ID NO: 60412 - protein, 91 aa, Listeria monocytogenes
MANKTDLVNSVAELADLSKKDAAKAVEAVFETIQTSLSKGEKVQLIGFGNFEVRERAARKGRNPRTKEEIDIPASKVPAFKPGKALKEAVK

SEQ ID NO: 60413 - protein, 489 aa, Listeria monocytogenes
MGKATGFMEYDRIPSPGRDPKSRTRDWNEYSLPMPVADLTIQAARCMDCGVPFCSVGMEIKNGVSGCPLHNLIPEWNDAVYRGDWYEALQLLLKTNNFPEFTGRICPAPCEGGCTVAISEPAVGIKSIEKAIIDRGFEEGWIKPAPPKKRTGKRIAVIGSGPAGLACADQLNKAGHSVTVIEKSDRIGGLLMYGIPTMKLEKEQVTRRVNLMAEEGIEFVTGVAAGTDVTFAELREEYDSIVLATGAGNARDIPLAGRDAAGIHFAVPYLSQSTRDNLDNGGIQTLSAKGKNVVIIGGGDTGADCVATALRQGAKSIYQFGIQDKLPELRDGENPWPQYPRVFKMDYAHEEAEAVYGRDPREYLINTTSFEKDEAGNLIGLHTVEVEENKAERKYTPVEGSEKYFEVDMVLIAIGFAGTTEDIFTNFGVGKTDRHTIDAAKGFYRTSEEGVFACGDARHGQSLVVTAIAEGREAAREVDFYLMGETFLP

SEQ ID NO: 60414 - protein, 44 aa, Listeria monocytogenes
MKRTYQPSKRKRKKVHGFRTRMSTKNGRRVLASRRRKGRKVLSA

SEQ ID NO: 60415 - protein, 319 aa, Listeria monocytogenes
MSDYQVLLYYKYTTIDDPETFAKEHLAACKEMELKGRILVATEGINGTVSGTVEATNKYMDYMANDARFADMVFKIDAADAHAFKKMHVRPRAEIVSLSLEEDVNPLEVTGTYLEPSEFREALLDEDTVILDARNDYEFDIGHFRGAVRPDIQNFRELPGWIEDNREQLADKKIVTYCTGGIRCEKFSGWLKTAGFDDVSQLHGGIATYGKNEETKGELWDGQMYVFDERIAVPINQVNPTIVGKDYFDGTPCERYINCANPYCNKQILASVENEKKYLRSCSHDCRVHPANLYTKNLSKEEFTERLQAINESSPEMVQ

SEQ ID NO: 60416 - protein, 319 aa, Listeria monocytogenes
MKRIAILTSGGDAPGMNAATRAVVRKAIYEGLEVYGINYGFLGLVNGDIRKLELGSVGDLLHRGGTFLYSARYPEFATEEGQLKGIEQLKKHQIDGLVVIGGDGSYHGAEALTKRGFPTIGIPGTIDNDISGTDFTIGFDTALNTVLDALDKIRDTATSHERTFIIEVMGRDAGDIALWSGLAGGAEAIIVPEESFNMDDVVDRLNKGRERGKKHSIIVVAEGVMSGNEFAKQLAEYGDYHARVTVLGHVQRGGSPTAFDRVLASRLGARSVELLLENRGGLAVGIRENRIVENDISEILKEKHTLDQKLFDLASILSI

SEQ ID NO: 60417 - protein, 601 aa, Listeria monocytogenes
MAKHIVELTDALSNKIAAGEVVERPASVVKELVENAIDAGSTVIDILVEEAGLNKITIIDNGSGIEEEDVATAFLRHATSKIKNEADLFRVHTLGFRGEALPSIASVSHLAMETSTGETKGTSISLEGGKIIEQKSGHARKGTQIEVSQLFFNTPARLKYLKSLPTELGNITDILNRLALAHPDISFRFSHNGKPLLQTNGNGDLRQVIAAIYGISIAKKSIPVKAESLDFKISGYAVLPEVNRSNRNYISTIINGRFIKNFALVKAIQEGYHTLLPIGRFPIIVLQIEMDPIIVDVNVHPAKLEVRLSKEKELGQLISQMIKEAFHKLQLIPEGEISKKQKEVQKSEQIQMSFEENKPAKEIPTLFSKPTIPEYVPSDEDAPREDDFILETMPPYEPQAEQEEHSKERIPKMYPIGQMHATYIFAQNENGLYIIDQHAAQERIKYEFYREKIGEVSRELQELLVPIVLEFPADEYVRLEEQKAKLEEVGVFLENFGQNSFIIRAHPTWFPKDQEEEMLREIIDEALSAPSISIHKLREDTAIMMSCKKSIKANHYLTTQDMEALLDTLREASDPFTCPHGRPVIIQYSTYELEKMFKRVM

SEQ ID NO: 60418 - protein, 520 aa, Listeria monocytogenes
MTKFSEFGLDEKIVKSVNRMGFEEATPIQEKTIPLGLEGKDLIGQAQTGTGKTAAFGLPMIHKIDQKSNNVQALIIAPTRELAIQVSEELYKLSYDKHVRVLAVYGGSDISRQIRSLKKNPQIVVGTPGRILDHINRRTLKLDHVETLVLDEADEMLNMGFIDDIETILKEVPAERQTLLFSATMPDPIRRIGERFMHSPELIRIKAKEMTALLIEQFFVKVHEKEKFDVLSRLLDVQAPELAIVFGRTKRRVDELSRALDMRGYVAEGIHGDLTQAKRMSVLRKFKEGKIDVLVATDVAARGLDISGVTHVYNYDIPQDPESYVHRIGRTGRAGKEGMAITFVQPREMGYLRIVEETTKKRMQPLQAPTWDEAFAGQLRVATEKIQEAITEENLADYKTFANELLEKYDATDIAAAMLKMLAKEPDKTPVHITEERPLPSRGGGGYKGKNGKGGKGGGYRGGSGKGGSYRDRNNSGKGRRSGGGSGGGSGSGGGGNRDRRGGGEQRSGGNKGNYSQKSK

SEQ ID NO: 60419 - protein, 450 aa, Listeria monocytogenes
MGKYFGTDGVRGVANSELTPELAFRLGRMGGYVLTRHVGEHPRVLVARDTRISGEMLESALIAGLVSVGIEVMRLGVISTPGVAYLTKAQGASASVMISASHNPVDDNGIKFFGSDGFKLSDDQEEEIEQLLDTAEDTLPRPSGEGLGTVSDYFEGKQKYIQYLKQTIENDFNGYHIALDCANGATSGLATHLFADLDADISSMGASPNGLNINDGVGSTHPEALAAFVLDKKADVGLAFDGDGDRVIAIDEIGQIVDGDKIMFICAKYLREQGLLNNNTIVSTVMSNLGFYKGLKELEIEDVQTAVGDRYVVEAMREGNYNLGGEQSGHIIFLDHNTTGDGLLSGIQLINVMKATGKKLSELAAEMKTFPQKLENIRVSDKNHVTDNPKVSKVIDEVEAEMAGNGRVLVRPSGTEPLVRVMVEAATKEETDEYCERISAVVRSEMALND

SEQ ID NO: 60420 - protein, 413 aa, Listeria monocytogenes
MDKRRVVVTGVGAVTPIGNDAETSWENAKKGVNGVAKMTRLNPDDFPVKIAAELKDFDVEKYLEKKEARKMDRFTHYAIASAEMAVQDSGLVIDDSNANRVGVWIGSGIGGMETFETQYEIFLNRGHRRVSPFFVPMMIPDMGSGQVSIRFGAKGINSTTVTACATATNSIGDAFKVIERGDADAMITGGAEAPITKMSLAGFTANKALSLNPDPETACRPFDKDRDGFIIGEGAGIVILEEYEHAKARGAKIYAEIVGYGATGDAYHITAPAPNGEGAARAMKMAIDDAGLTPDKVDYINAHGTSTPYNDEYETQAIKTVFGEHAKKLAISSTKSMTGHTLGASGGIEAIFALLTIRDNIIAPTIHLKNQDEVCDLDYVPNEAREANVNVVISNSFGFGGHNATLVFKRIED

SEQ ID NO: 60421 - protein, 448 aa, Listeria monocytogenes
MKKDKTERTKQSWRKAQNAPSLSEVNNSVAIPKNAKFFRKLFAFMGPGALIAVGYVDPGNWATSIAGGSEFGYTLLSVILISNILAVLLQSLASKLGIVTGRDLAQASSDHFSKPFGFVLWILAELAIIATDIAEVIGSAIALNLLFGIPLIWGVCITALDIFLVLFLQHKGFRYIEVIVITLMVTILVCFGAEMVMSHPDMQAIAKGFIPQSEIVTNPAMLYIALGILGATVMPHNLYLHSSIVQTRQYARTKEGKKEAIRFSFIDSTFSLTIALLINASILILAAAAFYTTGQHNVAGIEDAYKLLNPTLGSSIASTVFAVALLASGQNSTLTGTLAGQIVMEGFLNIRLKPVVRRLLTRVLAIVPAVIITALYGANGINELLIFSQVILSMQLSFAVIPLVMFTSDKQKMGEFVNPTWLKIISWAVAIFIAVLNIYLLFYTLTSL

SEQ ID NO: 60422 - protein, 281 aa, Listeria monocytogenes
MNLLKKWFSSIDWDQFWNHIISVGIKIAILIALYFIFRVIGNKIIRSFFRKYRQQQAVSVGRADTLESLISNFYGYVLFFTFAILLLQNFMDVTAIIASAGVASLAIAFGAQGLVSDVVTGFFILLERQLDVGDTITIGLVNGTVEALGLRTTQVRDFDGTLHFIPNRQIMVVSNHSRGNMRVMVDIQISPHEDPEKAIKIIGEVCDVAAKENKNIVEPPVVLGVQNIDATNMIIRVVGKAVNGEQYSVQRDLLKDIREALAENKIELPLNFVSTFGPNNN

SEQ ID NO: 60423 - protein, 229 aa, Listeria monocytogenes
MAKKGKKYQDALKQIDANKVYTAEEAVELAKKIDFAKFDATVEVAFRLGVDPKKADQQIRGAVVLPNGTGKTQRVLVFAKGEKAKEAEAAGADYVGESEFVEKINQGWFDFDVIVATPDMMGEVGKLGRVLGPKGLMPNPKTGTVTMDVTKAVNEIKAGKVEYRVDKAGNVHAAIGKVSFDAAKLVENFRTVNDVLQKAKPAAAKGTYVKNLSVTTTFGPGIKVDPASL

SEQ ID NO: 60424 - protein, 295 aa, Listeria monocytogenes
MSKDIATPGRTTEILKKYGFLFKKSLGQNFLIDSNILTRITDTAEITKETNVIEIGPGIGALTEQLAKTANEVVAFEIDQRLLPILDDTLSAYNNVKVVHGDVLKADVEEVIAEQFAKPELPLKIVANLPYYVTTPIILKLLHDNIPADSMTFMLQKEVADRISAVPSTKSYGSLTIAIQFYMEAELAFIVPKTVFMPQPNVDSAVIHLKRRKEPLAEVNDEEFFFEVTRASFAQRRKTLWNNLASKFPALKPRKDELVEGLNAIGIDLIRRGETLDIPEFAKLSNFLGDFLKEK

SEQ ID NO: 60425 - protein, 562 aa, Listeria monocytogenes
MSNSKFIITELYWERIQLHVKGKIENISLENYTFSFRTLTDEFHFSPTGIKLEGNTFDLRFNIAILNDGNYLPSGDYLLSLYNSETADEIVAQPAAELYKFPEDEDLLEELNEAKTENEKNNVLLAGLRKEFKRGGANLKYTYKVTPMISADVNEFVFSVSFTIPVPKPTKWQVFKNKIKEMYHTFSFNFRTGLFKSIFYTSQALVPKNGKRILFSSDSRAEIGGNFEFVLNKMKEMGIDKDYKIKMTFKPNIRLRRAFIEKFRFPFLLGSSDIIFIDDYHPMIYTIDFSEKTQVIQLWHACGAFKTVGFSRSGKQGGPFFDDRAHRNYTRAIVASDTDIPFYAEAFGIKESSILPTGVPRTDIFFDPEYKRNIVTTMEQLFPETQGKQVILFAPTFRGNGANQAHYPYFKINLAKFAEYCRKNNSVVIFKMHPFIKNEFIIPEQYADVFIDASSYREVNDILFITDILITDYSSVIFEFSTLQRKMLFYAFDLEDYVSTRDFYEEYEGFVPGKIVYDFEALIKALEMNDFEQEKVKPFLDKHFKYQDTNSAKRIVEEIFKK

SEQ ID NO: 60426 - protein, 264 aa, Listeria monocytogenes
MTHFNALLAKEWLEQRRSLKIIWLPIVFALLGLTQPLMMYFLPEILKAVGTGAETEQVVALMGNQSAQEVMAQTLGSQFDQIGIIIIIVVAMACIQNDRTRGMLAFIMTRPVSAVEYVLSKWVMQCVVGLSSLLIGYVLAAYYTYFLFGELAINSLVEGFFVYAVWFIFVISLVVFASSIFDSNAVVAMISVFIAIVLGLISGLGGWIQIFNPAYLSKNATMLIMSGKTMDYFIPTILITAAWIILLVGLTVLMIKIKALPKTE

SEQ ID NO: 60427 - protein, 403 aa, Listeria monocytogenes
MSKPKIVILGAGYGGLKTLRKLQQRNLEAEIVLVNKNDYHHETTWLHEAAAGTIEPEKLMYPLDKVVNDTKTTFIQDTVVKINKDEKTVTLDANGDISYDYLLIALGSEAETFGISGLKEYAFTITSVESVKKIRAHIEAQFAKWKTDPRDELLTIIVGGAGFTGIEFLGELTNRIPELVKQYDVPREKVRIYCMEAAPKVLPQFDAKLVDYGVGVLEDRGVEFHVGKPVKEATADGVKYAESENEVREIKAATIIWAAGVRGNSVIEASGFEAGRGRVKVNNNLTVPGNEEILIVGDCSLIINPANDRPFPPTAQIAMQQADVAAVNLAKLVKGETDLQDFVYHEKGTVCSLGDNDAIGVVFGKNLKGYPASVMKKVIDDRALLLIGGSGVLASKGKFKFYK

SEQ ID NO: 60428 - protein, 262 aa, Listeria monocytogenes
MKTRIITAVVALIFFIPFVVYGGIPFELLSILLATIALYEVLVMTKQRIFSMNGIITLLLMWLVVVPDRYLDFLDTLHITEMEVIFILMALLLANTVFSRNKFHFDQVGICMVAAFYTGFGFHYLALTREAGLMYVLFALFIVWSTDTGAYFIGKAIGKHKLAPNVSPNKTVEGFIGGIVCALVIAGGFYYFAELPGNIAFVLALLVFLSIFGQLGDLVESALKRFYGVKDSGKILPGHGGILDRFDSLLFVLPLLHILQII

SEQ ID NO: 60429 - protein, 157 aa, Listeria monocytogenes
MIRIGQGYDVHKLAYDRDLIIGGVKIPYEKGLLGHSDADVLLHAITDAIIGAIGAGDIGHFFPDTDMVFKDADSAELLAEIWQKVEADGFRLGNLDATIIAEKPKMAPYVEQMKLRIAELLHADSAQVNVKATTTEKLGFTGREEGIASLAVVLLEK

SEQ ID NO: 60430 - protein, 428 aa, Listeria monocytogenes
MEKITFEQVKEAVFHEKMANGLQVYLLPKQGFSKTYAVFTTNYGAIDNNFVPIGETEFTKVPDGIAHFLEHKMFEKEDGDVFFKFGEKGAFTNAFTSFTKTAYLFSSTSRVEENLETLIDFVQEPYFTEETVEKEKGIIGQEIRMYDDDPDFRAYFGVIENMYHNHPVKIDIAGTVESIAEINKDLLYLCYNTFYHPSNMVLFVVGNLEPEQMMDQIRANQAKKEFAEAAPIKRHFPEEPKTVAVKERKIHFPVQIAKNLVGIKEDIGSLEGQAAIKQEIIGDVALEMLFGTTSATYLKLYNEGIIDDTFGYDYTLQDSFSFVLVGGDAKDPDKQTAKIKDAIKEAAKNGLNESDLALVKRKRIGQFLRSLNSPEFIANQFSQYVMKSASLFDILPLMEKVTLEEVNAFVKNLDKEERTTSFQLLPEE

SEQ ID NO: 60431 - protein, 481 aa, Listeria monocytogenes
MWRLTGNSSLPIYLQIVDLIETKIMNGELLPEEKLPPERQLAEMFGVNRSTVVRALDELTARAVIIRKQGSGTTVNAEKWGLFAGQSTNWRHYLTQGGFTPAVPYIRQAGVMERANSDNVIDAASGELPLEMTPKMETPSLSWQSFIAEEQQEDEAGYKPLRETIQKQMKEAYGLQTRSEQIFITSGAQQALFLITQCLLKPGDAVAIESPSYFYSLSLFQSAGLRIFALPMDEDGVVISELRDLYHKHRVKMVFVNPTFQNPTGLVMSLKRRKELVKICAHLQIPIVEDDPFSELGALDNQIPAPLKRLDTDNVLYIGSLSKIMGSTTRIGWLIGPTAVIERLALARQEMDFGLSIFPQVLANSVLNTAGYKAHLLQLHHVLEQRRDDLIEAFEAILPSEVTFIKPKGGFHLWVKLPVEFRSVRDFDIFLANDLLVMPGFLFGVKEAVIRVTYARLEKKEARRVAEIIKQILVSKKCEEA

SEQ ID NO: 60432 - protein, 181 aa, Listeria monocytogenes
MAERLVGTQAPRFEMEAVMPNQTFGKVSLEKNIEDDKWTILFFYPMDFTFVCPTEIVAISARSDEFDALNARIIGASTDTIHSHLAWTNTPIKEGGIGKLNYPLAADTNHQVASDYGVLIEEEGVALRGLFIINPKGEIQYEVVHHNNIGREVDEVLRVLQALQTGGLCPINWQPGEKTIV

SEQ ID NO: 60433 - protein, 272 aa, Listeria monocytogenes
MIDTSLATQFLGEVIGTAILIILGAGVVAGVSLKRSKAENGGWVVITLAWGLGVTMGVYVSGYMSMAHLNPAVTIGMALAGAFPWNYVLPYILAQFIGAFIGATLIWLHYYPHWKQTEDKPTKLGVFATAPAIRHFTSNFFGEALGTFILVFGLLSLGANSFSDGLNPLVVGALIVAIGMSLGGTTGYAINPARDLGPRIAHFVWPISGKGGSDWGYSWVPVIGPIMGGALGALGYNAIINGELGMWFWVFAVLFVLILILTMQLDKKKDLA

SEQ ID NO: 60434 - protein, 130 aa, Listeria monocytogenes
MAQVQYYGTGRRKSSVARVRLVPGDGKIVINNRDWEDYIPFAALREVIKQPLVATETLGNYDVLVNVHGGGYTGQAGAIRHGVARALLQVAPEYRPALKSAGLLTRDSRMKERKKPGLKGARRAPQFSKR

SEQ ID NO: 60435 - protein, 249 aa, Listeria monocytogenes
MPVISMKQLLEAGVHFGHQTRRWNPKMKKYIFTERNGIYIIDLQKTVKKVDEAFNFMREVASDNGTILFVGTKKQAQESVRDEAIRSGQYFVNHRWLGGTLTNFETIQKRIQHLKKIERMEADGTFEVLPKKEVVLLKKEQEKLERFLGGIKDMKGLPDALFIVDPRKERIAVAEARKLHIPIIGIVDTNCDPDEIDYVIPANDDAIRAVKLLTAKMADAIIEVNQGEELTEAEVAPVEEKATEETTEA

SEQ ID NO: 60436 - protein, 368 aa, Listeria monocytogenes
MVTGWHRPTWIEIDRAAIRENIKNEQNKLPESVDLWAVVKANAYGHGIIEVARTAKEAGAKGFCVAILDEALALREAGFQDDFILVLGATRKEDANLAAKNHISLTVFREDWLENLTLEATLRIHLKVDSGMGRLGIRTTEEARRIEATSTNDHQLQLEGIYTHFATADQLETSYFEQQLAKFQTILTSLKNRPTYVHTANSAASLLQPQIGFDAIRFGISMYGLTPSTEIKTSLPFELKPALALYTEMVHVKELAPGDSVSYGATYTATEREWVATLPIGYADGLIRHYSGFHVLVGGELAPIIGRVCMDQTIIKLPREFQTGSKVTIIGKDHGNTITADDAAQYLDTINYEVTCLLNERIPRKYIH

SEQ ID NO: 60437 - protein, 361 aa, Listeria monocytogenes
MVNTNLEELRTQVDQLNIDLLELISKRANLVQEIGKIKGTQGSLRFDPLREREMLNTILAANEGPFEDSTVQKLFKEIFKAGLELQEEDHSKALLVSRKNKKEDTIVTVKGLPIGNGEPVFVFGPCSVESYEQVAAVAESIKAKGLKLIRGGAFKPRTSPYDFQGLGLEGLKILKRVSDEYGLGVISEIVTPADIEVALDYVDVIQIGARNMQNFELLKAAGRVDKPILLKRGLSATIEEFIGAAEYIMSQGNGKIILCERGIRTYEKATRNTLDISAVPILKKETHLPVMVDVTHSTGRKDLLLPCAKAALAIEADGVMAEVHPDPAVALSDSAQQMDIPEFEEFWNAILASNLVPHKIK

SEQ ID NO: 60438 - protein, 739 aa, Listeria monocytogenes
MPNMEPTTKEIKEQKIYQEMGLTDSEYELVCSILGREPNYTETGLFSVMWSEHCSYKNSKPVLRKFPTEGKQVLQGPGEGAGIVDIGDGLGVAFKVESHNHPSYVEPYQGAATGVGGIIRDVFSMGARPIAMLNSLRFGELDTPHAKYLVSEVVAGIAGYGNSIGIPTVGGEIQFDPCYTKNPLVNAMCVGLIEAKDIQKGQAKGIGNPVMYVGAKTGRDGIHGATFASVEFSEEGEQQRSAVQVGDPFMEKLLLEACLDVIRDHSDILVGIQDMGAAGLVSSSSEMASKAGAGLELIMDDVPQRELHMTPYEMLLSESQERMLLCVKKGHVEEIQALFERYGLEAVVIGQVTDDKMYKIIHHGEVVANVPVDALAEDAPVYHKPSKEPTRYQAFQEEEAFVPAMDDVVGVWKELLAQPTIASKRHIYEQYDYQVRTDTAVVPGSDAAIVRVRGTEKAIAMTTDCNSRYLYLDPEVGGAIAVAEAARNIVCSGGKPLAITDGLNFGNPEKPEIFWEIEKAADGISAACLELDTPVISGNVSLYNETDGTGIYPTPVIGMVGLVEDLAHITTQDFKNSGDVIFLIGETKAEYSGSELQKLQQGKISGRAPELDLVTEKKYQQLLLTAIQEGLVASSHDLAEGGFGVALAEATFKAGLGAEVEVPFALNQLFSESQSRFLVSVKPENEAAFAQLMELEKVYRLGVVTEDDTIRVKHKEDQVTAKTTELRSIWEGAIPCLLK

SEQ ID NO: 60439 - protein, 191 aa, Listeria monocytogenes
MERNEVLKKVEAAMPNARFKHTLGVEKAAVELAEHYHMDVEKARITALLHDYAKYYDDDKARKIIEDEGYDPRLLSFHHSLWHAPVGAYLAEKEFGITDTEILEAIRLHTTGSATMSDFDKLIYLADYTEQGRTFPGVYKARRLALKSLDEAMLFALSNTITHLVKKQQLVFPDTLDAYNYFVNLNLEGDY

SEQ ID NO: 60440 - protein, 188 aa, Listeria monocytogenes
MKKIGVLAIQGAVDEHIQMIESAGALAFKVKHSNDLAGLDGLVLPGGESTTMRKIMKRYDLMEPVKAFASKGKAIFGTCAGLVLLSKEIEGGEESLGLIEATAIRNGFGRQKESFEAELNVEAFGEPAFEAIFIRAPYLIEPSNEVAVLATVENRIVAAKQANILVTAFHPELTNDNRWMNYFLEKMV

SEQ ID NO: 60441 - protein, 452 aa, Listeria monocytogenes
MDRILNNKWSIRIIALLLAAILFTSVNANNNNATTFSTTSSSDSEVIENVPVKVYYDKTNLYISGIPETVTVTLSGPRSIVQSAKAQQDFTVYADLKNASIGTQEVKLQVKDVSDRLKVKVNPATVNVNVQEKVTKKFSVDVELSKSVVADGYQAGTPIIDPKKVSITGAKDTIEQIAYVKATLESDGKHKSEFTDKATVSVFDSNLNKLDVEVNPQEVEVTVPVEKVGKSVPVKIKQEGTPESDIEISSMTPDKSEVVVVGDDAVLEKIKEIEIPIDVSKIKADTVKEVTVPVPTGAKSVQPTTIEVKIKTVKKSEANNNPTTSDSNNQDTDTTDNNTDDSGDNNTKISKSFSNMQVYMSGLKNTFDAQMITPANGKVSVTITGEKKTVDGIAAKDLSVIANLSKSKAGSYSIPLELNGLPDNVAYVINPRQADFIITDKEASIEVPSKST

SEQ ID NO: 60442 - protein, 569 aa, Listeria monocytogenes
MKKLWKKGLVAFLALTLIFQLIPGFASAADSRLKDGGEYQVQVNFYKDNTGKTTKESSEADKYIDHTATIKVENGQPYMYLTITNSTWWQTMAVSKNGTRPEKPAQADVYQDRYEDVQTVSTDAAKDTRVEKFKLSSLDDVIFSYMHIKVDAISYDHWYQVDLTIDPSTFKVISEPAVTTPVTLSDGIYTIPFVAKKANDDSNSSMQNYFNNPAWLKVKNGKKMVAMTVNDNKTVTALKTTLAGTLQDVKVVSEDKDANTRIVEFEVEDLNQPLAAHVNYEAPFNGSVYKGQADFRYVFDTAKATAASSYPGSDETPPVVNPGETNPPVTKPDPGTTNPPVTTPPTTPSKPAVVDPKNLLNNHTYSIDFDVFKDGTTETSMMESYVMKPALIKVENNQPYVYLTLTNSSWIKTFQYKVNGVWKDMEVVSGDINKNTRTVKYPVKDGTANTDVKTHVLIEDMPGFSYDHEYTVQVKLNAATIKDITGKDVTLKEPVKKDILNTGNVASNNNAGPKLAKPDFDDTNSVQKTASKTEKNAKTNDSSSMVWYITLFGASFLYLAYRLKRKRLS

SEQ ID NO: 60443 - protein, 348 aa, Listeria monocytogenes
MNDRQAALDQALKQIEKQFGKGSIMKLGEHSDQNISTISSGSLALDIALGVGGYPRGRIIEVYGPESSGKTTVALHAIAEVQAQGGTAAFIDAEHALDPAYAKNLGVNIDELLLSQPDTGEQALEIAEALVRSGAVDMLVIDSVAALVPRAEIEGEMGDAHVGLQARLMSQALRKLSGVINKSKTIAIFINQIREKVGVMFGNPEITPGGRALKFYSTVRLEVRRAEQLKQGTDVMGNKTKIKVVKNKVAPPFRIAEVDIMYGEGISREGELVDMAAEVDVINKSGSWYSYKEERIGQGRENAKQYLKEHTDIRDEISKRVREEYEIDGSSKEPLDEKEETLSLLDDE

SEQ ID NO: 60444 - protein, 323 aa, Listeria monocytogenes
MKATAIAHTNVALIKYWGKRDEHLILPANSSLSFTVDKFYTKTTVEWDEKLTQDTFILNNEQKTDAKVARFIDKMREEFGISAKAKITSENHVPTAAGLASSASAFAALALAGSNAAGRKDTKEYISRLARFGSGSASRSVFGDFVIWEKGELADGSDSFAVPFTNKLCDKMSLVVAVVSDKEKKVSSRDGMRLTVETSPFFENWVSAAEIDLEEMKQAILDEDFIKVGEITERNGMKMHATTLGAEPPFTYFQPQSLEIMDAVRELRENGIPAYFTMDAGPNVKVICERANENIVAEKLSGLAKNVLICHAGKEASVVSDEK

SEQ ID NO: 60445 - protein, 451 aa, Listeria monocytogenes
MQSIEDIWQETLQIVKKNMSKPSYDTWMKSTTAHSLEGNTFIISAPNNFVRDWLEKSYTQFIANILQEITGRLFDVRFIDGEQEENFEYTVIKPNPALDEDGIEIGKHMLNPRYVFDTFVIGSGNRFAHAASLAVAEAPAKAYNPLFIYGGVGLGKTHLMHAVGHYVQQHKDNAKVMYLSSEKFTNEFISSIRDNKTEEFRTKYRNVDVLLIDDIQFLAGKEGTQEEFFHTFNTLYDEQKQIIISSDRPPKEIPTLEDRLRSRFEWGLITDITPPDLETRIAILRKKAKADGLDIPNEVMLYIANQIDSNIRELEGALIRVVAYSSLVNKDITAGLAAEALKDIIPSSKSQVITISGIQEAVGEYFHVRLEDFKAKKRTKSIAFPRQIAMYLSRELTDASLPKIGDEFGGRDHTTVIHAHEKISQLLKTDQVLKNDLAEIEKNLRKAQNMF

SEQ ID NO: 60446 - protein, 318 aa, Listeria monocytogenes
MTEALFLNPVFQDRIWGGTKLHDYFGYDIPSNTTGEDWAISAHPNGPSVIKNGEYKGKTLAELWQENPALFGNPKEAVFPLLTKILDANTDLSVQVHPNDEYAKVHENGELGKTECWYIIDCAPGAELIYGHKAASREEFATWAKNGEWDKLLRKVAIKPGEFYYVPSGTIHALGTGTLVLETQQSSDTTYRVYDYDRKDAEGNLRELHLDKAIDVTTAPHVDAKLDIHTETRGGLTETTFVSNDFFSVYKWDVDGKAEFVAKAPYTLVSILDGEAVLTIDGDEQAIKKGDHFVLPNEVKSWEITGQITAIVSTPPVK

SEQ ID NO: 60447 - protein, 475 aa, Listeria monocytogenes
MAKEYDVVILGGGTGGYVAAIQAAKNGQKVAVVEKGKVGGTCLHRGCIPTKALLRSAEVLQTVKKASEFGISVEGTAGINFLQAQERKQAIVDQLEKGIHQLFKQGKIDLFVGTGTILGPSIFSPTAGTISVEFEDGSENEMLIPKNLIIATGSKPRTLSGLTIDEEHVLSSDGALNLETLPKSIIIVGGGVIGMEWASMMHDFGVEVTVLEYADRILPTEDKEVAKELARLYKKKKLNMHTSAEVQAASYKKTDTGVEIKAIIKGEEQTFTADKILVSVGRSANTENIGLQNTDIATENGFIQVNDFYQTKESHIYAIGDCIPTIQLAHVAMEEGTIAANYIAGKAAEKLDYDLVPRCIYTSTEIASVGITEEQAKERGHEVKKGKFFFRGIGKALVYGESDGFIKIIADKKTDDILGVSMIGPHVTDMISEAALAQVLNATPWEVGNTIHPHPTLSESFREAALAVDGNAIHG

SEQ ID NO: 60448 - protein, 61 aa, Listeria monocytogenes
MAKKSMIAKQKRTPKYAVQAYTRCERCGRPHSVIRKFKLCRICFRELAYKGQIPGVKKASW

SEQ ID NO: 60449 - protein, 374 aa, Listeria monocytogenes
MAKLKQETIAAQIGNRKCERTGAVNMPVYFSTAYQHADLGVSTGYDYTRTGNPTRDALQEALAELENGTHAFATSSGMSAIQLVFQLFKTGEHIISSQDLYGGTFRYFEQFGAQYQIGFSYWDGAEIADLEKLIRPETKAIFIETPTNPLMQETDIATVAKWAHAHDLLVIVDNTFYTPVLQQPLSLGADIVIHSATKYLGGHNDVLAGAVIVKEEKLGKFFFDQLNATGTVLSPFDSWLLIRGLKTLVLRVRQHQANAQKIAAFLEEHKLVEEVRYPGRGGMISFFIRDAALVSPLLKELELFTFAESLGGVESLITYPTTQTHADIPVELRNSYGLTDKLLRISVGIEASEDLIADLSKALDAVLEEVSARG

SEQ ID NO: 60450 - protein, 338 aa, Listeria monocytogenes
MVQITKGKFDGLQRLSNDKGVIAALAIDQRGSLKKMIQQAKGTENKKDVEDFKQLVSEELTPYASAILLDLEYGTPAIKARHEGSGLLTSYEKTGYDATTPGKLPDLIEDLSALRIKENGGDAVKILVYYDPDEPAEINEIKYAFLERIGAECRAVDIPFFLEPITYDATVTDSGSLEYAKLKPAKVKASIKEFSKPRYGVDVLKLEVPVNFKYVEGFAEGEVAYTQDEAARHFEECSDLSPLPFIYLSAGVTSEMFHKTIQFANQHNVQYSGVLCGRATWADGIEVYGKQGDDALREWLRTQGKENITSLDKLLDEGAVPWWTKYGSFEDVHVVEKQ

SEQ ID NO: 60451 - protein, 118 aa, Listeria monocytogenes
MASEVTSAKAVAKTVRIAPRKARIVIDLIRGKQVGEAIAILKYTPRSASPIIEKVLKSAIANAEHNYDLDINNLVVEEAFVDEGPTLKRFRPRAQGRASAINKRTSHITVVVSEVKEG

SEQ ID NO: 60452 - protein, 115 aa, Listeria monocytogenes
MMVKRGDVYYADLSPVVGSEQGGIRPVLIIQNDIGNRFSPTVIVAAITAKIQKAKLPTHVEATRKDGFEKDSVILLEQIRTIDKQRLTDKITHLDEDLMAKVNKALEVSLGVVEF

SEQ ID NO: 60453 - protein, 350 aa, Listeria monocytogenes
MSYEPNTKETMQKIKELTSIPSPTGNTGKIIEKLAKDLDASKIPYRLNNKGGLIVTLPGKDETKHRMLTAHVDTLGAMVKEIKADGRLLLTLIGGYRFNAIEGEYCTIETSAGDLYSGTILMHQTSVHVYKDAGTAERNDKNMEVRLDVKALDADKVRALGIEVGDFVSFDPRVQIINDEYIKSRHLDDKASVAILLQLINHIHENNLELPHTTHFLISNNEEIGYGGNSNIPAETVEYLAVDMGALGDGQTSDEYTVSICAKDGSGPYHLGLRKHLVELAKKNNIDYKVDIYPFYASDASAAINAGNDIIHGLIGPGIDASHAYERTHRDSLYHTEKLVYAYLFSNILK

SEQ ID NO: 60454 - protein, 314 aa, Listeria monocytogenes
MKTIYLHHPITTDEWTDINKVMALGFFDGVHLGHQAVIKQAKQIAGQKGLQTAVLTFDPHPSVVLSNIRKQVKYLTPLEDKAEKMAKLGVDIMYVVRFTTQFSELSPQAFVDNYLVALHVEHVVAGFDYSYGKKGEGKMTDLAKYADGRFEVTIVDKQTAASDKISSTNIRRAITEGELEEANQLLGYPYTTKGTVIHGDKRGRTIGFPTANIRVNEDYLIPKLGVYAVKFRVNGETHLGMASIGYNITFKDDQALSIEVYILDFHREIYGEEAEIKWYQFFRPELKFNGVEGLIAQLEKDEQDTRAFFAKLED

SEQ ID NO: 60455 - protein, 490 aa, Listeria monocytogenes
MNLDSKKKIAIIGAGPGGLAAGMLLSQLGYQVNIYEKNDRIGGRTALHRMGKYSFDVGPSALTMTHVLTSLFMDCNRNILDYVSLLPINPIHTLYFKDITFPLYSDQSETKAVIQTYFPGEEDGFDRFMKENTKKMLYISPLNQFNYSSLFDFFRPTTLRAIPSLTLGRSLMDDLSRYFNSKYLRLAFSLQMRYLGMSPWDIPAAYSIIPFSEYYYGTFHPIGGQNKIVEAMQQVVTENKGKFFFNSEVTEFESNGKEITGAVLANGKTIEADYYFTNLDFIYSLTNEHPDKLDTKEYSSSAFILYLGLKTVLPFSHQSIIFPENYREFAHNTMHKKILSKDIAIHLTNPSATDNTMAPINHSSIRIMVPVPNNTSNIDWKKETPAFRQLVLETVKERLEIPDLESQIEEEYIITPIDWEKKYHVKHGAIFGLQHLWRQHGYLHPSKKSPKFKNLFVIGAGAMSGSSLPFIIENAQIATQKFLQKEKKSE

SEQ ID NO: 60456 - protein, 605 aa, Listeria monocytogenes
MSGPGPGGGMRMQTAAKPKNFKQTLFRLLGYMKPRSVAIIVVFIFAILSTIFNIFSPKELGKATTEIFKGVMSQDGINNDKIFNILMIVLVLYLGSSLFSFIQQYVMSSVAQRTVYDMRKDLKAKMARLPLKYYDTRSNGDILSRSVNDMDNIANTLQQSLTQAITAIVQMIGVLIMMLTISWQMTLIVLVTVPISIILVAIIAGRSQRYFGAQQRNLGILNDTVEETYGGQTIIKAFGQEKKTLVKFDEVNEDYFKAAKKAQFISGIMMPVMQFVGNLGYVGVCVAGGIFVTNGTLQVGDIQSFTQYVQLFTQPISSVANIANIIQSTIASAERVFEMMDEEEEKDEIPANVNQVAGEEHSIVFDHVKFGYTPDKPLMTDLNIHVEEGQMVAIVGPTGAGKTTIINLLMRFYDVDGGQIRMKGIDTRDMTKDAVREKFGMVLQDTWLFNGTIADNIAYGREGATKDEVIGAAKAAYADDFIRRLPNGYDTILNEEGSNISQGQKQLLTIARAILSDPSILILDEATSSVDTRTELNIQLAMGNLMEGRTSFVIAHRLSTIRDADLILVMNHGSVIEQGTHQELLDAKGFYADLYNSQFTGAQAV

SEQ ID NO: 60457 - protein, 564 aa, Listeria monocytogenes
MRSDKIKKGVEQAPARSLLHATGQIKSPGDMDKPFIAICNSYIDIVPGHVHLRELADVAKEAIREAGGIPFEFNTIGVDDGIAMGHIGMRYSLPSREVIADAAETVINAHWFDGVFYIPNCDKITPGMLLASVRTNVPAIFCSGGPMKAGLSAHGKALTLSSVFEAVGAFKDGSMSQEDFLDMEANACPTCGSCAGMFTANSMNCLMEILGMAVPGNGTTLAVSDARRDLIRESAFHLMDLVKKDIRPRDIITKDAIDDAFALDMAMGGSTNTVLHTLALANEAGIEDYDLERINDIAKRVPYLSKIAPSSSYSMHDVHEAGGVSAIVKELVDLGGAIHPDRITVTGKTIRENVADAKINNTDVIHPKENPYSPVGGLSMLFGNIAPKGAAIKVGGVDPSVQVFKGEAICFSSHDEAVEAIDNHTVREGHVVVIRYEGPKGGPGMPEMLAPTSSIVGRGLGKDVALITDGRFSGATRGIAVGHISPEAAAGGPIALVHDGDIITIDLPNRTLNVDVPDEVLEERRKELPKFKAKVKTGYLARYTALVTSAHTGGILQIPEDLID

SEQ ID NO: 60458 - protein, 252 aa, Listeria monocytogenes
MEQIQSVKNDRVKTWKKLQTRKGRDKTGTYLVEGFHLVEEALRQDGLVLELLVSSGVSVPEEWLKGDYDVFEISTEISHLISETMTEQGVFAVVATSEPDMMLLYGKKLLLVDAVQDPGNVGTLIRTADAAGYDCVVLGKGSADLYNPKVIRSTQGSHFHIPVIQADLFDWIANLEEEGVPVIGAVLDDQAKSLNDMTKRDTLALMVGNEGNGISPELQDRLSEKVYIPIYGDSESLNVAVAAGILLYGLRK

SEQ ID NO: 60459 - protein, 327 aa, Listeria monocytogenes
MKLGIMGTNWITDSFIEGAINSGEWNLTAVYSRTEEKARAFGEKYGELTYFTDIEEMGKSDALDAVYIASPNALHYQHAVSLLKNKKHVIVEKPIFSTVAELEHAHQIARENNVFLFEAARHIQEPNFKRLQENIEKVGTIHGATLAYMKYSSRYDQVLNGEEPNIFSLKFSGGSIVDLGVYPLYSAITLFGEPVKATYFATKLPTGVDGLGPIILEYPTFNITIIQGKNSQSFLPSEIYGQKGTLIVDPLTGIEKITFYDNATKEETELAGPVVANDMQFEAAEFARIIEQSDRDTYEYLADLSLKVLRVSNELRHQNDIWFDAEK

SEQ ID NO: 60460 - protein, 318 aa, Listeria monocytogenes
MSNEYFDPKLKIFSLNSNRELAEEIAKEVGIELGKSSVTHFSDGEIQINIEESIRGCHVYVIQSTSNPVNQNLMELLIMIDALKRASAATINIVMPYYGYARQDRKARSREPITAKLVANLIETAGATRMITLDMHAPQIQGFFDIPIDHLNAVRLLSDYFSERHLGDDLVVVSPDHGGVTRARKMADRLKAPIAIIDKRRPRPNVAEVMNIVGNVEGKVCIIIDDIIDTAGTITLAAKALREAGATKVYACCSHPVLSGPAMKRIEESPIEKLVVTNSIALPEEKWIDKMEQLSVAALLGEAIVRVHENASVSSLFE

SEQ ID NO: 60461 - protein, 529 aa, Listeria monocytogenes
MSERSMKRLMKGAAWLTAASLISKILSAIYRVPFQNMVGDVGFYIFQQVYPIYGIAMTLALGGFPVVISKMLAEAEGDVRRQQIIMRAVSRMLRIVSIVIFAFLFLFANLIAIMMGDPALSELIRVISFVFLLMPQLAFMRGFFQGEGDMIPTAISQTVEQIIRVAIILIGAGLALHFNFDLYDAGSMAMSGAFFGGVSGIFILRHFYNKKVRLGEGIQPAVFTNKEEKVGIGRTFLRQSVAICVVSSMLILFQLVDSFQVYRLMSDSGIPDFIAKSLKGVYDRGQPILQLGLVISTGLALALVPMITAARVQGQQKELKRSVLLAIKITLILSGAETIGLIVIMRPLNQMLFQTPDGTFVLQLFMPAVFLSSLIIMLSSILQGFGKIAVPAVGVGIGLIVKWVTGGILIPRLATVGASVSTCVGLLVILLICYVSLKQTIRVPFVEKTMLFRLVAALVLMAVFPCLFEWLAPLDTRLGSAFQAIVSALVGGGIFLVFALRYKLLGPKDFVFLPFGSKLLALSKLVARK

SEQ ID NO: 60462 - protein, 444 aa, Listeria monocytogenes
MARMTPVQVIIAYYFLAVTISTIVLSLPFTLQKGVKVSFIDTLFTAASSVSVTGLTTVDVSQTYSTAGIWVLMAIFQIGGLGVMMISTFFYLILKRRIGLKQRQLIMTDTNQFTMSGMVRMLREILVLIFGIELIGALILGIYFIPLYPNFWDAMFQGLYNSVSLVTNAGVDITGKSLMPFANDYFVQFISILLIIAGAIGFPVLLETRRFLFEKNTLIPFRFSLFVKVTTLTYFVLLIVGGLLIWLFEYHHFFSGKSWDFGFFNSMFLSATSRSAGLQTIDSGALSISTLLLVSFLMFIGASPSSVGGGIRTTTFAITILFIYSVIRGRKHVYIFGRELHQEDVRKSLAVTLVAGFLSISAIVVLMQTETASLIAVIFEVFSAFGTTGLSVGLTPDLSTPGKIIIIALMFIGRVGIMYSMLSLRNKNQPKNAIRLPKEKIITG

SEQ ID NO: 60463 - protein, 723 aa, Listeria monocytogenes
MKQEKVQDLVNQMTLDEKIAQCLQLSPFLFKGTNKNAELTGPLLQEMKLTDAHTENAGSVLGSSSALDMIGIQEAYLKTNRLGIPLVFMADVIHGYKTVFPIPLALGCSFDRETVRVMAEVSALEATADGHHVTFSPMLDLVRDPRWGRVMESTGEDPFLNSELGKAMVDGYQGDASKLDGNFDRMAACVKHFAAYGAAEAGLEYNTVNMSTRELYQNYLPAYHAAIQAGAKLVMTAFNVVDGVPATMNKWLNRDVLRGEMDFDGVLISDWGAVAEVINHGTARNPKEAAQFSMEAGVDLEMMTTCYIHELKGLIEEGKLSESLLDEAVLRMLHLKNDLGLFEDPYRGLKNNDRTKDILTDDSRGKARAAGVESAVLLENKNRLLPLAKETKIALVGPLASSPDILGGWNVYGEEKDGINVETGLREVFETVEVISTEYTEFSDEDKVAVKAAVQNMDVVVLALGEKNEWGGEAGSLATIRLPEAQYELAKFVQTLEKPVVITLFNGRPLEVKELAESSDALLELWFPGTEAGRVTADLLSGASNPSGKLSMSFPQTTGQIPVYYNHLRTGRPQTPENKGERYVSHYLDIPNEPFYPFGYGKSYSEFELKTSSLPKELNLGEPLHVEVTIKNISDIAGKEVIQVYLQDVTASISRPVKELKAFEKVALQAGEEKTVTFELTSEAFSFYNHQLEKVQEPGLHRIFVGTSSEDVDAFELEVGGYV

SEQ ID NO: 60464 - protein, 331 aa, Listeria monocytogenes
MKYVKFGNTGMDVSKICLGTMGFGDKDKWIHKWVLDEANSRPIIKKALDLGINFFDTANIYSYGESEKIVGRALKDYANRDDIVLATKVQQTMRPDRPNSGGLSRKTILSEIDHSLKRLETDYVDLYIIHRFDENTPIEETMEALHDVVKSGKARYIGASAMYAWQFQKAQRVAERNGWTKFVSMQNHYNMIYREEEREMIPFCRDEKIAITPYSPLASGRLTRDLNETTDRSETDPVQKSKYDDMMNADKGIIERVAELAETHQVSRDKIALAWLLNKDEITSPIIGAQKESHLESAVEALNIKLTTSEVNYLEELYIPHPVVGALPTTK

SEQ ID NO: 60465 - protein, 239 aa, Listeria monocytogenes
MIAEINGINLFYQIIGKGEPILLIHGNGQNHRSLKRMIDDLSTNHQVIAVDSRAHGKSEAGNTPLDFEVMALDMLSLLDYLKIDKYKVIGYSDGGIVALVMGKMQPNRQIASVVIGTNYHVNQIRFLPDLFCRVAYGAAFLLAPFSRFFERMKRQLALTIYHPHMSEADLQKISAPLLAVVGEYDLISSKDTRKMVHSVQHGEMVIVRNGLHYLPRQKPKQLLQLIHSFFSNLSAEIHK

SEQ ID NO: 60466 - protein, 277 aa, Listeria monocytogenes
MAIKKYKPTTNGRRHMTSSDFAEITTSTPEKSLLRPLKKKAGRNNQGKLTVRHHGGGHKRQYRVIDFKRNKDGIPGRVATIEYDPNRSANIALINYADGEKRYIIAAKGLEVGQTIYSGAEADIKVGNALELKDIPVGTVIHNIEMKPGKGGQLVRSAGTSAQVLGKEGKYVLIRLNSGEVRMILATCRATIGQVGNEQHELINIGKAGRSRWMGKRPTVRGSVMNPNDHPHGGGEGKAPIGRKSPMSPWGKPTLGYKTRKKNNNSDKFIVRRRKKK

SEQ ID NO: 60467 - protein, 172 aa, Listeria monocytogenes
MEKRQTKFCKESLVIKTSRVFPSDTNNHNTLFGGRLMTYIDDTASISASRHCRTEIVTASTDSVDFLKPIKNDHSVCLESYVASTGRSSMEIFVKIIAENLKTGERYLAATSFLTFVALGADGKTVEVPLVEPETEEQKRIHAGAEARSIARKIRLKENQSLAESLSTDIPW

SEQ ID NO: 60468 - protein, 59 aa, Listeria monocytogenes
MSAIAKFFRNVSSEMHKVTWPTRKELLTYTVTVVITVVLFALFFMLIDFGIEQIIKLIV

SEQ ID NO: 60469 - protein, 244 aa, Listeria monocytogenes
MKKQEISILNIPFYNTTQAGFVEELYMAAKNGERRFVVTANPEIVMHARTDKEFEAILGQADYIVPDGIGIIMASEKLGEPLKERVTGYDTMVGLLNKPLNCYFLGAKPEISEVVEAKVREKFPQAVVCGVHHGYFDVLESEGIAKEILVSQPDVIFVALGSPAQEKWILSQIANFTKGIFIGVGGSFDVLTDSVKRAPKIWIKLRLEWVYRLLSNPSRWKRFFAIPQFMLAIRKERKRLKKGE

SEQ ID NO: 60470 - protein, 183 aa, Listeria monocytogenes
MNNPKPCEWKSNELSRGYIADYKAFNFVDGEGVRCSLYVSGCPFHCEGCYNKAAQSFKYGKPYTKELEDDILKDIGHESVQGLTLLGGEPFLNTATCLSIVKRIRATYGETKDIWSWTGYTWDEMMQETADKLELLSLIDVLVDGRFEQKLFDPNLAFRGSSNQRIIDVQKSLAAGEVVLYEL

SEQ ID NO: 60471 - protein, 803 aa, Listeria monocytogenes
MTFNHKKMEPKWQQYWSEHNTFKTTEDKNKENFYALDMFPYPSGAGLHVGHPEGYTATDILSRMKRMQGKNVLHPIGWDAFGLPAEQYAIDTGNDPEEFTALNIANFTRQIKSLGFSYDWDREINTTDPEYYKWTQWIFEKLYENGLAYEAEIAVNWCPALGTVLANEEVIDGKSERGGFPVFRKPMRQWMLKITAYADRLLDDLDLVDWPENIKDMQRNWIGRSEGAEVTFKIKDSDETFNVFTTRPDTLFGATYTVFAPEHELIEKITTPEQKEAVEAYKKQVELKSELERTDLAKDKTGVFTGAYAINPINGEEVPIWIADYVLIQYGTGAIMAVPAHDERDFEFAQQFGLNIRPVLEGGDVTKEAFTGDGPHINSDFLNGLAKAEAITAAIDWLEKEGIGSRKITYRLRDWLFSRQRYWGEPIPVIHWEDGETTLVPEEELPLLLPKATEIKPSGTGESPLANLHDWVNVTDENGRKGRRETNTMPQWAGSSWYFLRYIDPKNSEAIADKEKLAEWLPVDVYIGGAEHAVLHLLYARFWHKFLYDIGVVPTKEPFQKLFNQGMILGENNEKMSKSRGNVVNPDEVVEKYGADTLRLYEMFMGPLEASIAWNENGLEGARKFLDRIWRLLVTEEGTLAEKVTTDANANLEKAYHHMVKTVTNHYENLRFNTGISQLMIFINEAYKQDTIPKQYVEGFVQLLSPIAPHLAEELWEILGHTETISYVAWPTYDETKLVEDEVEIVLQVNGKVKSKITVAKSLGKEELEKIAQEDNKMKENLEGKTIRKVIVVPGKLVNIVAN

SEQ ID NO: 60472 - protein, 591 aa, Listeria monocytogenes
MEKAGIYHQPASSYAYSYDAKTLHIRIRTKRLDISKVTLIAADPYLWKDGKWQSESYTMRKIAETEEHDYWFFAITPEHRRLQYGFLLTDTEGETTFYGGRGFFEPTEANLATMDYYFKFPFIHAVDTFEAPEWVRNTIWYQIFPERFANGNPAISPENTLPWGSKDPNTTDFFGGDIEGIIEHLDYLAELGINGVYLTPVFEAPTNHKYDTIDYKKIDPHFGDKETFRKLVKEAHKRGIRIMLDAVFNHIGDTSPEWQDVVEKEEKSAYRDWFHIHSFPVRQNENGNIEGEPTLSYDTFAFTTHMPKLNTANPEVQKYLLDIATYWIREFDIDGWRLDVANEVDHAFWKEFKKAAQAEKEDIYILGEIWHDSWIWLLGDEFHAVMNYPFTQTIIENFIEEKITPEQMVSGINEQYMRYPNQVNEVMFNMLDSHDTARILTRANNDEDKVKQALAFMFAHTGSPCIYYGTEIGMDGGNDPGCRKCMEWDEAKQNQDMLAFTKQLIALRKDNQAIITSGELTWLEASSETGITAFSKELNGEKLHFLFNQTKKDQDFTISFANTAIDIWNNQAVSDNLTIPAKGFLVIKENS

SEQ ID NO: 60473 - protein, 419 aa, Listeria monocytogenes
MNIIDELEWRGAIYQQTDEEGLRKWVEEKQISLYCGIDPSGDSMHIGHLIPFMILRRFQNAGHRPIILVGGATGTIGDPSGKKEERKLQSMEQISKNVESLRVQLGKIFDFEGNSAASMVNNYDWTKDVSILDFLRDYGKEFNVNTMLSKDIVASRLEVGISFTEFAYQILQAMDFNHLYEFNDCRLQIGGSDQWGNITAGLDLIRKKQGENAKAFGLTIPLLTKADGTKFGKSEGGAIWLNPEKTTPYEFYQFWINTDDRDVVKYLKYFTFLTEAEIDELAKQVETEPHLRAAQKTLAAEMTKFVHSEEALEQALKISKALFSGDVKALTADEIEQGFKDVPTFVAEDSEANLVDWLVTLGIEPSKRQAREDVGNGAIYINGERQQDLEKIMDASDRIENKFTIVRRGKKKYFLVSYK

SEQ ID NO: 60474 - protein, 568 aa, Listeria monocytogenes
MRQTMTFIPTLKEVPADAEVKSHQLLLRAGFIRQTASGIYSYLPLATLMLRKIETIIREELEAIGAAELLMPALQPAELWQESGRWNDYGPELMRLKDRASRDFALGPTHEEVITALLRDEVKSYKRLPLTLYQIQTKFRDEKRPRFGLLRGREFIMKDAYSFHATSESLDEVYNLMHQAYSNIFTRCGLEFRSVIADSGSIGGNESKEFMALSDIGEDTIAYSDASDYAANTEMAPVLYMEKKSHELEKDLEKVATPDQKSITDIVGFLEVPIEKTMKSMLYQVDDEVIMVLVRGDHEVNDIKIKNALDATNVELVDPAVAVELLGANFGSLGPINVPENMRVFADNAVKDIVNAVVGANEDGFHYINVNPDRDFSVTSYFDLRMIQVGDLSPDGQGVIKFAEGIEVGHIFKLGTKYSEAMNATILDENGRAQPIIMGCYGIGVSRILSAIAEQSNDENGFVWDKQISPFDLHLIPVNMKSEEQVAFAETLYTSLQDAGFSVLIDDRAERAGVKFADADLIGLPIRITVGKKAAEGVVEVKIRKTGEMIEVRQDELLNTLPILFGDK

SEQ ID NO: 60475 - protein, 612 aa, Listeria monocytogenes
MNLRNDIRNVAIIAHVDHGKTTLVDQLLRQSGTFRDNETVAERAMDNNDLERERGITILAKNTAIKYEDTRVNIMDTPGHADFGGEVERIMKMVDGVLLVVDAYEGTMPQTRFVLKKALEQNLTPIVVVNKIDRDFARPEEVVDEVLELFIELGANDDQLEFPVVYASAINGTSSYDSDPAEQKETMKPLLDTIIEHIPAPVDNSDEPLQFQVSLLDYNDYVGRIGIGRVFRGTMHVGQTVALIKLDGTVKQFRVTKMFGFFGLKRDEIKEAKAGDLVALAGMEDIFVGETVTPFDHQEALPLLRIDEPTLQMTFVTNNSPFAGREGKHVTSRKIEERLLAELQTDVSLRVEPTASPDAWVVSGRGELHLSILIETMRREGYELQVSKPEVIIREIDGVKCEPVEDVQIDTPEEFMGSVIESISQRKGEMKNMINDGNGQVRLQFMVPARGLIGYTTDFLSMTRGYGIINHTFDSYQPIQKGRVGGRSRGVLVSMETGKSTTYGTMQVEDRGTIFIEPGTDIYEGMIVGENNREGDIAVNIVKAKQMTNIRSANKDQTNVIKKPRHLSLEESLEFLNEDEYCEVTPESIRLRKKILNKNEREKAAKRSKTAE

SEQ ID NO: 60476 - protein, 1108 aa, Listeria monocytogenes
MGFVHLQVASAYDLLSSTASIDKLIAKAKEYHYPALAITDKNVLYGVVEFYQKCLAADIKPIIGMTVTIQGYLNPINSYELILIAESTAGYHQLLKIASAIQTREEGPELPQSWLRAYSSDLIVISPGAKGEIERLLMEEDREGALEVYANLVEIFGKESVYLSAQKENPRLFAKIETFSSEENVPVVATKNVQYLEPKDAQAKEVLTAIRDNRTVDWTTLPLAGPNYFTSQDEMERDWQTAFEKQACLETGELANRCHVEIALDQHLLPRFPLNEGQNASDVLRQTAFAGLKERNLLGMEYQERLEYELKVITEMGFADYFLIVWDVIRYSREAGVLTGPGRGSAAGSLVSYALRITDVDPIRYNLLFERFLNPERITMPDIDLDFPDNRRDEVISYVVSKYGEAHVAQIGTFGTLAAKAAIRDTARSFGLNSVLLSEWSKLIPSQLGITLQKALQESPRLENHIKSSKENEMIWEVACQLEGLPRHISTHAAGIVISDKPLVEQVALQLGSGDARLTQFAMGELEKIGLLKMDFLGLRNLSLLDRVLKSVNYTRETPLTLADISLEDKKTLKLFQTGDTTGVFQFESDGIRRVLRKLKPTSFEDVVAVDALYRPGPMEQIDTFIARKHGKEKIQYPHPDLASILEVTYGVIVYQEQIIQVANQMAGFSLGEADLLRRAVSKKKADVLNEERIHFVEGAKSKGYSEASANQVYDMIVQFANYGFNRSHAAAYSKIAFQLAYLKAHFPAAFMSSLLSSVFGNDDKISQYITEAKNYGISMLAPSINHSNYYFQMENETSIRYSFRVIRKVPTKFILEIINERKKAPFRDFFDFCERMPHKMLSETVLEALVFSGCFDEFGEDRATILATIDAVLQYISLLGEDSKGMNLFAEDDEFLKKMKPRYRKTAPISIDEKLEKEKLYTGQYVSAHPVSYYQNKLQNLAITRLANLSSGKNYQVAAYVHEVKSIRTKKGETMCFLTISDDSKELSAVMFPECYRKFANFAQKGEILFLQVKADTRNGELQLIINKAEDLKEIKAPVRLFLKLTEPQQMEQIKPILARYKGDSKVIVHQAITKQTAELKNIQVTPSNELQEALGELLGKENVVIK

SEQ ID NO: 60477 - protein, 94 aa, Listeria monocytogenes
MDARDIIKRPVVTEESTSILDDKKYTFEVDTRATKTQVKYAVEEIFDVKVAKVNVMNYKGKLKRMGRYAGYTNKRRKAIVTVTADSKEIQFFEV

SEQ ID NO: 60478 - protein, 288 aa, Listeria monocytogenes
MEIKLEQLGYCYQKNSPFEKRALLDVNVSFDSGSYSAIIGHTGSGKSTLLQHLNALLMPTEGKITVGDREIVAGVKQKKLRDLRKKVGIVFQFPEAQLFEETVEKDICFGPMNFGVSEEDAKLRAKKVIYEVGLTEEILSRSPFELSGGQMRRVAIAGVLAMDPEVLVLDEPTAGLDPHGREEIMEMFYNLHKEKGLTTVLVTHSMEDAARYAEKIVLMKAGTVLQIGTPREIFAKPDELVDLGLSVPDVVRFQGLFERKFDVKLTKTCLTIDELTTEMAPYLAKGGA

SEQ ID NO: 60479 - protein, 368 aa, Listeria monocytogenes
MSKVLKSLLLTALLGVTGLISGCGDLTVLNPKGPVAKGQSDLIIYSIIFMLVIVLTIFVLFTIMLVKYRERKDISNYEPDMHGSKKLEIFWTLIPVAIVIALAIPTVKTIYAGEEAPKVTSHKDPIIIYATSADWKWIFSYPDESIETVNYVNIPTDRPVLFKLTSADTMTSFWVPQLGGQKYAMSGMTMNLYLQADEVGTYKGRNANFNGEGFADQRFDVVAQSEKDFKKWAKETKASSPVITQDIYDRLLIPGSSKKKTYSGTHLAFVDVAADPEYVFYAYKRFGYEMTNPHNPNTKSTISDEPMLPVRPVTVTNPQFERHDMKPQIIKNGEGYHEDKHREDEMKKMEEDIQTNEFNKKESDDAGK

SEQ ID NO: 60480 - protein, 444 aa, Listeria monocytogenes
MNPDPESQQIILQLILIVVLTMLNAFFASAEMALVSLNKNRVKSQAETGDKKAVMLAKLVDDPSKFLATIQVGITLAGFFSSASAATSIATRLESVFGGSSFAKELSIIVVTIVLSYITLVFGELYPKRLALQKSEKIARVSVRPIMAVGVVLRPFVKFLSFSTDILVKLTRMEKNTDNEKMTREEMQLLIETGRRDGVIEVEELQMLRGVFEMDNKYAREVMVPRTDAFMIDAETESEELCDALLSENFSRVPVYTGDQDSVRGILHMKDFFAEARKSGFENIDVKGLVKDAYFAQETMFIDDLLKNMQRTRNQMAILMDEYGGVAGIVTVEDLLEEIVGEIDDENDVFSDEVKKVDETTFIVEGRMPLDDFNKMFHVELPSRGVDTVAGFVLTLTGTIPEEDDKVVVEYGTLRFTVEEMNDARLVSVRVEKDIQTSELGQMA

SEQ ID NO: 60481 - protein, 229 aa, Listeria monocytogenes
MVEKIERKSLAEQVYDQIKAEITNGTWKIGERIPKEADLMAEFGISRNTLREAIRALAHIGLLETKQGDGTFVRNNSELNAIMQKRVRESTVQEILEIRHALDREAVILACDRRTEEDVETLEKYRQQCQLATEKNDVGAFVKADSALHLTIVKTAHNDLLLDMYVNILEEIQFSITSTTEMSPEANQHKGHAALVKAIEKRNKEQAAHEVTEYITLFKRIAAKNGEKK

SEQ ID NO: 60482 - protein, 314 aa, Listeria monocytogenes
MIEIEKPKIETIEISDDAKYGKFVVEPLERGYGTTLGNSLRRILLSSLPGAAVTSIQIDGALHEFSVIEGVVEDVTTMILNIKKLALKIYSDEEKTLEIDMQGPGVVTAADINYDSDVEILNPDLHIATLSDNAKFHVRLNATRGRGYTPADQNKRENMPIGVLPVDSIFSPVIRVNYQVENTRVGQSTNYDKLTFDVLTDGSISPEEAVSLGAKILSEHLSIFVNLTDEAQKAEIMIEKEESHKEKVLEMTIEELDLSVRSYNCLKRAGINTVQELADKSEDDMMKVRNLGRKSLEEVKVKLADLGLSLRNEN

SEQ ID NO: 60483 - protein, 723 aa, Listeria monocytogenes
MSEKQVFSTEWAGKTLSVEVGQLAKQASGAALIRYGDTVVLTAAVGSKKPRPGDFFPLTVNYEEKMYSVGKVPGGFLKREGRPSDRATLTARLIDRPIRPLFAEGFRNEVQITSTVFSVDQDCSPEMAAMLGSSVALVISDIPFEGPIAGVDVGRIDGKYVINPTIEQAEKSDISLTVAGTYDAINMVEAGAKEVSEEAMLEAIMFGHEEIKRLCEFQQQIIAAVGKEKREIELFVSDPELEAEVKAASEGKMKTAIKTEEKKAREAAIEEVKEEILESYKAKELENESEILSEVAHILEMIEKDEMRRLISQDKIRPDGRKVNEIRPLSSEVGMLPRVHGSGLFTRGQTQALSVCTLAPLREHQIIDGLGTEEYKRFMHHYNFPQFSVGETGPRRAPGRREIGHGALGERALQYVIPSEEEFPYTIRLVSEVLESNGSSSQASICGSTLAMLDAGVPIKAPVAGIAMGLVKLGDDYTILSDIQGMEDHFGDMDFKVAGTKDGITALQMDIKIDGLSRQILDEALTQAKEGRLHILEHLTSTISAPREELSAYAPKIITLNIKPEKIKDVIGPGGKQINAIIDETGVKIDIEQDGTVYIASQDQAMNRKAIAIIEDIVREVEVGEVYTGKVRRIEKFGAFVELFKGTDGLVHISELAHERVGKVEDILKLGDEVTVKVIEVDQQGRVNLSRKALLEKKEQPEGDKKPQAEKKFYPKTKKPESK

SEQ ID NO: 60484 - protein, 357 aa, Listeria monocytogenes
MKKRTFALALSMIIASGVILGACGSSSDDKKSSDDKSSKDFTVAMVTDTGGVDDRSFNQSAWEGLQKFGKANDMEKGTDGYNYLQSASEADYKTNLNTAVRSDYDLIYGIGYKLKDAIEEVSKQKPKNQFAIVDDTIDDRDNVVSIGFKDNDGSYLVGVVAGLTTKTNKVGFVGGVKGTVIDRFEAGFTAGVKAVNPNAQIDVQYANDFAKADKGQQIASSMYSSGVDVIFHAAGGTGNGVFAEAKNLKKKDPSRAVWVIGVDRDQWDEGKVTANDGKDYNVTLTSEIKRVDIAVEDLATRAKAGDFPGGTKIEYGLDKDAVGLSEHQDNISKDVLAKVEEYKQKIVDGDIKVPEKP

SEQ ID NO: 60485 - protein, 92 aa, Listeria monocytogenes
MATTMRLDKYLKVSRLIKRRTVAKEVAEKGRIAVNGVTAKPGTNVKSGDELVIRFGPKIVTAKIERLEENAKKEQATEMYTIIKEERTDESR

SEQ ID NO: 60486 - protein, 217 aa, Listeria monocytogenes
MKKTPFIISGIGLLGFIFFMTGVMTGAKWIQRFDHYWNSVIRVGITDTKTTVISYLTDIGGVATICILTAIIIIVFVFMRKVDTAIWFGSIVLIGGALIPSIIKNIVQRPRPTYKLIEQGGFSFPSGHSTGSTVFYGMLAFLLILYVSRSWLRFTIGILALGIVIFVMYSRVYLGVHFPSDVVAGFLIGNAALFSGIGCYFIWNEKLALWANKFKKA

SEQ ID NO: 60487 - protein, 261 aa, Listeria monocytogenes
MATLKIQDLHVEIEGKEILKGVNLEISTGEIHAIMGPNGTGKSTLSSAIMGHPKYEVTQGTITLDGEDVLEMEVDERARAGLFLAMQYPSEISGVTNAEFIRAAINSRREEGDEIPVMQFIRKLDAKMDILDMDEEMAERYLNEGFSGGEKKRNEILQLLMIEPKLAILDEIDSGLDIDALKVVSKGVNEMRGEGFGCLIITHYQRLLNYITPDFVHVMMQGKVVKEGGPELAKRLEAEGYDWIKQELGIELEEEEAVDQQ

SEQ ID NO: 60488 - protein, 1146 aa, Listeria monocytogenes
MNRIKKVLVANRGEIAIRVMRACTELKIKTVAIYSQEDTGSFHRYKSDEAYLVGAGKKPIDAYLDIENIIEIAKESGADAIHPGYGFLSENIEFARRCEQEGIIFVGPKSKHLDMFGDKIKAKEQALLADIPVIPGSNGPVAGIKEVEEFGEKNGYPLMIKASLGGGGRGMRVVESKEHVKESFERASSEAKAAFGNDEVYVEKCVMNPKHIEVQILGDTHGNIVHLFERDCSIQRRHQKVVEVAPCNAITSELRNRICDAAVKLMKNVDYINAGTVEFLVEGDDFYFIEVNPRVQVEHTITEMITGIDIVQSQLFIADGYALHDQLVAIPKQEDIHIHGSAIQSRITTEDPLNNFMPDTGRVDTYRSTGGFGVRLDAGNGFQGTVVTPFYDSLLVKLCTWGMTFEQATRKMRRNLIEFRIRGVKTNIPFLLNVVRHPDFASGNYNTSFIDTTPELFKFPHIRDRGTKTLRYIGNVTVNGFPGIKHRDKPVYAEPRLPKIPYGSQISPGTKQILDAKGPEGVVDWVKKQEEVLLTDTTLRDAHQSLLATRVRSKDIFQVADAMAHLLPNMFSFEMWGGATFDVAYRFLNEDPWVRLETLRKQIPNVMFQMLLRGANAVGYKNYPDNVIREFVKQSAQSGVDVFRVFDSLNWIKGMEVSIDAVREAGKVVEAAICYTGDIDDDTRTKYTIDYYKDMAKELVAQGTHILGIKDMAGLLKPQAAYRLIGELKDTVDVPIHLHTHDTSGNGIYTYAAAVSAGVDIVDVASSAMSGATSQPSMTGLYYGLVNGNRQTNLDAQNSQIINHYWEDVRHYYKDFDNALNSPQTEVYIHEMPGGQYTNLQQQAIAVGLGDRWDEVKEMYTVVNQMFGDIVKVTPSSKVVGDLALFMVQNELSEEDVYEKGDTIDFPDSVIEFFMGEIGQPYGGFPEKLQKLVLKGRTPLTDRPGALMEPVNFVDVKAELKEKMGYEPTEKDVISYILYPKVFLDYQDMINKYGDVTVLDTPTFYKGMRLGETIEVELEKGKILLIKLNSIGEPIADGTRVIYFELNGQPREINIQDMNVQSTVIARRKIDTTNPEHVGATMTGSVIQVVVKKGDSVKKGDPLLITEAMKMETTIQAPFDGEVSSIYVSDGDTIESGDLLIEVNRI

SEQ ID NO: 60489 - protein, 200 aa, Listeria monocytogenes
MARYTGPSWKVSRRLGISLSGTGKELERRPYAPGQHGPTQRKKISEYGLQQAEKQKLRHMYGLTERQFKNTFNKAGKLRGKHGENFMILLEQRLDNIVYRLGLARTRRAARQLVNHGHITVDGKRVDIPSYQVSVGQVISVREKSAKNSAIAESLEVSSFVPEYVTFDAEKLTGSLNRLPERSELAAEINEAFIVEFYSR

SEQ ID NO: 60490 - protein, 422 aa, Listeria monocytogenes
MAGSSTSKKGTIAVSLTNYLDSGCIVAGASGLTLWATQFGLSSFAVGLLGAVSANAFGSAIGALIGGHLADKYGRKFIYTYNMLVYMLGVTIIMFAMNFPMLLIGFLVTGLSVGAGVPASWTYISEMADPSIRARNIGISQFAWSCGPAIIFTLGIIVSPLGLLGNRLLFLSLLIVAFVAWQLQRKLEESKDWEAEQVKMKESGNRLEHPFKTAFSSMVNVKSVLFLVGVYLFWNLVAGAMGFFMPFVYETVGGLSNTQANLLQAVLWILTAASTYFGFAKFGDRVSHRGLFFVGALMAVASWVVLTFVGMSWVGLWTFVILWGISAGIGAQAFYALWSTELFPTKYRGGVQGVMFFLVRGSTGVWSIVFPVILANLGFTVAGTIMIGLLTVSLLIGVIWAPKTRGRSLDDITKERYGNTID

SEQ ID NO: 60491 - protein, 322 aa, Listeria monocytogenes
MTEQREKLLEIHNLKQYFNKGTASEVRAVDDISFDIYKGETLGLVGESGCGKSTTGRTIIRLYDATGGEVIYNGKDVHARKSRKEMLEFRRKMQMIFQDPYASLNPRMKVKDIIAEGIRIHGLAKTPEETNKQVYDLLETVGLSKEHAGRYPHEFSGGQRQRIGIARALAVQPEFIIADEPISALDVSIQAQVVNLLRQLQKEKNLTYLFIAHDLSMVKYISDRIGVMYFGKLVELAPANDLYHAPLHPYTESLLSAIPLPDPNYERTRVRKTYDPTSHNYKDGDEIKMREIAPGHFVYCSEEEEVMYKEKHAKLTAEAAAK

SEQ ID NO: 60492 - protein, 336 aa, Listeria monocytogenes
MTVKVGINGFGRIGRLAFRRIQNVEGIEVVAINDLTDAKMLAHLLKYDTTQGRFDGEVEVHDGFFKVNGKEVKVLANRNPEELPWGDLGVDIVLECTGFFTAQDKAELHIKAGAKKVVISAPATGDMKTIVYNVNHETLDGTETVISGASCTTNCLAPMAKVLEDKFGVVEGLMTTIHAYTGDQNTLDAPHPKGDFRRARAAAENIIPNTTGAAKAIGEVLPTLKGKLDGAAQRVPVPTGSLTELVTVLDKKVTVDEVNAAMEAASDPETFGYTSDQVVSSDIKGMTFGSLFDETQTKVLTVGDQQLVKTVAWYDNEMSYTAQLVRTLEYFAKIAK

SEQ ID NO: 60493 - protein, 404 aa, Listeria monocytogenes
MDILRKGNKDLIKDINRYTVLNLIREKGEITRTEIAKKCDFGMSTLTYILDDLQQEGIILEGAETSSTGGRRAKLVRFNKDYGFVVSVKVEEEQLLFALTDLNAEIIENTSIPFSSEKKPEEAIELIAKNVKKMCGNRDMNHLLGVGIAISGLVNRKKGTVIRSTMLGWENVALEAMLHAHFPDIPVYVDKNINCYTLAELWLGEGKQSNNFATVSVGAGLGLSVVINRQIYYGAQGGAGEFGHTTIQPGGYKCHCGQKGCLEMYASEFYFRNRGEELKEAYPTSELNDFHFDKVAKSARAGDEMATELMGKMGEYLGYGIRNIINTFNPEKVIIVGEGLHHRDLFLTKIDEIASQNFFSGAGFETEITTTSLEDPAWLQGAALLVIHQLFQVPIYEEEQTLLR

SEQ ID NO: 60494 - protein, 214 aa, Listeria monocytogenes
MRAELAVYFIAGTQDIVRGTLPSVLEEALKGGITCFQYREKGAGSLQTASERKEMALECQKLCAKYQVPFIINDDVALALEIGADGIHVGQTDEAIRQVIASCSGKMKIGLSVHSVSEAKEAERLGAVDYIGVGPIFPTISKADAEPVSGTAILEEIRRAGITIPIVGIGGINETNSAEVLTAGADGVSVISAITQSDDCHSVIKQLKNPGSPS

SEQ ID NO: 60495 - protein, 122 aa, Listeria monocytogenes
MIQQESRMKVADNSGAREVLTIKVLGGSGRKTANIGDVVVCTVKQATPGGVVKKGEVVKAVIVRTKSGARRQDGSYIKFDENACVIIRDDKSPRGTRIFGPVARELRENNFMKIVSLAPEVL

SEQ ID NO: 60496 - protein, 118 aa, Listeria monocytogenes
MIKGIGLDMIDLERVKQVVEKNPRFIERVLTEKEIKQFEKYEGNRKIEFLAGRFAAKEAYAKANGTGFGKHLSFTDVEILQVEDGRPHVTLPVKSGENVFVSITHTARSAAAQVIIEI

SEQ ID NO: 60497 - protein, 388 aa, Listeria monocytogenes
MDMKKVNPNLTLLALAISAFGIGSTEFISVGLLPLISSSMGVSISTAGLTVSIYALGVMVGAPVLTTVTAKMNRKNLLLLVMLVFLIGNLVSAFAVSFGMLLTGRVVAAFAHGVFMSIASVIAADVVHPSKRASAIAVMFTGLTVATVTGVPLGTFIGQLFGWRMSFLFIVAIGVIAIIANFFLVPKNLSNGKSISFKSIGQLLVNKKIVMVLLMTAFGYGGTFVVYTYLSPMFSGMGYSTSMIVILLIVYGVMVAIGNTIGGHFANERPAKALFIMFSLQGVTLLLLQFTSGNAILGLMTIMLMGFFAFMNVSGLQLYVVQLAERYLPETVSMASALNISAFNIGIALGAFIGGLVAEYIGLSYTPIVGFLMVFIAIILTFYMKKDK

SEQ ID NO: 60498 - protein, 400 aa, Listeria monocytogenes
MTYQAPDENGFYGKFGGRFVPETLMKAVKELDEAYQASKTDPAFQKELNYYLKEYVGRETPLYFAEQLTAHAGGAKIYLKREDLNHTGAHKINNTIGQALLARQMGKQKVVAETGAGQHGVATATVAALFNMKCTIFMGEEDVKRQSLNVFRMELLGAKVVSVKAGSRTLKDAVNEALRFWVANVEDTHYIMGSVLGPHPFPEIVRDYQSVIGIEARKQHLEKEGKLPDAIVACVGGGSNAMGLFYPFVDDASVQMHGVEAAGHGLETEFHAATISKGEIGILHGAMMDVLQDENGQILEAFSISAGLDYPGIGPEHSFFRDLGRAAYHSVTDDEAVEAFQLLCRTEGIIPALESSHAISYAVKLASKMRPEESMVVCLSGRGDKDVNQLKERLEGQTND

SEQ ID NO: 60499 - protein, 322 aa, Listeria monocytogenes
MKLGVFTPLFANLSLEEMLDKVKAAGLDAVEIGTGGNPGNHHCPTDELLASEAARKEYLEKFTSRGLTISAFSCHDNPISPNKEEAAASDEILRKSIKLASLMNVPVVNTFSGTAGDSDDAKAPNWPVIPWPTVYSDIKTWQWETKLIPYWKEIGELAAASGVKIGIELHGGFLCHTPYTILKLREETNDSIGVNLDPSHLWWQGIDPVGAIKILGKAGAIHHFHAKDTYLDQDNINMYGLTDMQPYGDVQTRSWTFRSVACGHSLTEWSDIMSALRTYGYDYVVSIEHEDPLMSIDEGFDRAVTNLQSILIKDKPLDMWWA

SEQ ID NO: 60500 - protein, 271 aa, Listeria monocytogenes
MLVEELKTKYLVKDICQILQVPLSTYYRWKKKDFSQSSLEKKIGQLCKAYQFTYGYRKIAALMKQEEQVGINKVQRIMQKYQWQCQVKVKKKNRPGSAYYQTENHLNRNFQASQPLEKLTTDITYLYFGDCRLYLSSIMDLYNGEIVAYSIGEKQDTELVLDTLNQLSLPEGSLLHSDQGSVYTSYEYYQCCKKKNVIRSMSRKGTPADNAPIECFHSSLKCETFYHKTAYKYAKSIVIQIVKDYIKYYNEKRIQQKLGYQSPINFRKQAA

SEQ ID NO: 60501 - protein, 224 aa, Listeria monocytogenes
MTKKICIAIDGPAAAGKSTVAKIVAKKLRFVYIDTGAMYRAVTYIALKNNIAYEDEKAIAALLQKTVIRFEPGEVQQVFVGSENVTEVIRSIEVTNHVSIVAAHPSIREALQERQQVFATEGGIVMDGRDIGTAVLPNAELKIFLLASVEERAERRYKENMAKGFTGDLDQLKKEIEERDHLDYTRTHSPLKKADDAIEVDTTSMSIDQVANKILSLAELKINN

SEQ ID NO: 60502 - protein, 348 aa, Listeria monocytogenes
MKALKLYGKRDLRYEEADMPTIEEPDDVILKVKTVGICGSDISRYSKLGPYVPGMVWGHEFSGEVIEVGSEVTDIEIGDRAAGCPALYCGECEYCKKGEFARCRKLTVIGARHPGAYAEYIKLPAENVVKIPNELDYEAAALVEPSAVVVHGFYHTKLQAGDDVVVVGSGNIGLLAIQWAKVFGARRVIAIDVDDKKLALAKEVGADVVINSLKEDPLEVVAAHTDGLNADLVVEAAGSPITSAQVFAYAKKGGGVVFLGIPYADVTIERFYFEKIVRSELTVWGSWNAISAPFPGKEWQTTIHFLANKQINIEPMITHRLSLAEGPEVFERIYERNEFFGKVLFFPE

SEQ ID NO: 60503 - protein, 119 aa, Listeria monocytogenes
MPRVKGGTVTRKRRKKIVKLAKGYYGSKHLLFKVANQAVMKSYQYAYRDRRQKKRDFRRLWIARINAAARMQDLSYSKLMHGLKLAGIDINRKMLADLAVNDIASFNTLADSAKKALAK

SEQ ID NO: 60504 - protein, 97 aa, Listeria monocytogenes
MSNISKETVEKVANLAKLEVSETEATAFAGQLGKIIELVEQLNTLDTTNVEPTSHAIDVSNVLREDVATKGLDRKEVLKNAPDEQDGMFKVPTIMEQ

SEQ ID NO: 60505 - protein, 63 aa, Listeria monocytogenes
MKANDIRDLSTTEIQDQEKALKEELFNLRFQLATGQLENTARIREVRKAIARMKTIVRERELA

SEQ ID NO: 60506 - protein, 784 aa, Listeria monocytogenes
MKVNKFFKKTTHVLLVAGLTIGLTAPFTGTTAQAAADTVPIQILGINDFHGALETASKDASGSPIGGADYLATNLDNATNSFLQANPGATTDNAIRVQAGDMVGASPAVSGLLQDEPTMKVLQKMNFEVGTLGNHEFDEGLPEYKRILDGVSTNKFGPIVEAYPRVKSDMKIVAANVVNKGTNTVAEGFLPYYVKEIDGVKVGFIGIVTTEIPNLVLANHIKDYDFLDEAETIVKYSAELRGQGVNAIVVLSHVPALSTGNPNTGTKQDVAGEAANMMTKANELDPNNSVDLVLAGHNHQYTNGLVGKTRIVQSYNNGKAFSDVTGELDKTTGDFVSPPDAKITYNTRSVTPNADITAVTEDAKSRIEGVINETIGLANKDVISRDTNPDNKAIDDKESELGNMITDAQRYMANKAGADVDFAMTNNGGIRSDLTTRLANGQNEITWGAAQAVQPFGNILQVVEMTGADILEALNQQYLSNQTYFLQISGLKYTFTDTDDLDHAYKVASVTTEDGTPLKTDQKYKVVINDFLFGGGDGFSAFKKANLVTAIDPDTETFINYIKDQKAAGKVITAQKEGRKVYKSQAEIDKETKDAAIKAIKEATKINKLAEKDKTLTGTTLPGATVSVQKATANARMALAAGPNATADANGKFSVDVTSLNLKKGDQITTTITDPNGYSTTFQATVQAAATTPPDNGNGGTDNGNGNGNNGGTDGNGGTNNGNGSGTNGGTTTTEDPTTTTSNTSTTGTSSNTSLPTTGDTAGLATVFGVILTTTALYVLRKRS

SEQ ID NO: 60507 - protein, 450 aa, Listeria monocytogenes
MEQDKYLTVAAITKYIEKKFEVDPYMKQVFVRGEISNLKQPASGHLYFTVKDEFAMLRSVMFHKAVQKIGFVPEDGMNVLVTGRIGVFTKAGRYQFYAEHMEPDGVGALYIQLEQLKAQLEKEGLFAETHKKVLPSFPSKVAVVTSKTGAAVRDILTTIHRRMPSVEVIVYPTIVQGEKAAQKIVENIGKINQRNDIDVMIIGRGGGSLEELWAFNEEPVVRAVYDSDVPVISAVGHETDFALSDFSADVRAATPTAAAELAVPDYRDLEERLAERKYRLLAVTRQALERKERSLEQLKQHLILNGPKHQLEQQMERTDYFSERLNNAFSKQIFVKQTAFDRLNDRLHYYHPNKEIELQKEQMTLHLQALDKAMKQLLKDKQQSFFRQVDALEHLSPLSLLKRGFGVTYKENTLVKSVQELEVGDNIQVKMQGGHIDALITAKEEDISGN

SEQ ID NO: 60508 - protein, 462 aa, Listeria monocytogenes
MGKTLFDKLWNRHVIYGKEGEPQLLYVDLHLIHEVTSPQAFEGLRLENRPLRRPDKTFATMDHNVPTEDIFNIQDLVAKKQIEALQTNCAEFGVTLADMGSDRQGIVHMVGPETGLTQPGKVIVCGDSHTATHGAFGAIGFGIGSSEVEHVFATQTIWQQKPKSMGIEINGKLPKGVYAKDIILHLIATYGVAFGTGYAVEYYGETIRNMSMEERMTICNMAIEGGAKMGMMAPDETTFEYVRGREYAPTDMDKAISDWKTLQTDSDAEYDLHIKMDASILEPYVTWGTNPEMGVPFSKAFPEIKDMNYERAYEYMGLKPGQTAEQIELGYVFIGSCTNARLSDLEEAARIVKGNKVKNNIRALVVPGSRQVRNAAESIGLDKIFIEAGFEWREPGCSMCLGMNPDQVPDGVHCASTSNRNFEGRQGKGARTHLVSPAMAAAAAINGHFIDIRKVAVISGGN

SEQ ID NO: 60509 - protein, 205 aa, Listeria monocytogenes
MIVNAFYNEKGVGDTLLIETGEVTFENREWERRGDVARIFDRETKEVAGFNIFNSSKYFDITANGKVELTEELVALMNRVIEKAGFEPEIVADLSPKFVVGYVESKEKHPNADKLNVCKINVGDKVLQIVCGAPNIDVGQKVVVAKIGAVMPSGLIIKPSNLRGEDSFGMVCAARELAIPDAPTEKGIMVLEESATIGEAFPVNF

SEQ ID NO: 60510 - protein, 264 aa, Listeria monocytogenes
MKYMITSKGDEKSDLLRLNMIAGFGEYDMEYDDVEPEIVISIGGDGTFLSAFHQYEERLDEIAFIGIHTGHLGFYADWRPAEADKLVKLLAKGEYQKVSYPLLKTTVKYGIGKKEATYLALNESTVKSSGGPFVVDVVINDIHFERFRGDGLCMSTPSGTTAYNKSLGGALMHPSIEAMQLTEMASINNRVYRTIGSPLVFPKHHVVSLQPVNDKDFQISVDHLSILHRDVQEIRYEVSAKKIHFARFRSFPFWRRVHDSFIED

SEQ ID NO: 60511 - protein, 284 aa, Listeria monocytogenes
MPIVNMTDMLKKALAGKYAVGQFNINNLEWTQAILKAAEAEKAPVILGVSEGAAKYMGGFKTVVKMTEGLVEDLKITVPVAIHLDHGSSFDSCKAAIDAGFSSVMIDGSHHPIDENIAMTKQVVDYAHAKGVSVEAEIGTVGGDEDGVTGGINYADPQECLRVVKEANIDALAAALGSVHGPYHGEPVLGFDEMKEISELTGAPLVLHGGSGIPEHQIKKAIELGHSKINVNTECQIVWTAAVREKLATDDKVYDPRKVIGPGVDAIIKTVTEKIQEFGSNGKA

SEQ ID NO: 60512 - protein, 275 aa, Listeria monocytogenes
MKKKNIILISVLLGALLLLTGCSMDPSQNTDGFFSTYLIQPFTSFIMFVAKFVGGNYGIAIIITTLLIRALIMPLNLRTAKAQMGMQSKMAVAKPEIDEIQARLKRATSKEEQATIQKEMMAVYSKYNINPMQMGCLPLLIQMPILMAFYYAIRGSSEIASHTFLWFNLGSPDMVLAIIAGLVYLAQYFVSMIGYSPEQKKQMKIIGLMSPIMILFVSFTAPSALALYWAVGGLFLAGQTLLTKKLYMNKHPEIKVMEQEEKEFEQIVEEQKKEK

SEQ ID NO: 60513 - protein, 533 aa, Listeria monocytogenes
MLTVNNVGLRYGDKKLFEDVSIKFLPGNCYGLIGANGAGKSTFLKVLSGELDSQSGNVHIGSGERLAVLRQDHFQYDDELVLNTVIMGHERLYKIMDEKNAIYMKEDFSDEDGIRAAELEGEFAELDGWEAESDAAVLLNGLGIPTDLHGKLMKDLTGGEKVKVLLAQALFGKPDILLLDEPTNHLDIRAIHWLEEFLINFDNTVIVVSHDRHFLNKVCTHIADLDFSKIKLYVGNYDFWYESSQLAQTMMGDRNKKKEEKMKELQDFIARFSANASKSKQATSRKKMLEKITLEDIQPSSRRYPFIQFKPDREVGNDLLTVTNLSKTIDGVKILDNLSFSINRNDKVALVGDDEVAKTVLFQILAGEMEPDEGSYKWGITTSQSYFPKDNSEFFEENDMSLVEWLRQFSPEDDSEAFLRGFLGRMLFSGDEVLKKVRVLSGGEKVRCMLSKMMLSGSNVLLLDEPTNHLDLESITALNNGLEAFKGAIIFASHDHQLLQTIATRIINLSKDQFYNKEISYDEYLKEVMNVAE

SEQ ID NO: 60514 - protein, 132 aa, Listeria monocytogenes
MVMTDPIADFLTRIRNANMVKHDKLELPASKIKKEIAEILKREGFIRDVEYIEDDNAGTIRVFLKYGATGERVITGLKRISKPGLRVYAKSTEVPKVLNGLGIAIVSTSQGVLTDKEARAKQVGGEVLAYVW

SEQ ID NO: 60515 - protein, 555 aa, Listeria monocytogenes
MTIKKAKNIKIIPLGGVDESGKNLYVVEIDEDIFILDAGLMFPENELLGIDIVIPDFKYLEENKDRVKAIFLTHGHEDAIGALPYLLQKIKAPVYGTELTIALAKSALKEHRKLRFKNFHVVNEETTLSFSKIDVSFFRTTHTIPDSVGIVLETSEGSIVYTGDFKFDQSAKDGYASDLSHIAEFGEKGVLALLSDSSEAEHPGTTSSDSLIEEEIRHAFRMADGRIIVACVASNLIRLQQVLDASVATKRKVAIVGKELERVFEIAGSLGKIVIEEDLIVPLKELKKYSDDEITIIETGNLGEPIQSLQLMTKGNHPQLNIKPGDTVYITTTPSPSLETMMAKTMDMLYKAGAKVLTMSNNLFISGHASQEDLKLMINLLKPRYFVPVHGEYRMLISHAKLAHEVGMAKSEVFIVGKGEILEYKNDKMTAGNRVYSGNTLIDGLGVGDVGNIVLRDRKLLSEDGIFIVVVTLNRKSKTITSGPEIISRGFIYVRESEHLIEESSKVVTKIVEKNLQETGFEWAKLKQDIRDQLNRYLFEQTKRRPMILPIIMEV

SEQ ID NO: 60516 - protein, 135 aa, Listeria monocytogenes
MKRSIHVQAFVYNEKKDEILVVRDRNLTWAFPGGHVETNQTMEEALASKVKEQTNIDIEIESILHCKERRATWEHVCTFVFRAKPVGNALLASNDDNVFRVKWIPIPLADDLLAVDQLSLNELVRSEGVLYENYT

SEQ ID NO: 60517 - protein, 470 aa, Listeria monocytogenes
MTEINWQKEVEARKDDFLEDLKGLLRIPSVRDDSKKTEDAPFGPDVKRALDYMMELGKKDGFTAKEVGNVAGHLEYGQGEELVGVLGHVDVVPVGDGWTNGPFEPTLRDGKLYARGVADDKGPTIAGYYALKIIKELGLPLSRRVRIIIGSDEESGMSCVERYFETEEQPTLGFVPDAEFPIIHAEKGISELDVSFKDGEAGGEAAFRLLSVESGERYNMVPDHATAILEDVKDFDKVASAFKTFLANHPVEGTLEENGKSVKINIVGKSAHAMEPNNGVNAGLHLVAFLGKFKLTGAANDFVTFGRDYLFGDSRAVKLGISYEDAESGELTMNVGVIRYDVAEGGKYGLNFRYPVTASMDKLKNKMQTVVYEYNAQYTHYEDSKPLFVPKDHPLIQVLQEVYTKQTGEEATLLAIGGGTYARHMETGVAFGALFPGREDTMHQKDEFSYFDDLLKATAIYAEALYKLAK

SEQ ID NO: 60518 - protein, 96 aa, Listeria monocytogenes
MLKFDIQHFAHKKGGGSTSNGRDSESKRLGAKRADGQFVTGGSILYRQRGTKIYPGTNVGRGGDDTLFAKTDGVVRFERMGRDKKKVSVYPEVQEA

SEQ ID NO: 60519 - protein, 417 aa, Listeria monocytogenes
MKKVLLAILSMVLLLSLAACGGSSDSSKDKNGKEEIVMWGSWSGDQIKQLEKQIDSYNKSQDKYKVKYVMQENVEEKLLTGIAGGELPDIIMWDRYQTALYAPKGVLEPLDKLVKEDNLKMDDFYEESVKEMTYSDKLYGLPLLNDNRILFYNKKLLQEAGVKPPTTWDELATAAQKTTKWDGNKMTQAGMSLQDVGLFNLYLMQAGGELVTSDNKETAFNSEQGLEVLNYWDKMQNDLKVYQRGFDDGSDAFAAGKEAMTYNGPWALADYNKVEDLDYGVVEPPKGPNGDKGAIMGGFGLVMPKQAEHKDGAWDFMKWWTTKPENGVEFAKISGWLPANKIAAEDEYFTKDPNYSVFVNTMKYAKIRPTVAGYADVEGLAMKPQFEKFMNGNISAEKALSQAEKEGNQILKEERDK

SEQ ID NO: 60520 - protein, 309 aa, Listeria monocytogenes
MARHAQKRKARKGRIFVTILVALLILVGVVAVIGYFQYQSSLKEAQNESKLKDYKFNGAKAVGDEINVLLIGSDSRGEDQGRSDSLMIAHYNTKTNTPKLVSIMRDTYVDIPGHGKNKINAAYSYGGPELVRQTIKENFGVDVQYYVVANFEGFPKIVDTLAPEGIKINAEKDMSKNIDANIKKGEQVMDGKTLLQYARFRKDAEGDFGRIRRQQQVLEALKEQAIDVGDVGKIPDVIGKLQGYSSTNIPTGTLMSIGADFLLGKTETMEKFAIPVEGKWHNERIDGAGAVLRLDDMAANAKALQDFLK

SEQ ID NO: 60521 - protein, 152 aa, Listeria monocytogenes
MGLSNKFKSFFFLDEEEEYYEEEVAREPEPMQKKTKKEKPNKNRFYAVEEDDAKVVSMQGAQFSSRMVLAEPRVYAEAQELADYLKEYKSVVVNLQRISHDQATRIVDFLSGTVYALGGDIQRVGNNIFLCTPDNVEVDGSISEMLDEQNFM

SEQ ID NO: 60522 - protein, 420 aa, Listeria monocytogenes
MGQETEINKRYQVAKERYQAIGVDTEKALKTLKDIKISMHCWQGDDVKGFLNPDGELTGGIMATGNYPGAAHTPKQLRQDLEKAYSLIPGKHKLNLHAIYVDTDEKVDLNEIEPKHFTPWVEWAKEQGLGLDFNPTFFSHPMFKDNYTLASPDKEVRDFWIEHGKRSRKISEYFGKELGQTSINNFWVPDGIKDCPIDRYTPRKRLMEALDEVFAEKLDEKYTQEAVESKLFGLGAEAYTVGSHEFYMGYGITRDKLICLDAGHFHPTEVISNKLSSLALFSKGVMLHVSRPVRWDSDHVVIMDDELIEIGRELVRNDLLGITNIGLDFFDATINRIAAWVVGTRNTQKSLLKALLEPTADLKKMELENDFTSRMAITEELKDFPFGDVWNYFCEINGVPVGLDWLKEVKAYEEDVLLKR

SEQ ID NO: 60523 - protein, 421 aa, Listeria monocytogenes
MDYDVIVIGGGPSGLMAAISAAEKNKRVLLIEKGPKLGRKLIMSGGGRCNVTNRRPAEEIIKHIPGNGRFLYSAFHAFDNEDIIRFFERLGVALKEEDHGRMFPVSNSARSVAEAMIQRMEKLGVKIYMQTAVKQVDYEDGHVKGVTLKDGQEISASAVIVAVGGKSVPRTGSTGDGYAWAKKAGHTITELYPTEVPITSSEPFIKQKVLQGTSLRDVSLSVLNAKGKPIITHQMDMIFTHFGVSGPAALRCSMFVLRELKKTGAGTVKMRLDLFPNVSAAELSKDVYKLLEENPKKALKNSLSSLLQEKMLLFLLEKADLEETAEYKQVSPKKIEQFIQLLKDFTFEVNGTLDFEKAFVTGGGVSVKEIKPKEMQSKLMEGLFFCGEILDINGYTGGYNITCALVTGHTAGAYAAEVSNA

SEQ ID NO: 60524 - protein, 427 aa, Listeria monocytogenes
MKNKFIFITVVSILLIAAGIFTTIAMANANSVVVKAEVLNVRSGPGLAYDVTSQARKNEVLRVVGEENQWYKVQLDNGNSGWVASWLVENTDVSAASNSVAIVSSDGGLNVREKPSTSSKSLGLLNNGDQVTVTSQQNGWAQIQYNGTSAWVSSDYLTIRESVTKVDESELQTVTIRDDSTNIRNKPSRDGAVIEKANSGQGFAIQGVQGDWYKIRTTSGEEGYVANWVVDVSDKGQTSSPRSKTTKLSEATIVIDPGHGGNDPGAKGANGTIEKEMTLKTAKQLKQKLEARGAKVILTRNSDKYVSLKGRTNIAAENNADVFISIHFDSLEDASKGVSGQTTYYYDNSDKSLAESINTTLGKDLPTTNRGARVGDYYVVRENSQPAVLLELGYLSSAKDENNINSASYRSQIAESVTDGLSNYFSN

SEQ ID NO: 60525 - protein, 207 aa, Listeria monocytogenes
MATTLEVQKRETTQHSEVTRLRSEGKVPGIIYGYKSENVPVSVDSLELIKAVRDNGRNAVFSVTVDGKKLNVLLHEYQVDPLKDVLVHVDLLAVDMNEEVETDVRVVLVGDAPGVKAGGVLQQIIHDVKVSATPEKLPETIELDISSLEIGDVLTTNDLPENKDYVVQAEEEETVVTVSAPRAEEEPTTTEAPEPEAVHGKDEEPVE

SEQ ID NO: 60526 - protein, 253 aa, Listeria monocytogenes
MSKVIALANQKGGVGKTTSSVNLSSSLAFLGKKVLLVDIDPQGNASSGVGVNKGEIEHCIYDVLVDDVAIQDVLQKTDLDNLNVIPATIQLAGAEVELVPAISREIRLKKAIDSIRDDYDYVIIDCPPSLGLLTLNALTAADSVLIPVQCEYYALEGLSQLLNTIRIVQKHLNEDLQIEGVLLTMLDARTNLGIQVIEEVKKYFQNKVFNTIIPRNVRLSEAPSHGKPILLYDAKSKGAEVYLELAKEVVAHG

SEQ ID NO: 60527 - protein, 324 aa, Listeria monocytogenes
MKNQFDRHRRLRKTKTMRDLVRETVLHTDDLIYPIFVKDGKEPKTEVVSMPGVFQYPLHELEEEMRVVESLGIKAVILFGIPAEKDAVGTQAYHDHGIIQEATRLIKKSFPKILVVADTCLCEFTDHGHCGVIENGEILNDESLELLKQTAVSQAAAGADIIAPSNMMDGFVQVIREGLDEAGFYDIPIMSYAVKYASAFYGPFRDAAGSAPQFGDRKSYQMDPANREEALREAKSDEQEGADFLIVKPSLSYLDIMRDVKNNTNLPVVAYNVSGEYAMVKAAAQNGWIDEEKIVIEMLTSMKRAGATLIITYFAKDVSKYLNK

SEQ ID NO: 60528 - protein, 301 aa, Listeria monocytogenes
MLKIAVVGLGGIAQKAYLPVFAEMENIEVHLYTRDAQKLKHLSEKYRFDHYHQSIHSMIESGVNAAFVHSSTASHPEVIRTFLANHIPVYVDKPIADNLAEVEELTRLAEEQNTLLMTGFNRRYAPKYQELKALTDTNMIIMQKNRAAQPGEARTFIYDDFIHVIDTVRFLLDAKIEQLHVVPVWQENLLASITVQITAGGKVATAIMNRDSGVNEERLAVMTPSAKYEVENVTETHIYEGTTERFERFGDWETTLYKRGFVSIIQAFLTAVRNGEKAPISKEDALETHRLAEEILRKIEN

SEQ ID NO: 60529 - protein, 72 aa, Listeria monocytogenes
MSLGVIAAAIAVGLGALGAGIGNGLIVSKTVEGVARQPEARSMLQSIMFVGVALVEALPIIAVVIAFMVLNK

SEQ ID NO: 60530 - protein, 93 aa, Listeria monocytogenes
MANKKIDHREEAVELLKQDAKRILQLIKVQMDNLTLPQCPAYEEVLDTQMYGLSREINFATRLGLIEPEEGKKLMSTLEKELSTLHELSMSKK

SEQ ID NO: 60531 - protein, 1068 aa, Listeria monocytogenes
MKKVKWSILLFLVLAIFLSAGITYLALNQSSNKESKNNSEKTHKMTIALVNEDQGDNFQGKQVEFGNQFVKSIEKDDTHEWYVVSRGVAESGLKRDVYNMMIVIPSDFSEKAMSMTSSAPEKVTISYKVNDVGNSDLKAEAEKTAASVLEDFNSRIIDVYFASILTTLQEAQDNIGTLVKEEKKYDAIYNKDVNNPLSSYTKQFKTVQDYTGTSKESFQGFQDIMKEFEESLNLSQKENEEHMKNMDAYTKTQEENAPFGAEFTENLSKFDGTLSAEDIRMQTAALEQVNAKMTSEFQILENSNSLLSQTQALQSYIAETNARIDAVDAEIMGTLENDFRTAVYNDLLRILQENEYSDKLNEIGLKDLTGEDINAGFNKMIVKEIQSLPTYNADQLASIGLDEEMYKNVVTLSKEYYSNHRGAFSEGFSFTTDPKTLPTDTLKSDTINRLKSEGVALESSSYTVEGSDYPTEIILTLDENFTFSDVDCLVNGSSNPELVQQNAYGENGIKLSIQALGSTPAEIKITGKAKLREGVNVPLIGAVNWNATLQQYEKKEYSEMPTIPSELDPTTPDTSLIVRKEPVPIKVTAPTYLNETKSSVKAITNTVKDYYKLQALFDLYYGIDASDSGQIPDFSNYQVTLENSAKASSYYYIFNKEDVIGSFVNLTTDRFVADYTKKIKAFEKRIDDYKNTMAEANSRSEDVTNRLNETTQEAINLNTNLALTLQNLESWREESKGLIEENGVVLEKSGEEATMALQLSSEFAGLLAESESLAGTSEGNLKSAEVVYKTFDAIDKEAKNIQQSGETLVKEASTLSDDLSEKLEDDETFQKNFAKVMENSRVGDRQNENLYSFLSSPVDKMNAGTIVAGDKSMPYFMILICTILAIFTSYVISHQEKKREQLNEFEKEMSLVFKNIPITFLAICVGIIEGLIIGAISGFIFEVGEIGMFLWIGVCVLIMMTLVTAFSYLLRQFNMIGMSIILLVLSLYLFLTDAVGLNIDNESIFATFRTFSPLQYMEYLLNGILSAQKDYIIVVYSLIGATVVFTGLNLFVWHRSKEKVEEDDSDEI

SEQ ID NO: 60532 - protein, 300 aa, Listeria monocytogenes
MTLELHNVTKKFGTKVAVNDLSFRVEPGKILGLIGQNGAGKTTTFRLILHFLEATSGKITWDGKEVSKIDPNIIGYLPEERGLYPNVTIEEQLIFFAELKGYPKQKIKAEIDSWLERAEIVGKKTDLIKTLSKGNQQKIQLLSTIIHQPKLVILDEPFSGLDPVNAEILKKFVFDLRASGAAIIFSSHRMENVEELCDSLLMLKKGNVVLQGTTESVKSVFGRKRILIESSHSAAELATLPGVLNVQTHRDGVLQLEIAHESDAEKIFDYVTKDGFIQTFSLQAPTLEEIFKWKAGELNE

SEQ ID NO: 60533 - protein, 371 aa, Listeria monocytogenes
MSTNNSDIRVVVGMSGGVDSSVTAHILKEQGYDVIGIFMKNWDDTDEFGVCTATEDYDDVIRVANQIGIPYYAVNFEKEYWDKVFTYFLDEYKLGRTPNPDVMCNKEIKFKAFLEHAESLGADYVATGHYAQVKKVGDEIELLRGVDNNKDQTYFLNQLSQDQLKKVMFPLGAMEKTEVREIAKKAGLATADKKDSTGICFIGERNFKQFLSEYLPAQPGEMRTLDGEVLGKHDGLMYYTIGQRHGLGIGGDGEPWFVVGKDLKENVLFVEQGFHHETLYSDSLIATDISFTTNAEKPKTIECTAKFRYRQTDTKVTVHLREDGTAEVVFADPVRAITPGQAVVFYDGDVCLGGGTIDTVWKNGQKLDYVG

SEQ ID NO: 60534 - protein, 327 aa, Listeria monocytogenes
MRIGMRTVKTAIAATLAIILAEWLHLEYAVSAGIIAILSVQNTKKGSLQLAIQRVYSTVLALSIAAVFFMLIGYNAVSFGLYLLIFIPLAVRLHVADGIVVSSVLVSHILLEQSLSFFWFKNELLLMAVGAGIAIILNLYMPKMEDELKRSQQKIEAIMRQILTEMTQGLRNQSEYHDEFGLLNQLKGTLDYAQEKAARNLDNQFFASSHYYSQYVDMRLVQYRILTQMKRHLVAFDHSSEQSMALAEITEKTAQTLDEHNTAEDLVAEITKMVHEFRSSKLPETRAEFENRAILFQFMNDLRYLLEMKRDFYAEFGLKEKEMTRGR

SEQ ID NO: 60535 - protein, 1023 aa, Listeria monocytogenes
MRPIKLTMQAFGAYAKKEVIDFEKLGTEQIFVISGKTGAGKSTIFDAISFAIFGKANTFDRESFSMRSHFATDKEITEVTLAFRLKDKIYQISRIPQQEIAKQRGNGTTTSPQKAELYELIGDEMKLLASSVRDVNTKMEELIQLNVDQFRQILMIPQGEFRELLVSDSKEKEVILQRLAHTVYYEKVENLLWEKQKQAEILVVEARKKVAELAELSLPDVEVSGKTTSEISVLQDEAIQKEQVILTELENKLSIMRKQTSEAVEKVTLAKEQLLDWQNLDKYTEEVATLEAEKDFYQSMEVRMNAAKRASNLQSQDALCIRLKEQLEAAEQTEKQVVVEAEQVKTQFLHAKKQKEALAEKEAELEINKRTLFQLEEMEPKILELETVSIQKRRAELDWKETTTLLEKIIDKEQKIATELQSVEARLAEINKAELTYLEAINKRTTLEARVEKEQELVNKRMKMEEWDAAKQTEEQTLAQLLIEKAEMERTIKQEEIKLEKEQAATIAAHLHEGDACPVCGSQSHPVLAKFGETADLETLEIAKAKLQEKQLVITTTEKAISQLEWQLNEWADMKEQSLAEIQQTLAGNIQLATNLREQITQLQSEVAQKETVQATLESLKNKQNETLTEKNKMALEVEKLHQQVQLTEGKRTYLEQSIPDELRDKAVFDNKMKELSSKIETHIKQAEQIDALFRQAEKETTRLESTLHSAQKTTVDAKEALQVQREIFKEAMKQNDFLSYDAYKQALLSVDELKNLEGKLAEYEQKRHLAVSRQADLKEKLQNKQKPNMEQLEFIMKEKQLELSQSEENTMKQREFVAKRKELVENYQNSIQAVEQAEENYADIGLLADAARGKNARRLTFERYILAMFLDTIIHRANHRLSKMTSGRFELQRKMEKAKGNVQSGLELEVFDEYTGLTRHVKTLSGGESFKTSLALALSLAEVVQEMAGGISLETMFIDEGFGTLDPESLEAAVECLLETQENGRLVGIISHVPELKERISARLEVTATNHGSTTKFITASS

SEQ ID NO: 60536 - protein, 307 aa, Listeria monocytogenes
MIYTITLNPSIDYIVQIDQLNLGGLNRMKQDYKLPGGKGINVSRVLNQLNVPSLATGFLGGFTGSFIKDWLQNEGVKTGFVTVKDDTRINIKLKHGEETEINGLGPAISEKEINEFLKVMDKVTANDIVILSGSVPPSLGNDFYNKIIQICKEKKAEFMIDTTGQELLDALPNRPILIKPNHHELADLFGVKLGSVEELIPYGKKCLELGAQHVIVSMAGDGALLFTGEDVYFADALKGELKNSVGAGDSMIAGFVGTFDKTRDPVKAFAAGVATGGATAFSTDLAQKELIDELLPQVKITKITGRN

SEQ ID NO: 60537 - protein, 1530 aa, Listeria monocytogenes
MKQTNLPKKHGLYNPENEQDACGIGFVANIKKISSHKIVEQGIHMLCQLKHRGGEVGGDTGDGAGILLEISDSFFRRECSKLGITLPEKYHYAVGMFNFPQNKTERECLMDETEKLIASEGQMFLGWRKLPTDVTKVGAGARKTEPAIYQLFIQKNAKLDEAGFERALYLIRKQIEKFAATSKLITETFYVPSLSTRTVIFKGMLLPEQINQYYLDLADPAYVSAFALVHSRFSTNTFPSWERAHPYRYLIHNGEINTQRGNVNWMKAREKRAESGLLGEDLAKLLPIIDESGSDSATLDNALEFLVQAGRSLPHAAMMLIPEPWDKNPHMTDPKRAFYEYHSTLMEPWDGPTSISFTNGRVIGTILDRNGLRPARYYETKDHTIIYSSETGVVPVDPSEIIRKETVGAGTMLLIDLEEGRIVADAELKEELTTEKPYRAWLEAEMTEIADLAAADLHYEAMDKSERFKKQRAFGYTQDELNKILIPMVTEKKDPMGAMGYDAPLAVLSQRPQVLFNYFKQLFAQVTNPPIDGIREETVTSAMTLLGDEGNILNPTAQNANRIRLKTPILSRKEFAALEQQTKFAQPTVTLPILFKAEERDGLEARLEALFAEADEKIAAGAELLILSDEGVNADWIGIPSLLAVSGLHHHLVKAGTRTQVSIIVKTAEARDVHQCALLIGYGADAVFPSLAIDTFDGLIKEGRIKGFTLDEAESRYIEAITDGILKIMSKMGISTVQSYRGAQIFEAIGIGDDVIRNYFPGTASQIGGIPLEVIAQEAWLRHREAYHDIGYQSFTLNTGGEYQWRSNGEYHVYNPLAIHSLQQATRENDRETYNLYSDLMQNQNNAFLRGLLTFTSDRKPIPLDEVEPAEAIFKRFKSGAMSYGSISQEAHEALAIAMNRIGGKSNSGEGGENPNRFTPDENGDWRRSAIKQIASGRFGVTSHYLVNAEELQIKMAQGAKPGEGGHLPGNKVYPWISKTRGSTTGVGLISPPPHHDIYSIEDLSQLIFDLKNANQNARINVKLVSKTGIGTIAAGVAKGNADVILVSGYEGGTGAAARTSIRHAGVPWEIGLAETHQTLLLNGLRNKVVVETDGKLMTGKDVLVAAMLGAEEFGFATAPLVTLGCVMMRVCHLDTCPVGVATQNPELRKKFSGSADYVVNFFHFIVAEMREMMAELGFRSLTEIIGHKEFLTTHEKKEAHWKAKYIDFSNMLYSDDFYKNQVQYCTKQQDHKIDQTLDMRELVPLIQPALENGEKVTGTFAVRNVDRAIGTIAGSFISKKYGAAGLPEDTISLDFVGSAGQSFGAYTPLGMTLRIHGDANDYFGKGLSGGKLIVSPDAKTPIKPHDSAIVGNVTLYGATGGFAYMHGKAGARFAVRNSGATAVVEGIGDNGCEYMTGGAVVVLGDIGENFAAGMSGGVAYIYTNNKQATTAKINHELVNSRSTFSTSELTKLKQLIEQHANLTGSDFAQDILQNWEAEKANFIFVIPNEYEMMLTRITTLEQTGKTHDEAELQAFYEHKDGKLVAGVAK

SEQ ID NO: 60538 - protein, 144 aa, Listeria monocytogenes
MLDIKKIKEILPHRYPFLLVDRVISVEEGKKVTAIKNVTANEEFFNGHFPEYPVMPGVLIVEALAQTSGIAMMQSEANKGKIGLFAGIDGCRFKRQVVPGDQLLLEAEITRMRGAIAKAKVKATVEGDLVCEAEIMFALSDLPK

SEQ ID NO: 60539 - protein, 333 aa, Listeria monocytogenes
MDKNIKVSFKHVSKEYDLYQNKSDKIKGLFLPKSKRVQSFWALRNVCFDVYDGETVGLIGINGSGKSTISNIMSGVIPPTQGEVVINGETSLIAIAVGLKGPLSGLENIRLKLLMHGLKGSQIDSLLPSIIEFADIGDFINQPIKNYSSGMRSRLGFAISVHTDPDILVVDEALSVGDQTFYQKCVDKINEFKAQGKTIVFVSHSLGQVKSLCDKIIWMHHGEVREIGDAAEVAEKYDEFVKWFNKQPNDFKKKYQKEQKEKQKLPQEKIYPTPNANKYKMGLFDKCFLVVLLALLVLFGSLISTGKSFMGLFSATDNKVEQVTKVDKRTDWK

SEQ ID NO: 60540 - protein, 737 aa, Listeria monocytogenes
MSDKYVRQDLNVFGMTCAACSTRIEKSLNKADGVEKANVNLVTENAAVYYDPEVTSTEDLIKVVKHAGYDAAEKMSKEEKDAVLEKNFKKEVRRFILSALLSLPLLLTMVTHIPYIHEMAFAETIGNWINPTIQLVLATIVQFYIGWRFYDGAYKALRGKSANMDVLVALGTSAAYFYSVVEYVRHIIDPSVMPHYYFETSAVLITLILLGKLLESYATSRTTESIAGLLELQAKEATVIREGKEWLVPVDSLKIGDVILVRPGEKVPMDAEIISGETSIDEAMITGEPVPVEKKPGDSVIGATINFDGAFQAKITKRMEETVLESIIRLVEEAQGIKAPIQRLADRISGIFVPIVLGIAAVTFIIWYLVTGTVDGSLEAAIAVLVIACPCALGLATPTAIMAGTGKGAESGILFKGGEHLERTSKVDTIVFDKTGTLTEGKLEVSDKKAANDQFFPYLFLMEQQSEHPIAKAIIKMLEPENMDVSAIKQGKIRAKAGHGMTGNLDDSKVELGAYRYVSSLTTIPKEDDELIESWMHAGKTVVAMAIDGVYAGALALSDTPRPEAKEAIQKLKAQGIKTAICSGDQSVVVENMAKDLGIDMFFAEQLPNDKSALVEKLQQDGHIVAFVGDGINDAPALAASDIGISIGTGTDIAIETGDVTLVSHRLTLIPETIELSKATMRNIRQNFFWALAYNCAGIPIAALGLLAPWVAGLAMAFSSVSVVTNALRLKRYKFKS

SEQ ID NO: 60541 - protein, 655 aa, Listeria monocytogenes
MMIGKRLSDRYKILHAIGGGGMANVYLAHDIILDRDVAVKILRIDLADESNLIRRFQREAQSATSLVHPNIVSVYDVGEENDLHYIVMEHVDGMDLKQYIHENHPISYEKAVDIMLQIVSAVAIAHQHHIIHRDLKPQNILIDHDGVVKITDFGIAMALSETSITQTNSLLGSVHYLSPEQARGGMATQKSDIYSLGIVLYELLTGKVPFDGESAVSIAIKHLQADIPSAREQNPEIPQSLENIIIKATAKDPFLRYQNAEEMEKDLQTCLNKDRLNEPKYVFPTDDGDTKAIPIIATKDTMQNLDKTIVPEGKVAAAEVVPEEKKDKKKKKMSKKKKIALIVSSVIIIFIIGILLLWLLGKSPDEVAVPDVSGKTEDQAVALLQKEGFVIGKTAEKNSDEVDEGKVINTDPEAGEMKEKGTKINLFVSIGSKKITMDDYTGRSYTDTKALLEEQGFKNISSEEAYSSEIEKGLIISQTPTQGTEVVAKSTDVKFVVSKGAEPITLKDLRGYTKTAVEDYASPLGLKVSSKEENSSTVEKGQVISQSPSAGTAMNSGDTIEIVISAGPKEKQVKEVTKTFNIPYTPSDEENPQPQKIQIYIQDKDHSMTSAYREMSITQNTSVEITFQIEEGSSAGYKIISDDKVIDEGTVPYPN

SEQ ID NO: 60542 - protein, 646 aa, Listeria monocytogenes
MSEENITNVQENASDYNEDQIQVLEGLEAVRKRPGMYIGSTSQRGLHHLVWEIVDNAIDEALAGFCTEIEITIEADNSITVRDNGRGIPTGINEKIGRPTVEVIFTVLHAGGKFGGGGYKVSGGLHGVGASVVNALSTSLEVYVHREGQKYYQRFERGDVVMDMEEQGETDYRGTIVHFTPDPQIFTETTEFDFDTLRTRTRELAFLNRGLTISIEDKREEHKVRKDFHYEGGIRSYVEHLNKAKDVIHEPPIYLEGERDDIMVEISMQYNTGFSSNIISFANNIHTYEGGTHESGFKTALTRVINDYARRNKLFKDSDDNLSGEDVREGLTAIISIKHPDPQFEGQTKTKLGNSEARSITDKLFSEALNKFMMENPDVAKKIVEKGVVASRARLAAKRAREVARKSSGLEISSLPGKLADCSSRNPEISELYIVEGDSAGGSAKQGRDRLFQAILPIRGKILNVEKARLDRILANEEIRTIFTAMGTGFGGDFDVSKSRYHKLIIMTDADVDGAHIRTLLLTLFYRYMRPLLDAGYIYIAQPPLYQIKHGKQIEYVYSDGQLEDYLASLDGDTKYSIQRYKGLGEMNPEQLWDTTMNPEHRTLLQVNIKDAIDADETFEMLMGDRVEPRRKFIEDNAQYVKNLDV

SEQ ID NO: 60543 - protein, 239 aa, Listeria monocytogenes
MVKTRKEKREYEEPADYDMSSEGQDEFNNEPPMLSRSDSRRGKKKTIFRYPLLNLLIVFFLLIPIVIVIVFVTVQNMGSSNEVKTETESTVNVSDNTQSKEEKEKAKKAAEEKAAAEKAAEEKKAAAEKAEADKKKQEEDAVKAANAKKEQEAAEEKAAADKAAAEKAAAEKAEQQKANEASQQKAGGSHTVKAGDTLYSIARSTYGQAGAAAGVEKIKQANGLGSDNVPVGTVLTIPQ

SEQ ID NO: 60544 - protein, 309 aa, Listeria monocytogenes
MTELGDKLKQARREKGLSLDDLQQITKIQKRYLVAIEEGNYAVMPGKFYARAFIKQYAEAVGLDSATLFDEFESEVPETPQQEVVNNEPTRVQSKRNPMPAQSVGNQANTRNRFFDILPKILIALFIVFILFIVWFFLLNKQDNSTEKVKTDTNNPTVKVEDSTKSKDTSKDTEKKDTTTNEDKSTETKDKKEDTAKEVEVTKGETSGNATTYTVKNTDKMTLSLSATGDSWIGVSDANGSTIQNETLSTQNPSAEIDLGDNKTVSIVIGNSPVTTVKINGKQLELAPDLVKQVLTINLEASDSSSDAE

SEQ ID NO: 60545 - protein, 455 aa, Listeria monocytogenes
MKKIEMYHHKKVLVLGLARSGVSAATIMHKLGAFVTVNDQKPFSENPEAQGLLEQGIKVICGSHPIELLDEGFELVIKNPGIPYNNPMIEKALKLKIPVITEVELAYQISEAPIVGITGTNGKTTTTTIIHHMLNTHKENSSLLAGNIGFPASAVAENATSDQYISMELSSFQLMGVETFKPHISVITNIYEAHLDYHTDRSEYVQAKWHIQKNQIADDFLVINWDQEELKNLTKQTKAQVIPFSTTQRLGQGSYVQNGNIMFNDEVIGERDNILLPGEHNLENVLASVAVAKTLGVTNEEIMHVLETFKGVEHRTQFVVEWQGRKFYNDSKATNILATQSALKGFKNPVVLLAGGLDRGNSFDELLPFFKNVKTLIVFGETADKIGRVGKIAGIEVHYVDNVEAAVPVAYRESAPGDIILLSPACASWDQYRTFEVRGNAYMDAIGELIEEVEK

SEQ ID NO: 60546 - protein, 541 aa, Listeria monocytogenes
MKKVLLNSVKGYTWARFRKDLLAGIIVGIIALPLAMSFAIASGVSPEYGIYSSFVAGIIVSIFGGSKFQIAGPTGAFIPVLLGIVLTYGYQDLLVAGMMAGVLLCLMGIFKIGTLIKFIPRPVTIGFTAGIAVTIFMGQVGNFLGLTGMEKHESFVANMKEIWLHLDSWNFYSVLISCICMLVLFIFPKILPRIPAPLIGLVVTTAIAMLFFPDALPTIGSAYGNIPSTFPPFEFPDMTFANMSKLIGPAFVIAMLGGIESLLSAVVADGMTNTKHNSNRELIGQGIANIVTPMFGGIPATGAIARTATNINNGATSRVSGVIHGVFVLLTLLVLAPVAVNIPIAAMAPILMLVAWNMSERKTFQHIIKLKSGDTLVLVITFLLTVFASLTVAVEVGLLLAVVLFAKQMGSSMQIEEIEPEGAEIAPHLHEKISIFTIRGPLFFGAAQIFQQNIIKAIHVKPKYLILRMGKVPIIDATAEGYFHQIEKEFSKQGGQILITGLTDKAKESLKGSGLYDRIGEEHFFSHTEDAIHYAENALNK

SEQ ID NO: 60547 - protein, 185 aa, Listeria monocytogenes
MSKEVLSKSKEKMEKAEQALTRQLGTIRAGRANASLLDRLSVDYYGAATPVNQMASISVPEARMLLITPYDKTILGEIEKAILKSDLGLTPNNDGSVLRLSIPQLTEERRKELVKEVKKEAEEAKVAVRNIRREANEELKKLEKNGDITEDDLRSYGEDVQKLTDESIKNIDSITKDKEAEILEV

SEQ ID NO: 60548 - protein, 160 aa, Listeria monocytogenes
MMNRVVLVGRLTKDPDLRYTPAGVAVATFTLAVNRTFTNQNGEREADFINCVVWRKPAENVANFLKKGSMAGVDGRVQTRNYEDNDGKRVFVTEVVAESVQFLEPKNNNVEGATSNNYQNKANYSNNNQTSSYRADTSQKSDSFASEGKPIDINEDDLPF

SEQ ID NO: 60549 - protein, 336 aa, Listeria monocytogenes
MTTVKAHDPRRKRRRITFIVVIVLLILAFFYGLTTGSVKVTYSDAWQTLTGGGSDLANQLIWNLRLPRLLIAFLVGAALAIAGCLLQGVMRNPLADPGVIGVSAGGGFVAILMTLAFPALASFVPIGAFLGAFGTAILIYLLAWDRGVSPLRVILSGVAINAFIGAMTSGVMVLYSNRVQSVISWMTGTLSGKSWYHLDMIWPYMLVGFVLSGFAIRSSNVLLLGDDAAKLLGFSVERHRFFIIMLAAFLSGVAVSVAGLIGFVGLVVPHIFRLIIGNDYKYLLPLSALGGALLVGFADTAARSWFGSIELPVGILLAMIGAPFFLFLLQRGRVAS

SEQ ID NO: 60550 - protein, 358 aa, Listeria monocytogenes
MTLKVGIIGCGGIANGKHMPSLLKAEKAEMVAFCDIVLEKAEAAAKEFGSENASVYTNYVELLQDKSIDVIHVCTPNISHAEISIAAMEAGKHVMCEKPMAKTTEEAKSMIEAAERTGKKLTIGYQNRFRKDSDYLHQVCENGELGDIYYAKAKAIRRRAVPTWGVFLDEEAQGGGPLIDIGTHALDLTLWMMDNYKPKYVVGNSYHKLAKKENAANAWGSWDPNKFTVEDSAFGFITMENGATIVLEASWTLNTLDVGEARTSLSGTEGGADMEDGLRINGEAHSQMYEKKIQLEAGGVDFYDGTGDDPALIEAEQWLEAIEKNTDPVVKPEQALVVTQILEAIYESSKTGQPVYFN

SEQ ID NO: 60551 - protein, 768 aa, Listeria monocytogenes
MKPTWKIGIIVAAVPLIIIAVVLWGSFKEARYNLVSLPDDGVVLNNEQETLQFQKGNTLYRSWNSDQLIAKNDKEDTRNEIMESTILYLNKEALMFTKSVPVIDTNGVSSKLKGRQVYQQTNSSYKYKNSEIVENSIVKLANRQYYLNADATLYLGGKEIKKVTKPLLLIDKTGSVTIYENKKKSRFLGHMTLKVNDKTVLDASNETYTVGERKIDLASFGGTDNEKIVVKEDEKKEDKKKTAESAKKTASNTSQSENESNQTTKGTGNQLNATKKYGNNLNVGNGTSDSEPNDGKDTKNNGSGSNANGGTNQSGLNEIDDYEAVLRKIEDLNKKLERNIPVLRIGYIAPGVTSVKVSYNYADPNNTLIGVTKISAVDEKTGKTVNTQYVSAVDTEATLKGLSPNGKYHLEFTYQYDLGTNKGIQEVKMQSDSFTTQTVAAIYQMQSVTSTTMKVNIALDAQIDDVKRARIKVTKSDGDFFYMNVSANFLNGNGEILNATGLKPSTAYQFQTVIEMKNGETIELNSSEKYYTMQATVLKNLKASQSVNKVLQVQYDWSSADYTLNQAIIELEDEEDNTEVDYQIVNQEKGNIHLVPDTKSELINLKAKLVLKTTNNNTKESKTFEYPVKQEIEYDKQAKLTMDLTPFQTEENSEAQTEKQDVVAEKETNGNDLTAKMEDVLAPQNATYDMSFSMQRKALETYQLAFERKIAGIDDDNWTMWKSQQVTTDEAGQVKVTETISKLAKDSFDYRVAVYDAQGALQLYVYQK

SEQ ID NO: 60552 - protein, 388 aa, Listeria monocytogenes
MRYLTAGESHGPGLTTIIEGLPAGMPLLAEDVNKELKRRQGGHGRGARMRIEKDQVQITAGIRHGKTLGAPVAMFVENKDWKHWETVMSIEPVPEKNEKSRRVSRPRPGHADLVGGMKYGHNDMRNVLERSSARETTVRVAAGAVAKKLLHELGIEVAGHVLEIGGTRANLTRDYAVAEIQETSEASPVRCLDGVAAEEMMQKIDDAKKNGDTIGGIVEVVVGGVPAGLGSYVQWDKKLDAKIARAIVSINAFKGAEFGVGFEAARKPGSEVMDEILWSKEDGYTRRTNNLGGFEGGMTNGMPIVVRGVMKPIPTLYKPLQSVDIDSKETFNASVERSDSCAVPAASVVAEAVVAWEVAVAVLEKFDGDRFDTLKKHVEEHRNLTKEF

SEQ ID NO: 60553 - protein, 449 aa, Listeria monocytogenes
MEKHYDYIAIGGGSGGIASINRAAMHGAKCALIEPKFLGGTCVNVGCVPKKVMWYGAQIKEAMDLYADAYGYQVDASFNFQKLVENREAYIERIRGSYKNGLDNNNVDWIKGYAEFVDEKTLRVNGELVTADHILIATGGEPALPSIPGAEFGITSDGFFALKELPKKVAVVGAGYIAVELAGVLQQLGSETHLFVRKHAPLRNFDPLLTDTLTEIIEQSDMTLHKHAIPQKVEKNPDGSLTLSLEDGRTETVDTLIWAIGRKPVIKGLQIEKSGVELLESGHIAVDKFQNTNVAGIYAVGDVTGHYELTPVAIAAGRRLSERLFNNKKDAHLNYENIPTVVFSHPAIGTVGLTEPEAIEKYGKENIKVYTSSFTSMYTAITDHREPCRMKLICEGKTERVIGLHGIGYGVDEMIQGFAVAINMGATKADFDNTVAIHPTGSEEFVTMK

SEQ ID NO: 60554 - protein, 325 aa, Listeria monocytogenes
MSDLFTTIKGQVTGKNVRIVLPEGTDERIVGAAARLQKENIVKPILLGNKAEIEAKAKEIGVSVEGIAIHEPATDPLFDELVAAFVERRKGKATEEAARKMLVDPNYFGTMLVYTGKAEGLVSGAAHSTGDTVRPALQIIKTKPGVSKVAGAMIMVRGEERYLFSDVAINIAPVAADLAENAIVSAETAEIFGIDPRVAMLSFSTKGSAKSDETEKVVEATALAKEKAPELTLDGEFQFDAAFVPTVAEKKAPGSVIKGDANVFIFPSLEAGNIGYKIAQRLGNFEAVGPILQGLNAPVNDLSRGCNTDDVYNLTLITAAQAVNK

SEQ ID NO: 60555 - protein, 397 aa, Listeria monocytogenes
MLKFEHVTKTYKGGKKAVNDLTLNIDKGEFVCFIGPSGCGKTTTMKMINRLIEPTEGKIFINDKDIMAEDPVKLRRSIGYVIQQIGLMPHMTIRENIVLVPKLLKWSEEKKQERAKELIKLVDLPEEFLDRYPYELSGGQQQRIGVLRALAAEQNLILMDEPFGALDPITRDSLQEEFKNLQKELGKTIIFVTHDMDEAIKLADRIVIMKDGEIVQFDTPDEILRNPANSFVEDFIGKDRLIEAKPDVTQVAQIMNTNPVSITADKSLQAAITVMKEKRVDTLLVVDEGNVLKGFIDVEQIDLNRRTATSVMDIIEKNVFYVYEDTLLRDTVQRILKRGYKYIPVVDKDKRLVGIVTRASLVDIVYDSIWGTLEDATENQEEQADSKTTEPEMKQEG

SEQ ID NO: 60556 - protein, 252 aa, Listeria monocytogenes
MFKKLFRQDENILNSELAEDLPIPRHVAIIMDGNGRWAKKRFLPRIAGHKEGMDVVKRVTRYANAIGIDVLTLYAFSTENWKRPTDEVDFLMKLPVEFFDSFVPELIEENVRVNVMGYRENLPDHTMRAVEKAIADTAHCTGLTLNFALNYGGRSEIITAAKEAMKELELEGKSADDLTEEKLNDHLMSSGLGDPDLLIRTSGELRLSNFMLWQLAYSEFYFTDTHWPDFSKEDFLQAIIEYQNRSRRFGGL

SEQ ID NO: 60557 - protein, 301 aa, Listeria monocytogenes
MSEPFKSGFVAIVGRPNVGKSTLLNHIIGQKIAIMSDKAQTTRNKVQGVYTTDESQIIFIDTPGIHKPKHKLGDFMVKIALNTFQEVDLIYFVIDASTGFGRGDEFIIEKLKNVQTPVFLLINKIDLIAPEDLFKLIEQYRDLMDFDEIIPISALQGNNVPNLLEQTNANLEIGPMYYPKDQITDHPERFIISELIREQVLQLTREEVPHSVAVVIEGIEKNPKTEKLTINATIIVERSTQKGIIIGKQGQMLKQIGMRARKEIERLLGSKVFLEIWVKVQKNWRDKEHYLQDYGFDREEY

SEQ ID NO: 60558 - protein, 273 aa, Listeria monocytogenes
MKKLTKGLGILLASSLVLGLAACGGGSDDKALSTEKITIGTTAGPHQQIAEEVQKLAKKDGLEIKIKTFDDYNTPNTALNDGDLDANNYQTIPFLEQQKKDKGYKLDVAFKTVAFPMGIYSNDIKDLKNLKKGDKIAVPNDPSNEYRGLKLFEDAGVIKLKDGVEEKATKKDIAENPLDLEIVELEASQIPAQLDEVAAAAINTNFAMGAGLSINKDAIYHEPTKDNPYPNVFVVRSANKDDEVVKTLEKYYHSDEVKAFIEKEFNGSVVPAF

SEQ ID NO: 60559 - protein, 510 aa, Listeria monocytogenes
MTTSIIERIDAWAEKTPDFPCYEYAGTRLSYKELKRQSDAFGSFLLKNLITDKEKPIIVYGHMSPLMLVAFLGSIKSGRAYVPVDVSMPVERIEQIKKAADPSMFICTEELPNNLTITGCPVLTQDQLMDALEKHFGEVPDKEACVNNDDNYYIIYTSGSTGNPKGVQISQNNLVSFSNWILQDFSLSQGLRFLNQAPFSFDLSVMDLYPSLLSGGTLVPLDKTITANMKDLYREIPAQNLDVWVSTPSFADLCLLDENFNQENNPRLTRFLFCGEVLAKKTASELLDRFPDAVIYNTYGPTEATVAVTQVKVTREIIDAYPSLPLGVIKPDMRLHIVDQETGEVLPEGEKGEIVLIGASVSKGYLNEPEKTDQVFFDYKGYQAYRTGDSGIIKDGYLFFQGRLDFQIKLHGYRIELEDIENNLKKVSYIQNCAIIPKMKDEKVDMLVAQVIPTTHDFEKEYQLSAAIKKELKEFMPAYMIPRKWIYKTDFPLTMNGKIDRKSLNSEVNK

SEQ ID NO: 60560 - protein, 570 aa, Listeria monocytogenes
MAFDAMFLKAMTEELAEHGESGRIMKIHQPFSHELVLYIRKNRENKRLLISSHPSYARIQWTDDIPENPATPPMFCMLLRKYLEGAIIESITQLPNERILQFSIRGKDDIGENRFCDLFVEIMGRHSNITLVDRAKNVIVDCIKHVSPAQNSYRTLLPGATYVLPPATDKLNPFEVTSEQILDRLDFSAGRIDKQLVQNFAGFSPLLAREIVFRAGNLTADSLVAAFFEVMGLVNDHLGSAAVPNEWRIQNKEDYYFFSLRHVDAEITEFANLSTLLDHFYIGKARRDRVHQFAHDLEKLLSNELARSRLKIEKLENTLLETEKADVYRIQGELLTANLHLMERGMEEITVENFYDDMKKMTIPLDTRKTPSANAQSYFSRYQKLRNAVEVVKEQIALTKEEITYLESVESQLETSGPQDVEEIRQELAEQGYLRYKQKKGSRKKATLPAPEKYTSSTGLTILVGKNNKQNDYLTNKLARNNEYWFHVKDLPGSHVVIQSNNPDETSITEAAMIAAYYSKARLSATVPVDGTLVKHVKKPNGAKPGYVIYDNQTTYFVTPDEKLVLELKN

SEQ ID NO: 60561 - protein, 426 aa, Listeria monocytogenes
MNAFDKFYKKTVEERHAILAEYADLNEEEQAFLASTGALSFDKANHMIENTIGIYSLPLGLGMNMLLNDKRYVVPMAMEEPSVVAAQSAGAKLIAQNGGITGSATKRKMIGQIELISVSDIQAAKENIIANEEQLIAIANQAHPSLQKRGGGAVKIQVRTAQTANDETLFIVHLLVDTQEAMGANMVNTMVETLAPELEMLTNGTANMRILSNLVDEATATAVCRINPESLATKTQSGEWVRDRIIAAYEFADADIYRAATHNKGIMNGIDAVIMAFGNDWRAVEAASHAYAARTGSYKPMSKWSKDADGYLVGELTLPMPVAFVGGSIAIHPIASLSKKIARVESAKELAMLVCAVGLTQNLAALKALVTEGIQRGHMSLQAKSLAMTAGAEADEIEIVATFLQESKQLNVVAAKEFIAKLRSEK

SEQ ID NO: 60562 - protein, 379 aa, Listeria monocytogenes
MSAIRYELIKTDKQTGARLGKIHTPHGTFDTPMFMPVGTLATVKTMSPEELKAMGAGIILSNTYHLWLRPGEELIREAGGLHKFMNWDQPILTDSGGFQVFSLSKMRDIKEEGVHFRNHLNGDKLFLSPEKAIQIQNALGSDIMMSFDECPPYPASHEYMKKSVERTSRWAERGLKAHVRPEDQGLFGIVQGGAYEDLRAQSAKDLVSLDFPGYSIGGLSVGEPKDVMNRVLEHTTPLLPANKPRYLMGVGSPDSLIDGVIRGVDMFDCVLPTRIARNGTCMTSSGRLVIKNAKFTHDFRPIDENCDCYTCKNYSRAYIRHLIRCEETFGIRLTTYHNLHFLLNLMKQVRGAIMEDRLADFREEFFEQYGFNRPDAKNF

SEQ ID NO: 60563 - protein, 426 aa, Listeria monocytogenes
MGDSEIYVSLDIGTASVKVIIAEMADDRLNIIGVGNVESSGIKKGIIIDIDKTVESIKKAIEQAERMVGVEISQVIVGVVSSQVHLEACRGIVAVGSENREITDEDVWNVMDAAQVVPLSPEREIINTIPDQFVVDGLTGITDPRGMIGVRLEMEGTLITGSKTILHNTLRCVERAGLEISDIALQPLAEASISLSEDDKEFGTALVNVGAGTTTVSVFEQGRLTYTGVIPVGGDNITKDLSLGLNTSTANADRVKLDHGYAFYDDASPDEVFAIDVIGSDQKQHFTQVEVADIIEARMEEIFQLVVEELTRVGKTHLPGGYVLTGGSMAIPGAIDLAGKTLAAHVRLAIPDYIGVREPSFTTAVGLIKYAYQMAELEGRDVSSSANEPRYDDEAPKQKQPKPKQKKSDDEKVSTKMKNFFGAFFE

SEQ ID NO: 60564 - protein, 222 aa, Listeria monocytogenes
MLKKTIAIIILIIGLLLIFSPFIKNGIVKYMSGHETIEQYKASDIKKNNEKDATFDFESVQLPSMTSVIKGAANYDKDAVVGSIAVPSVDVNLLVFKGTNTANLLAGATTMRSDQVMGKGNYPLAGHHMRDESMLFGPIMKVKKGDKIYLTDLENLYEYTVTETKTIDETEVSVIDNTKDARITLITCDKPTETTKRFVAVGELEKTEKLTKELENKYFPSK

SEQ ID NO: 60565 - protein, 306 aa, Listeria monocytogenes
MYKQMKLKATDGLDLHLHIWDEVENPVGVVQIVHGMAEHGARYGVFAERLNEAGYIVVADDHRGFGKSAIDESYLGHLDGETGFQDMIKDEVVVRTYLKETYPGLSYFIFAHSMGSFVIRTFMAQHQVDGVILSGSGLQPIPLLKMGQIITKQRIKKDEMKRSGFLNKLAFWGYNKPFNENHRFSWLSRDVAIYEAYEKDPFCGPVVGTSGFFHNLFEAVKISQQKETVESVPKDLPILLLSGSDDPVGHFGKDTPKIALALEAAGVEDVTYKIYEDARHELVNELCKETVFKDVIAWLNTKNKEA

SEQ ID NO: 60566 - protein, 175 aa, Listeria monocytogenes
MPLSPLDIHNKEFTRGFRGYDEDEVNDFLDQIIKDYEQVIKEKKRIEDTLNNSEERLGHFTNIEETLNKSLIVAQTAAEEVKASAEKEAKLIIREAEKNADRILSDSLSKARKIAIEIEDLKRQSKVFRERLRMLVEAQMDLIKSEDWQQMMAYDVDATELASIKEVESAESEER

SEQ ID NO: 60567 - protein, 434 aa, Listeria monocytogenes
MILTIKFLIIALLIAISAFFVATEFAIVKMRPSRLDQLIAEKDKRAVLARHIYNHLNAYLSACQLGITISSLGLGWLGESTVEAALHPLFSLMELPQSAITILSFTIAFLFITFLHVVVGELVPKTLAIDKTETVALAVARPLHIFYKVMFPFIWILNGSAVFIARLFGLEPASEHEIAHTEDELKIIVGESYKSGEINQSEFRYVNKIFDFDERMAKEVMIPRTEIVTVDTGSTIGELSDIMQNERYTRYPVIDGDKDHVIGVLNLKEILSAYVEHGSSPSFSIDPYVKPIIRVIETIPIKELLFRMQRERSHIAILLDEYGGTSGLVTVEDIVEEIVGDIRDEFDADEIPEIRKIKDGHYIVDAKLLIDEVNNILGTEIEEEEVDTIGGWFLTQNYEVEVGDEIDYDGFIFRVKQGEPHHIEYIEIIKKTND

SEQ ID NO: 60568 - protein, 837 aa, Listeria monocytogenes
MAGLLKKIFESGKKDVKYLERKADEIIALADETAALSDDALREKTVEFKERVQKGETLDDLLVEAFAVAREGAKRALGLYPFKVQLMGGIVLHEGNIAEMKTGEGKTLTATLPVYLNALSGEGVHVVTVNEYLAHRDAEEMGVLYNFLGLSVGLNLNALSSTEKREAYACDITYSTNNELGFDYLRDNMVVYKEEMVQRPLAFAVIDEVDSILVDEARTPLIISGEAEKSTILYVRANTFVRTLTEEEDYTVDIKTKSVQLTEDGMTKGENYFDVENLFDLENTVILHHIAQALKANYTMSLDVDYVVQDDEVLIVDQFTGRIMKGRRFSEGLHQALEAKEGVTIQNESKTMATITFQNYFRMYKKLAGMTGTAKTEEEEFRDIYNMRVIEIPTNKVIIRDDRPDLIYTTIEAKFNAVVEDIAERHAKGQPVLVGTVAIETSELISSKLKRKGIKHDVLNAKQHEREADIIKHAGERGAVVIATNMAGRGTDIKLGEGTIEAGGLAVIGTERHESRRIDNQLRGRSGRQGDPGVTQFYLSMEDELMRRFGSDNMKSMMERFGMAEDAIQSKMVSRAVESAQRRVEGNNFDSRKQVLQYDDVLRQQREVIYKQRYEVINAENSLREIIEQMIQRTVNFIVSSNASSHEPEEAWNLQGIIDYVDANLLPEGTITLEDLQNRTSEDIQNLILDKIKAAYDEKETLLPPEEFNEFEKVVLLRVVDTKWVDHIDAMDHLRDGIHLRAYGQIDPLREYQSEGFEMFEAMVSSIDEDVARYIMKAEIRQNLEREQVAKGEAINPAEGKPEAKRQPIRKDQHIGRNDPCPCGSGKKYKNCHGKEA

SEQ ID NO: 60569 - protein, 591 aa, Listeria monocytogenes
MEKRTSYCGELNEAHIGQSVVLHGWVQKRRDLGGLIFIDLRDREGIVQVVFNPEFSKEALEIADSVRNEFVVTIKGTVHARGEKAINEKLATGKVEVLAEEITILNTSKTPPFYIEDGVNVSDELRLKYRYLDLRRPEMNNIFKMRHTVTRTFRNKLDALGFFDIETPYLTKSTPEGARDYLVPSRVYPGNFYALPQSPQILKQLLMTAGFDKYYQIVRCFRDEDLRGDRQPEFTQIDLETSFLTKEEIQAITEDMLVDVVKEAKNITIEKPFPRMTYKEAMDRFGSDKPDIRFGLELQNVSDVVKDVDFKVFQSAIENGGEVKAINAKAAAANFSRKDLDALGVFVANYGAKGLAWLKVEAGELKGPIAKFFPEDKAAELKVALQAEDGDLLLFAADKADIVAASLGALRNKLGKDLNLINEEELAFLWVTDWPLFEYDEEAERYVSAHHPFTLPKEEDIPLLETDSSKVMAEAYDIVLNGYEIGGGSLRIYKKEVQESMFRALGFTDESAKEQFGFLMDALEYGTPPHGGIALGLDRIVMILAGRNNLRDTIAFPKTGSAVDPLTNAPGEVSEAQLAELKLETVKKETN

SEQ ID NO: 60570 - protein, 430 aa, Listeria monocytogenes
MEKIIVRGGKQLNGSVKMEGAKNAVLPVIAATLLASKGTSVLKNVPNLSDVFTINEVLKYLNADVSFVNDEVTVDATGEITSDAPFEYVRKMRASIVVMGPLLARTGSARVALPGGCAIGSRPVDLHLKGFEAMGAVVKIENGYIEATAEKLVGAKVYLDFPSVGATQNIMMAATLAEGTTVIENVAREPEIVDLANFLNQMGARVIGAGTEVIRIEGVKELTATEHSIIPDRIEAGTFMIAAAITGGNVLIEDAVPEHISSLIAKLEEMGVQIIEEENGIRVIGPDKLKAVDVKTMPHPGFPTDMQSQMMVIQMLSEGTSIMTETVFENRFMHVEEMRRMNADMKIEGHSVIISGPAKLQGAEVAATDLRAAAALILAGLVADGYTQVTELKYLDRGYNNFHGKLQALGADVERVDDSKVDVTNLASLF

SEQ ID NO: 60571 - protein, 738 aa, Listeria monocytogenes
MAKEQNLTAEQVIDMASHYMNQEHLALVKKAYEFARDSHKEQFRKSGEPYIIHPIQVAGILVELKMDPSTVASGFLHDVVEDTPVTLADLEEVFGSEVAMLVDGVTKLGKIKYKSHEEQQAENHRKMFIAMAQDIRVILIKLADRLHNMRTLKHLPVEKQRRIANETLEIFAPLAHRLGISRVKWELEDTALRYLNPQQYYRIVHLMKQKRDARERYLHDVIDGVNENLDELNIQADISGRPKHIYSIYRKMSEQNKQFNEIYDLLAVRIVVSSIKDCYAVLGIIHTRWKPMPGRFKDYIAMPKSNMYQSIHTTVIGPQGEPLEVQIRTHEMHQIAEYGVAAHWAYKEGKVVNSKTSFDNKLTWFREILEYQNESDNAEEFMESLKLDLFSDVVYVFTPKGDVYELPNGSVPLDFAYRVHTEIGNKTIGAKINGKIVTLDYKLKTGDIIDILTSKHSYGPSRDWLKLVQTSQARNKIKQFFKRQAKEENVEKGRDLVEKEIRQLGFEPKKIMAAENLRKLADKLNFSHEDDLFAAVGYNGITALQVANRLTEKLRKERELEAETEKLLTQSENKPSNSDANNEKLKIKHNAGVVVQGVGNLLIRLSRCCNPVPGDDIVGYITKGRGISIHRQDCPNVQAIEPERLIEVDWEDADSQAKNDYNVDIEIYGYNRNGLLNDILQVINSLTSNINGVNAKVDNNKMATLVVTLQIHNINHLQRVVDKIKQIPDVYTVRRLMN

SEQ ID NO: 60572 - protein, 671 aa, Listeria monocytogenes
MKKTLDRQAVDTIRSLSIDMIEKANSGHPGMPMGAAPMAYMLFAKHLVFNPANPEWFNRDRFVLSAGHGSALLYSMLHLFGYDVKMEDLKQFRQLDSLTPGHPEFGWTAGVDATSGPLGQGIGMAAGMALAESHLAAEYNQPNYPIVDHYTYAICGDGDLMEGVASETASLAGHLGLGKLIVLYDSNDICLDGDLSATFSENAADRFRAYGWQVLRVEDGNNLAAIQEKIVQAKLETSKPTLIEVKTVIGYGAPTKAGSSASHGAPLGEKEANGAKEHYEWAEEPFTVPAEVRDYLRNYKARGEKLEGAWNTMLANYKKEFPELARQLDRVLAGEVAADWNANLPTFEAGTNVATRSASGKMINAIAAELPELFGGSADLGCSNKTFIDASPAYSIQDPAGKNIWFGVREFAMGAMLNGMALHSGLRVFGSTFFVFSDYVRPAMRMAALMQLPVTYVFTHDSIAVGEDGPTHEPIEQLASLRAMPGLTVIRPADAKETRAAWEIAATNTNGPIALVLSRQDLPVLENDQEEVDAGIEKGAYIVAPANSSKPDAIIIATGSEVSLAIEAKAELAKKDIDVSVVSLSSWERFEKTTDAYKESILPKEVTARFAIEAGATFGWKEFIGSEGDMLGIDHFGASAPAKDLFNAYGFTPENVADRVEAVIAKAGVRV

SEQ ID NO: 60573 - protein, 137 aa, Listeria monocytogenes
MDYVITTELPSAEEFVQLRVDAGLSFRAIEASRKALLKSVYFVGLRSKENGKLIGMGRLVGDGIMFIVSDIAVFPSFQGKGFGKVIMTHIKDYIEANLDKTACVTLLADVPAHGLYKQFGFRESAPASIGMIYQVGN

SEQ ID NO: 60574 - protein, 454 aa, Listeria monocytogenes
MILKTNLFGHTYQFKSITDVLAKANEEKSGDRLAGVAAESAEERVAAKVVLSKMTLGDLRNNPVVPYETDEVTRIIQDQVNDRIHDSIKNWTVEELREWILDHKTTDADIKRVARGLTSEIIAAVTKLMSNLDLIYGAKKIRVIAHANTTIGLPGTFSARLQPNHPTDDPDGILASLMEGLTYGIGDAVIGLNPVDDSTDSVVRLLNKFEEFRSKWDVPTQTCVLAHVKTQMEAMRRGAPTGLVFQSIAGSEKGNTAFGFDGATIEEARQLALQSGAATGPNVMYFETGQGSELSSDAHFGVDQVTMEARCYGFAKKFDPFLVNTVVGFIGPEYLYDSKQVIRAGLEDHFMGKLTGISMGCDVCYTNHMKADQNDVENLSVLLTAAGCNFIMGIPHGDDVMLNYQTTGYHETATLRELFGLKPIKEFDQWMEKMGFSENGKLTSRAGDASIFLK

SEQ ID NO: 60575 - protein, 626 aa, Listeria monocytogenes
MARIPEEVIDQVRNQADIVDIIGNYVQLKKQGRNYSGLCPFHGEKTPSFSVSPEKQIFHCFGCGKGGNVFSFLMEHDGLTFVESVKKVADMSHLDVAIELPEERDTSNLPKETSETAKMVEMHQLTAKLYHYILMETEEGTAALTYLKERGMSEQMMTTFQIGFAPNHHATITSFLEKRGMDLQLAGAAGLLSERDDGQMVDRFRNRIMFPITNDRGQIIAFSGRLFDRDDGPKYLNSPETPVFNKRRILFHFSEARQAIRKQEEITLMEGFMDVISAEEAGVQNAVASMGTSLTEEHADLIKRLTNRAIICYDGDRAGIEAAYKAGTLLVERNRLDVFVLQLPAGKDPDDFIRASGPEKFKEVYKQQRMTWTAFKIHYLRKERNLQNETEQIGYIDDCLREIAKLDQAVERELYLKQLADEFELTIETLKQQLQQSLKNSQKSRQMASYNEPPIDDSFMGMMPQEGAEMLFSFEQPAQKLSAHTISEQQLMKAMMESRDNFLLIKQLLGDTTFYHDNYEALYTYLIGYFAEGNDADPTKFMDSVPDAAMKGLISSLEMVISPDEQGKPQFEDYIRSLKRYKLEQKKKELEQELATYNRENDNENEIRVMLEIVQLNRQLNSGQLD

SEQ ID NO: 60576 - protein, 246 aa, Listeria monocytogenes
MQIKELAELTGVSVRTLHHYDKIGLLVPQKDDWNGYRIYSEKDVDKLQQILFFKELDFPLKKIQQILDDPLFDKNVALDMQRHLLIEKKQRIETMLATLDLTIKNEKGEITMTNKEKFTGFDFSSNPYEEEARKLWGDKVVEKANEKVNNMSEKEQLTLKESFDAEFRHLASVRKLTPESEEAQLEIDHFFHYLNDTHGNIYSLEAFASLGEMYVNDERFTKNIDQFGDGLSQFLQEAMTIYAKNK

SEQ ID NO: 60577 - protein, 411 aa, Listeria monocytogenes
MKEIKFLHMADLHLDSPFIGLSTLPQPLFSAIQESTFQSLERITTVAIKEAVDFVLIAGDIYDSEDQSVRAQARFAKEMKRLEVANIPVFMIHGNHDFIEKHKEKLALPSNVHVFSEQVEVMLHKTATGVSVNIYGFSYNERHIRSSRIDEYKVQGDADFHIALLHGSEVSSSEEHDVYAPFRVQEISKKGFDYWALGHIHKRQLLAESPSIYYPGNIQGRNRKESGEKGASIINLSEASTTIDFIGTSPIIWEEIIIPLPKNSEINAFYREITNVLESYQGRSHSYFLHIIIQMASSQKINTNDWLQMLQEEVELSNTTFVWVHKLTTEITNRSNLQTWYESHLAGEEIRRSFEQLQDESAFYQSVEALYLESGANRYLDDLSEQERERLLENALMELGMTLAEVEGDEK

SEQ ID NO: 60578 - protein, 566 aa, Listeria monocytogenes
MKNKKRTLVALTGAAIGTGIAAKKISEQKAAEKERAVDEAIKARYYGDKQVYFVGGGIASLAGAVYLIRDANFDGKNIHIIEGMHILGGSNDGAGSVEHGFVCRGGRMLNEETYENFWDLFSSIPSLDMPNFSVTEEILNFDHLHPTHAQARLVDKDRNILDAHSMGFNNNDRMLMTKLLATPEEKLDNLTIRDWFDEHFFETNFWYMWQTTFAFQKWSSLFEFRRYMNRMMLEFSRIDTLEGVTRTPLNQYESLILPLKTFLDKHHVDFTINQTVEDIDFKDAPGITATALHLSDESTIELGPDDDVIMTNACMTDSATLGDMNTPAPKPEEKPISGELWYKVAQKKPNLGNPEPFFAHEEETNWQSFTVTCHGDKLLKRIERFTGNIPGSGALMTFKDSNWLMSTVVAAQPHFKAQDANTTIFWGYGLYPDRVGDFVKKPMKECTGEEILYELMCHLNWQDDFEEIKADIINVIPCYMPYIDAQFEPRAMSDRPAVVPEGSTNFAMISQFVEIPKDMVFTEEYSVRAARIAVYTLLDIDKKICPVTPHNRDPKVLAKATQTMFR

SEQ ID NO: 60579 - protein, 299 aa, Listeria monocytogenes
MKWFKGIAVVLLLAILTACGNTEVKETTKQTEEIKVKDATGETITLKKAPTKIVSLIPSNTEILFALGLGDEVKGVSAYDDYPKEAQKIEKVTSTSVDTEKIIALKPDLVLGHESMLATEKDAYKILTDAGINVFVVPDATNLKEVEKSIATIGDLTGTEKEATKVTDSMEKQKVAIEKKAKELKTSPKVWIEISPDLYTAGKGTFMNEMLELAGGTNIVTESGFIPYNEEKVVELQPDIILSVYPDAKSTIQKRAAWKDIPAIKNDKIYEMDANKLSRPGPRLLEGAADIQAVLEKNN

SEQ ID NO: 60580 - protein, 66 aa, Listeria monocytogenes
MPKMKTHRGSAKRFKRTGSGKLKRRHGFTSHMFANKSQKQKRKLRKSAMVSAGDFKRIRQMVAKMK

SEQ ID NO: 60581 - protein, 419 aa, Listeria monocytogenes
MKFSTWDINLKVRLFGEALLDISFWMVFPFLTIYFSESIGRELTSLLLIISQVLAVFTALLGGYFADNFGRKRMMSISVIGEGFGFLVFAIGALHVVDSPYLSFAGFAIASVFMAFYQPASQAMIADVVPPEHRTHIYSVFYMMINIAVVIGPILGSVLFYNFTTETLLAIVCADLLLLFLLQKFGHETAPLLVNPDLQKEVVRKSIGAVLMEQLKNYKIIFKDKIFFLYIVAGIIVSQSFMQLDLLFPLYIKEVIGASNLFAFHFTGEQLFGVIVSINGFFVAALTVVVTRWMSHFREKFVFMNSSFLYAIAIFLFGISTGPWGAICAIILFSFAELMTVGLQQTFVSQLAPEDKRAMYFSAAGLRYTLGKVIAPLAITLSTLIGYTGTFTIIGILALISGLIYYYMYSEFEKQRQVS

SEQ ID NO: 60582 - protein, 188 aa, Listeria monocytogenes
MKSENKFFSGAFGWIKIILIALILAFGIRYFLISPVTVNGKSMDPTLHDGEHLFINKVSDPKRFDIIVFPAPDEENAEYIKRVIGLPGDKVEYKEDQLYINGKKYDEPYLDSEKAALKNGFLTTDAEGDPNFTMADIPNSDGSLTVPKGELFVLGDNRQVSKDSRYIGFISQDTVLGKVISFGKSLER

SEQ ID NO: 60583 - protein, 172 aa, Listeria monocytogenes
MNVKKNIALPAIMVVTFILEGVFSLQFANGLFNDRHLFIPHFLLIMLTIMTCFYKRNTTLAYAFILGLLFDIYYTGVMGIYFAIFPFTVYITDKFMKVLQNNILLVGLIAIFNIILTESLVYAFYYLIGTTTMSIPVFIDQRLWTTILINLAFFLVVFFPFRLFLDRLVKSE

SEQ ID NO: 60584 - protein, 166 aa, Listeria monocytogenes
MSKVLEAKQSAVEEIKTKLSASASTVIVDYRGLNVGEITDLRKQLRDAGIEFKVYKNSLTRRAVEANGYEGLEGALTGPNAIAFSNEDVVAPAKILNDFAKDHEALEIKAGVIEGKVASLEEIKALATLPSREGLLSMLCNVLQAPVRGLAIATKAVADQKEGQEA

SEQ ID NO: 60585 - protein, 338 aa, Listeria monocytogenes
MTQKKVAILGAGSWGTGLALVLADNNHKPVIWGNLDKIVNEINESHTNSHYLPDIILPTEVKATLSLDEAIDGAEIVVIAIPTNAMRIVCKQLNEALKEPTILVHVSKGIEPETNLRMSEVIEEEIDAAKRKALVVLSGPSHAEEVALRHPTTLCASCKDLSAAEIVQDRFINNNLRIYTNDDVIGAEIGGALKNIIALGAGISDGLGYGDNAKAALMTRGMAEITRLGVAVGSNPQTFYGLTGIGDLIVTCTSVHSRNWRAGNMLGKGENLDEVLEKMGMVVEGVRTAKAVHGWAKKLDIDMPITESIYAILFENKDAREAVDLLMGREKKIEKESF

SEQ ID NO: 60586 - protein, 156 aa, Listeria monocytogenes
MPRKGPVAKRDVLPDPIYNSKLVTRLINKMMVDGKRGKSQAILYSAFDIIAQETGKDPMEVFEQAMKNIMPLLEVKARRVGGANYQVPIEVRADRRSTLGLRWLVNYARLRGEKTMEVRVAREIMDAANNTGASVKKREDTHKMADANRAFAHYRW

SEQ ID NO: 60587 - protein, 72 aa, Listeria monocytogenes
MAKEDVIEVEGVVQETLPNAMFNVELENGHKVLATVSGKIRMHYIRILPGDKVTVELSPYDLTRGRITYRFK

SEQ ID NO: 60588 - protein, 491 aa, Listeria monocytogenes
MKLNELMQAIPVFTGEVSETIEISHIAQDSRKVKPGTLFICIDGEVVDGHKFASRAVELGAVAIIAEKQVDVSIPVIYVRDSKRAMAMLADYFYGSPTQALKLVGITGTNGKTTVSHLVEQIVRENGEQTGLIGTMYRKIGDQILETKNTTPDSLTLQETFRDMLLSGVSTAVMEVSSHALVQGRVYGSDYDVAVFMNLSQDHLDYHHTMEEYANAKSLLFAQLGNSYHTSNPKIAVLNADDAESVRMQKATAAHIITFGIKQEADFQASNIKITSHGSTFDLGTPVGNFTLKIKMIGNFSVYNVLAAIATSFALHIPMEKAIKTVESIPGVKGRFELVHAGQEFPVIVDYAHTPDGLLNVLETIDEFAEKRVFVVVGCGGDRDKGKRPQMAKIAVDYATNPIFTSDNPRSENPRAIIEDMIQGVPESDAYVVHENRRDAIRFAVNQAEAGDVILIAGKGHEDYQVVGDEVIDFDDRVEARIAIEKKLGLA

SEQ ID NO: 60589 - protein, 327 aa, Listeria monocytogenes
MKKRQLGNAGLVTSELGFGCMGLNYHRGPAKDRNEMIEVVRTAMDAGITMFDTAEVYGPYTNEELVGEALVGKRNHVQIATKGGFKINGLNNEVDSRPESIKAAVEGSLKRLKTDYIDLYYIHRIDPSIPIEEVAGTIQNLKQEGKILHWGLSEASAKTIRRAHKVEPLAAVESEYSIWWREAEKEVFPVLEELGIGLVAYSPLGRGYLTGKLDINADFNANDNRGGLPRFQKEAMEANQVLLDFMKEIADEQNVTTAQLALAWILDQKPWIVPIPGTTRPSRIEENIASTEIHFDDGARQKIADALSQIEIVGDRYSAAENKRIGK

SEQ ID NO: 60590 - protein, 310 aa, Listeria monocytogenes
MQKHARVIYNPTSGREIIKKNLADVLSILEQAGYVTSAHATTAEPDDAKHAAEEAVRNRFDLVVAAGGDGTINEVINGIAEKEYRPKVGIIPTGTTNDFARALHVPRDVIKATKIIAAGQSVAMDIGKANETYFINIGGGGRLTELTYDVPSRLKTMLGQLAYYLKGIEMLPSLKATKVKVEYDQGVFEGEVMFFLLGLTNSIGGFEKIAPDAKLDDGKFSLIIVKKVNLAEFIRLVTLALRGDHIKEPNVIYVKSEKVIVNSEDKMLINLDGELGGETPMEFRNLRQHIEFFASVDDIPATDLFIKENS

SEQ ID NO: 60591 - protein, 199 aa, Listeria monocytogenes
MKKTLYLMRHGQTLFNQRKKIQGFCDAPLTDLGINQAKIAGSYFKENNITFDQAYSSTSERASDTLELITDKSYLRLKGLKEWNFGTFEGESEDLNPPLPYGDFFATYGGEREVDFRDRLVATMEHIMSQDNHDTVLAVSHGAACAQFARHWGKTSTIGKVTGLKNCCILKFEYENGRFTLVNFINHDFDKGTHIESTK

SEQ ID NO: 60592 - protein, 331 aa, Listeria monocytogenes
MKKVIFSGIQPSGQLTLGNYIGALKQFGQFQDEYECFYCIVDEHAITVPQDRLKLREQTRSLAALYLAVGLDPEKSTLFIQSEVAAHAQAAWILQCNVYIGELERMTQFKDKSAGKAGVSAGLLTYPPLMAADILLYQTDLVPVGEDQKQHIELTRDLAERFNKKHADIFTMPEVFIPKQGARVMSLQDPTKKMSKSDANLKNAIFLLDPPATIRKKIKSAVTDSSGIIEYNKEEKPGVSNLLTIYSVITGETIASIEEKYVGKGYGDFKTDLAELVVSELEPIQERYYAYLKSEELDTILDAGAEKAARVANKTLKKMENGVGLGRKRRK

SEQ ID NO: 60593 - protein, 143 aa, Listeria monocytogenes
MFMGEYQHNIDIKGRLIVPAKFRELLGDNFVITRGLDKCLFAYPQEEWKKLEEKLQTLPLTKKDARSFTRFFFSGASECELDKQGRINIPSNLLQYADLEKETVIIGVSSRIEIWSKSEWDDVFNEAEESFADLAENMIGFDI

SEQ ID NO: 60594 - protein, 148 aa, Listeria monocytogenes
MTLLDKLNEDMKQAMRDKEKEKLSVIRMLKAALQNEAIHQGVKDLTPDDEVTVISRELKQRRDSLAEFDKAGRSDLSDKVRSEIVIVEDYAPKQLTPEELENIVKATIEEVGASSKADFGKVMSAIMPKVKGKADGGAVNQFVKKYLS

SEQ ID NO: 60595 - protein, 68 aa, Listeria monocytogenes
MFMEKKHFDLNDVVEMKKPHPCGTNRFKIIRMGMDIRIKCEGCGHSVMIPRREFERKVKKILVKAEQE

SEQ ID NO: 60596 - protein, 313 aa, Listeria monocytogenes
MEKRLLDFEVGETVDLFLLIKSSVKGTASNGKPFLSLVLQDKSGELEAKLWDVKESDEANYGVQQIVHLMGDIQNYRGRKQLKIRQIRQATALDGVSASEFMETAPINKEEMADEITQYIFEMKNANLQRITRALLKKYQDDFYDYPAAMRHHHEFVSGLSFHVVSMLRLAKSVADLYPSVNRDLLYAGVILHDLGKVIELSGPVSTTYTLEGNLIGHISIVVEEVSKIADELSIDGEEVVVLKHVLLSHHGKGEWGSPKPPLVREAEILHQIDLMDASLNMMDKVLKHTKPGEFSERVFGLDNRSFYNPTFE

SEQ ID NO: 60597 - protein, 148 aa, Listeria monocytogenes
MKIAIGNDHVGIELKPVIVAYLQDLGHEVDDFGAFSNERTDYPEYGKKVAESVAAGKSDLGILICGSGVGISIAANKVNGIRAVVCSEPYSAKLSREHNNTNILAFGSRVVGAELAKMIVQNWLDAEFEGGRHAKRVEMIARIEDEND

SEQ ID NO: 60598 - protein, 358 aa, Listeria monocytogenes
MQKNDDLLRERRKDEHVALGVKQNEQLAPSSLKDIQLIGTSIPRYNVKDIDLTTTIFGKNVPFPFYINAMTGGSRHTKKINAELAEIAREVAIPMAVGSQSAALKNSSLIDTYNIVREINPNGMILANVSPEVAIQDGLQAIEMLEANALQIHINPAQELVMQEGDRSFSHWLTRIEEYVKLSPVPIVVKEVGFGMTRETVKTLADIGVQTVDLAGKGGTNFAQIENDRRRDQAYDFLLDWGISTGQALIDMQHQDAPKIAYLASGGIRNPLDIIKALALGADSVGMAGQIIYSLKKEGVTKTIEKLELWKEQLRGLFVLANAKNIAELKTTPLIVSGELAKWGTLREINLVKLANRK

SEQ ID NO: 60599 - protein, 1070 aa, Listeria monocytogenes
MPKRDDIKTILVIGSGPIVIGQAAEFDYAGTQACLSLKEEGYRVVLVNSNPATIMTDAEMADKVYIEPITLDFVSRIIRKERPDAILPTLGGQTGLNMAMELSAAGILDECNVEVLGTDLTAIKKAEDREAFRDLMNELGEPVPESDIIHNLDEAYAFVERIGYPVIVRPAYTLGGSGGGICHNEQELIETVTSGLKLSPVTQCLLEKSIAGFKEVEYEVMRDANNNAMVVCNMENIDPVGIHTGDSIVVAPSQTLSDREYQLLRDVSLKIIRALEIEGGCNVQLALDPDSYNYYVIEVNPRVSRSSALASKATGYPIAKLAAKIAVGLTLDEVRNPVTGTTFAHFEPTLDYVVAKIPRFAFDKFEQADRRLGTQMKATGEVMAIGRSWEEALLKAVRSLEIGADHLLLEEAENADEATLERKICFPEDDRLFFLAAALRRGQTIEQLHEKTKIDLFFLYKLSKTIELENRIKENPQNQEILAEAKQAGFSDAFLATCWNVDEQAIYDLRKAQNLFPVYKMVDTCAAEFESTTPYFYSTYEEENESTRSAKESVIVLGSGPIRIGQGVEFDYATVHSVWAIQQAGYEAIIINNNPETVSTDFSISDKLYFEPLTLEDVMHVIEIEQPLGVVVQFGGQTAINLADGLAKRGVKILGTSLEDTDRAENRDAFEKALEILQIPQPAGKTATSVEEAITVATDIGYPVLVRPSYVLGGRAMEIVESEEALKHYMTNAVKVNPKHPVLVDRYVSGQEVEVDAISDGVNVLIPGIMEHIERAGVHSGDSIAVYPAQRLSIQVKNTIVDYTTRLATGLNIIGMLNIQYVVDGEEVFVIEVNPRSSRTAPFLSKITEIPMANVATRVILGENLIDLGYTPGLAPEKQEIFVKVPVFSFAKLRSVDTSLGPEMKSTGEVMGKDVTLEKALYKGFVASGTTMHDYGTVLLTVADRDKEEAVELAKRFNRIGFTIMATKGTASTLEEASIPVSQVKKIGENQETLIDYIRNGQVTLVVNTLTTGKRPERDGFQIRRESVENGIPVCTSLDTAEAILRVLESRSFELESMNASEVKQPKSRV

SEQ ID NO: 60600 - protein, 260 aa, Listeria monocytogenes
MKDNFFGREYDIAPAGGETGQAFVATHEDEKFFLKRNSSPFLAALSVENIVPKLVWTRRVENGDVITAQKWVNCHILTREEMVGPRVAKLLAKIHRSENLQHMLAKIENCYFSADQLLSLVKVNTRANNNLSKEIIEAVHYLEQNLSAAQTNNYVVCHGDVNHNNWIISEENELFLVDWDGAMLADPANDIGMILYQYIPREDWVSWLSNYGTTLTEELHRKLKWYTICQTVMQLTTNQTDEANERAKQIFQNAIEDDEV

SEQ ID NO: 60601 - protein, 415 aa, Listeria monocytogenes
MTELIKKGSAAKEAAQFLAQASTKQKNAALLNLSNDLLTHTASLLEENNKDIIRAREKGTPETMIDRLRLTEERIKEISEAVKQVVALKDPIGEVTNMWKNEAELTIGKTRVPLGVIGIIYESRPNVTVDASVLCFKTGNAVILRGGSDAIDSNKALMSVIQDSLEASGFPRSSVQLIEDTSRETARDMMRLNRFLDVLIPRGGAKLIQTVLENATVPVIETGTGNCHIYVDKAAEKQMAIDILVNAKCSRPSVCNAAETLLIHRDVADAFLPEIETALKEYNVELRADERAREILKDSKAATESDWEDEFLDFILAIKVVDSVDEAINHINKYGTKHSEAIISNDYATGQAFHQKVDAAAVYINASTRFTDGFAMGFGAEIGISTQKLHARGPMGLTELTSTKYIIFGDGQIRN

SEQ ID NO: 60602 - protein, 152 aa, Listeria monocytogenes
MIKRTGEIVLAIIGLVLSLLAQAFIAIIGLLMISGSKGKEGLTTFYNNYYKTMTEWEIPKKEVPDPDRVLDFVQTLSWTALTGGLITLALGIFGIYYIFKNKKPVFAGYLFLAAGVVSLLSTALISFIPALLFIVAAILCFVRKPKSTFSGL

SEQ ID NO: 60603 - protein, 785 aa, Listeria monocytogenes
MEKKVEAILEFDKIKKQLTEFASSSLGEQAILELAPATDFQVVQKTQLETEEGAKIIRLRGSAPITGLTDVFAHLKRLEIGGDLNGLEIYQIGSNLRVSRQMKNFMNDLLEIGVELPILGALSDELLVLKEVEEDIAISVDESGKVLDTASEALSTIRRTLRRTEDRVREKLESYLRDRNASKMLSDAVITIRNDRYVIPVKQEYKGHYGGIVHDQSASGQTLFIEPQSVVDLNNERKALQAKEKQEIERILAEISASLAAWINEIHHNTFILGRFDFIFAKARFGKAMKAVTPHLSDAGVVHLIAARHPLLDAAKVVANDIYLGEDFTTIVITGPNTGGKTITLKTLGLLTLMAQSGLQIPAQEDSTIAVFEHVFADIGDEQSIEQSLSTFSSHMTNIVSILEKVNQKSLILYDELGAGTDPQEGAALAIAILDASHEKGASVVATTHYPELKAYGYNRVHATNASVEFNVETLSPTYKLLIGVPGRSNAFDISRRLGLSENIITEARSLVDTESADLNDMISSLEEKRNLAETEYEEARELARGADNLLKDLQKEITNYYQQKDKLIEQASEKAATIVEKAEAEAEEIIRELRTMQLNGAAGIKEHELIDAKTRLGNAKPKTINKTIPQAPKQKPHVFQEGDNVRVLSLGQKGTLLNKISDKEWNVQIGIIKMKIKTADLEYIQPEKPKKQRIITSVHSSGSPAKSELDLRGERYEDALQKVDKYLDEALLAGYPQVAIIHGKGTGALRTGVTEYLKNHRMVKSIRFGAAAEGGNGVTIVEFK

SEQ ID NO: 60604 - protein, 454 aa, Listeria monocytogenes
MIKKVLVANRGEIAVRIIRAAKELGVETVAIYSEADREALHIQLADEAYCVGPAATKDSYLNMSNIISLAVLTNCDAIHPGYGFLAENADFAELCEDCNITFIGPSASAISQMGTKDVARETMRKAGVPIVPGSQGIVADVEDGKKIAKKIGYPVIIKATAGGGGKGIRVAENEEKLISGIHTTQQEAEAAFGDPGVYLEKYIQDFRHVEIQVLADNHGNVIHLGERDCSIQRRLQKLIEESPSPAIDEKTRQKMGKAAVKAAKAVNYSGAGTIEFIYDHHENNFYFMEMNTRIQVEHPVTELVTGIDLVKQQFLVASGEELQIKQADVKLTGWAMECRINAENPEKNFMPAPGEIKFYLPPGGLGVRIDSAAYPNYKIPPYYDSMIAKVICYAETREEVIQKMKRALSEFAIDGIPSTIPFHLRVLDNDVFLSGDFNTKFLEQNDVMNLSKEG

SEQ ID NO: 60605 - protein, 148 aa, Listeria monocytogenes
MLLDRVTLEDIEVNLKAEDWREAIQMSARLLLERGAIKESYIDGMIQSVENNGPYIVIAKHIALAHTRPEFGVIHGGLTFATLADGVAFGSDMFDPVKLIITLAATDSESHLEVLSELAEVLMDEEKVTRLIEANSSQAFYDELTKEG

SEQ ID NO: 60606 - protein, 349 aa, Listeria monocytogenes
MANQKEQLTRIKILEPLFPNRSTSIINGETSGILNWNDIPYPSFYRAYKELSTNYWIPDEVDMKSDAKQYPALSEQEKYAFDAIIGLLATLDSPQTRFIYNIAEYITDPAVHANAAIIAQQEVIHNESYSYVLASITNLQEQNRVFELARTHPTIIKRNEPIMDAYDDFMNNKTGETLVKALIQSSILEGINFYSGFAYFYNLVRQNKMTGTGKIISFINRDELAHSKFISEVIRAILGENPELQTEELVEYTHEAFRHAVELETEWSEEVLQGIEGIDVEEMVDYVKYRANKMLGMLGIPELYPGHSDNTMTWIKAYADNFTETKTDFFEMRNSSYKKTNMDNGFDDL

SEQ ID NO: 60607 - protein, 274 aa, Listeria monocytogenes
MTQPAVYVVSDSTGETAELVTRAALSQFGQTPKFIHRFHHVDSSHMIEEIVDLVAVNNGIIVHTIVLESVREELNKTAQAFGVPIIDLFGPLLNQLEETYKIKPLSEPGRVRSMDEAYFNKVAAIEFAVENDDGRNPRGILQADYVLIGISRTSKTPLSQYLALKGLKIVNIPIVPEAQIPDELFEIDPKKIIGLKISKQKLTKIRQERLISIGLPGAGTYASNQRIDEELAIFNKLASKLNCFVLDVTNKAIEETANEILIHIGEIVDENLEL

SEQ ID NO: 60608 - protein, 2013 aa, Listeria monocytogenes
MIRKIFIGILSFTILIQTVIVSNFNVVYATTEEHKQEAIKLEKKSTNNNIICIKGAVKDKEYKLSLPKSFNLDEKKTGKEVEYNKEKNELTIIGTGEEITLYLLASQTGKYELELKEGDKVQAKLDLIIKNVDEEVAKTVEKSNRQLLRSSISDKLFLQADSSKATLANYTEQITFNYSINFLDGSTNLKNGKLVIDFNNSNLELVNYPKDTAANRNIKLTSYSALTGKLTINLVDNISSGAPFDIPIVVRAGYGAKPGLPMNLKATLSGENSSGGTYTPSEKTTTVNLEESSSNQDYSPITAGDNSWAFNLKELSYSLKPGGYTIQWPEIQKKSLENKSFKNLKLEYLKENGGDVISVNTADPYVIRFGEPFWSQLSTVNGKANVLVNDDEKQVVEYGPINANIYQKIQVSMAAKIPADGVEGTEYTGTVNVYDEDVFITSIKIKAEVADSATSIAVDSKVSKTSISEGDIFEWGFMPRVSSAAPGVNDLEIVAPIPEGIKALSYIPNNNSMASIKKLEYYQNGKWVSMAPQTSSGWDFSKIDQSVNRIEKLKLTSRDGIINDKDMPPYTHGTIRMQNIGVKAGESFTLRPESITYTDPDKTSKTIDTTTNSYGKNVQVVEKTSAPAKINGEVFLSSTAGTSGKGFGSTIFFNGDKIAQSVRLGSYGSKLENPYIFVVVPKGIDLETMRNFIQQPYRSTLNYTYAPANGTNTLYPKSSADVKGKETLSDGSTLYYWEAPDTGLAPGMENCEMLALDLVLKLNKANSGANKVEFGMGSMTDSSWNLNGAANSGLETKELSSELQSKLPGVTSTKYLSTTRTANIGVSNSIATKMKIKGSQDNDFVDVSANTGTTIPGKRVDYNLTFENNGTRSMKNLEIIDILPHKDDQYVLGTGPRGSKFSVIPTSEIEVLVNGKKSDSATLEYSTSYTPERFDTNGEDVAGDSWQIVAPTNMADVKSFRIKLPNTEFKVGDEITLNFEAIVPTDAPRNDEIAYNSIAYRIDKETGSGTSKLASEPPRGGVKSTNPSTDLNIAGNSFSDLNKNGVKDADELGLNAVKLDLYKKNNNEFEKVETVYTSSDALDKEKGLFDFNGLNNGTYKIAAHLPNKNADFITTGPNKIVKDSKDDSIGWITVNNSTEFTIDDLANGNPKNLVGIQIPIYMATPIKGAVVFVNKDGEPKITSYGQDYEIALFDKDGKEVQSAIKTNSKGEFSFNDVAIKNPADFKLKVTAPTGTNFVYSAKNPLFNMSTKEYTLNSVVPGVGGVAEIYITETSKPTTKIILDKAVTPNAITIESSDEATEVTNEWTLEDSDGTVVYTGTGNTIRIPNDEGTYIAKNTATDEAGNTASDEKTFDIDYTVPTLTVNQDASAEVNSTEANIGWIKPLNVAATDTHDGNITPVVDYSKVKWDVLGTYPVTVTATDASGNKATQTVNLRIVDTTSPTILITNNPLTYSIENMRKLTEQELYTAAGLIGGDNYDLAPGQAVQPNKQPMVFTSNFSTIFGDIASVKAGQYQVQVNLADSSGNQAIPQTITINVVDTVGPVIKADNVSYHVNTTKTEAEFFQDARLDVTDNNDDTTDLIITSNFAEKVNLNKPGKYEVTITATDTKGNQTTKEITVQVSKDKPVITADPKISYQGKIEVTEANFLSGVHAEVTDELDGDVKITSDFAEKVDFNKVGTYTVTLNAKDEYGNTAEPVKVSVSIFNKIAPTFNNADNKTIEAVNELPSLESIFKIEAKDYLSGNKLKVTYTPEQTIKGNVPGEYSIKVTTKDDSGNIAETTVTLTIKDTTGPSIKMTKSTKKLEVQSKEPNWITFFGIKATDIVDGDVTKNIKVDSSEVNLNKVGTYPIYFTVTDALGNESSKLKSTVQIVDTSSPELTIDKLEISYPTGKTISDKQFLQDIGTKVTNSYGTVKVTTNLSKIVDWNKAGKYKVTVTATNSSGGVAEKTILLTVKNSDSSFIAVPSKDDNKNKPAKNIPKTGDTLNTELIVMGMMLLLVGGWMFLRRKTKVKTK

SEQ ID NO: 60609 - protein, 229 aa, Listeria monocytogenes
MTKQANLQKVTAQIEHACEESNRQSEDVTLVAVTKTIDVTGITELYDLGIRHFGENRADVFLEKTVELADKDDICWHYIGSLQTRKVKDVLPQIDYLHSLDRSSLAKEIEKRATKPVKCFLQVNISGEESKHGFSKEEALSFLQEANFTFIEIVGLMTMAPITNSDIELHHVFHELKQLQQEIHALQLKNIPCTELSMGMTNDYGIAITEGATFIRIGRALVNDDNMEV

SEQ ID NO: 60610 - protein, 500 aa, Listeria monocytogenes
MDEKEKNLNENSENESTPKREVEDTLHTPESAQPVQETPIVEGVTPEGEKFAGATEDAAEASSTNAFFEEASNKESEPARPAPGPRRAGTTGGGAVPPNRVNNGGSGNGNGEPPKRGKHFIGYFLTALIGVIIGGLIIFFVAWDNGDNADTTSNSNNKATKVEKVSVDTTSDVTKAVDKVQDAVVSVLNYQSSSSLDGTTTSEQEASSGSGVIYKKANGKAYIVTNNHVVADANKLEVTFTNGKKSEAKLLGTDEWNDLAVLEIDDKNVTTVAAFGDSDSLKLGEPAIAIGSPLGTEFSGSVTQGIISGLNRAVPVDTNGDGTEDWEADVIQTDAAINPGNSGGALINIEGQVIGINSMKISMENVEGISFAIPSNTVEPIIEQLETKGEVERPSLGVSLRDVDTIPETQQKNILKLPDSVDYGAMVQQVVSGSAADKAGLKQYDVIVELNGQKVTNSMTLRKILYGNDVKIGDKVKVKYYRDGKEKSTDIKLEAAKTTT

SEQ ID NO: 60611 - protein, 598 aa, Listeria monocytogenes
MSVKSNIVKIGVCFAVLAVPVSQTTLPVFAAEQPGLKASQDNVNIPDSTFKAYLNGLLGQASTANITEAQMDSLTYITLANINVTDLTGIEYAHNIKDLTINNIHATNYNQISGLSNLERLRIMGADVTSDKIPNLSGLTNLTLLDLSHSAHDDSILTKINTLPKVTSIDLSYNGAITDIMPLKTMPELKSLNIQFDGVHDYRGIEDFPKLNTLLAYSQTIGGKKLINSDIKSSKLTYNAENQTLYVPFSLMTERTVNYDGYVPDFVKSTASSDTYFTMNEQQVNGNRLTITSDGLTVSDVSKTDFDNLEKMEYNARIDLSYQSYNTPEQFQNGGSYTISMPIYDHYFTVDHSLNITADSEKTYIENQLVTEATFLSDIHAKTDDGSTVTSDFADKVDFNTPGTYTVTLQSENNAGLKATPVQVNVTIKAKTTITADEKITYKVDTSKTEAAFLADIKATTNDGTAITSDFATVVDLSKPGKYVVTLNAENDLQKALPVQVMVIVEKETPIPDPTPTPTPDPTPTPDPSPTPNPVINPNVNKPEVPSYKIPSLTVNEKKAKAEPSKEALPKTGDSLPVAGATVGFLLIGLSWFVSRKK

SEQ ID NO: 60612 - protein, 238 aa, Listeria monocytogenes
MNPEQFQMALAEKGIELSDDQMKQFHDYFEMLVEWNEKMNLTAITDEKEVYLKHFYDSISAAFYVDFTKFDTICDVGAGAGFPSLPIKICFPHLKVSIVDSLKKRMTFLDALAEKLGLTDVHFYHDRAETFGQNKAHREKYDLVTARAVARMSVLSELCMPLVKKGGSFLVMKAAQAEQELQTAEKAIKLFGGKVEEHFSFSLPVEESERNIYVITKTKETPNKYPRKPGTPNKLPIE

SEQ ID NO: 60613 - protein, 127 aa, Listeria monocytogenes
MKKVITYGTFDLLHWGHIHLLKRAKALGDYLIVAISSDEFNRIKHKEAYHSYEHRKLIIEAIRYVDEVIPENNWEQKRDDIEKYGIDVFVMGDDWEGEFDFLKDVCEVVYLPRTEGISTSQIKDELK

SEQ ID NO: 60614 - protein, 110 aa, Listeria monocytogenes
MFEKTNRMNLLFDFYQELLTTKQKAYVSFYYLDDYSLGEIAEEFEVSRQAIYDNIKRTEESLEKYEEKLGMLKKYQQREKLFTQLEAQLTKKNFLDEQVKDTLEQLKNID

SEQ ID NO: 60615 - protein, 297 aa, Listeria monocytogenes
MNDLIEDFLHFLIVERGLSANTIKAYERDLHYFVSYMDVTKELTDPNTLERSDIVGFMAFARQEGKSPRSVARYIASLRSFFHYLMHDGKMSHDPMIQIETPKQAQGLPKVLNLDDVEKLLSSSDTSTPLGLRDQAMMEILYATGLRVTELVSLKMDDLHLHMGFIQTIGKGDKERIIPLGKTATTVLEKYLEEARPKLRRPKYRNDFVFLNHHGQGLTRQGFWKILKGIAKESGIEKPITPHTLRHSFATHLLENGADLRSVQELLGHADISTTQIYTHVTKLRLKDVYKQFHPRA

SEQ ID NO: 60616 - protein, 585 aa, Listeria monocytogenes
MKKTKIVCTIGPASESVDTLVQLIEAGMNVARLNFSHGDFEEHGARIVNIREASKKTGKQVAILLDTKGPEIRTNDMVGGKLEFQTGDVVRVSMTPVEGTKEKFSVTYGELYDDVEIGSSILLDDGLIGLEVIEKDEANRELVTKVLNPGVLKNKKGVNVPNVSINLPGITEKDAADIRFGLEQGIDFIAASFVRRATDVLEITKILEEHNATHVQIIPKIENQEGVDNIDEILQVSQGLMVARGDLGVEIPAEEVPIVQKELIRKCNKLGKPVITATQMLDSMQRNPRPTRAEASDVANAIFDGTDAIMLSGETAAGDYPVEAVKMMAKIAVRTEEVLVAQDKFALKLHENTDMTEAIGQAVGHTAKNLNVQTIVAATQSGHTARMISKYRPKSHIVAVTFNEHVYRGLALSWGVYPRLATPVSNTDEMFDLAVKESLASGVAKQGDLIIITAGVPVTESGTTNVMKIQLIGEKVVKGQGIGSKSVIGKAIVAKSNAEALEKAEEGGILIVKTTDKEILPAFEKSAAVVVEEGGLTSHAAVVGINLGIPVIVGAKDATSLVKDGEIITVDSRQGVVYNGKTATH

SEQ ID NO: 60617 - protein, 297 aa, Listeria monocytogenes
MLRLGSHVSMSGKKMLLGASEEAASYGSNTFMIYTGAPQNTRRKPIEELNIEAGLEHMKAHDMADIVVHAPYIINIGNSVKPETFELGVNFLQSEIERTRALGAKQIVLHPGAHVGEGADKGIKQIIQGLNEALIHDQDVQIALETMAGKGSECGRTFEELAQIIDGVTHNELLSVTFDTCHTHDAGYDIVNDFDGVLNQFDKIVGIDRLKVLHINDSKNERGAHKDRHANIGFGHIGFDALHYIVHHPQLADVPKILETPYVGGDKASKKAPYKWEIAMLKNGEFDPDLLNKIQNS

SEQ ID NO: 60618 - protein, 751 aa, Listeria monocytogenes
MKRRIGNMRRGALVLFIFFTILFLLVSGRFLYLQITGEANGVPLAAKASKQHLKSSVLEAKRGSILDRKGEVLAEDTASYTVAAVVSDKLSKTTKNPMRVVDEEKTARILAKYIPMDESDILDKLHEKGKYQVEFGAAGKNISTETKAKIDKENLPGIEFTRQSERFYPNGTFATQLIGFAQQEEEKNATVLEGKMGIESRYNDILTGKNGKIDYSTDRMGYILPNSKNKVTEAKDGKDITLTLDKKIQTFLEDTMTTVDAKYKPKNMMAVVADPKTGEILAISQRPSFNPADRSTITGNSSSIWQDLPVEYAYEPGSVMKIISLASAIDTNAYNANEYYQSGSYKVGDIAIHDHNNGNGWGSITYREGVERSSNVAFAKLLNKMGTDTFKTYLDKFGFGKKTGIALPNETSGKILYNYPIEKVTTVFGQGTTVSMMQMIQAASAIASDGTMKEPYVVSSVKDPNTGEETDTKTKIAGKPISAETAKKTRDELKNVISGEHGTGKLYAIPGYDVAGKTGTSQIPDPKTGKYMTGADNYIFSFLGMAPADNPELVIYVTMQQPQLSGSQTGGEAVSEVFNPVMKNSLQYMNIKPGDAEKLASEKVPVLAGKKVDEAKKIVKDKGLEPIVVGNGKKIVQQLPQANAEIMQGQKVILMTDGDMTAPDMVTWSKDDALKVSEITGIPFEFSGNGYVKSQSVSAGSVINSETKMKITLAPPEEISAFNQNHDQDTAEKNKKATDIQENAGIGDLLN

SEQ ID NO: 60619 - protein, 148 aa, Listeria monocytogenes
MKVIFLKDVKGKGKKGETKNVADGYANNFLIKNGYAVEANNAALSTLSAQKKKEDKLAAEELAEAKALKEKMENLTVELKAKSGEGGRLFGSITSKQIAQTLEKTHGIKIDKRKMDLPEAIRALGHTKVPVKLHHEVTATLDVHVSEE

SEQ ID NO: 60620 - protein, 154 aa, Listeria monocytogenes
MPKGDGKLVAQNKKARHDYAIEETFEAGIVLQGTEIKSVRNARVNLKDSYARIDKGEIFLHNMHISPYEQGNRYNHDPLRTRKLLLHKKQISRLIGETKESGYSIVPLKMYIKDGYAKVLIGVARGKKKYDKRQDLKQKEAKRDIERAFKERQQ

SEQ ID NO: 60621 - protein, 207 aa, Listeria monocytogenes
MKKVLVFAAFIVLFSFSFLSTGLTAQAALKDGTYSVDYTVIQGDSDSASMANDYFDKPATVTVNGGKSTVSLQVNHSKWITGLWVEGNAVSVTSKNASSDTRKVSFPVSTLSNPVNAKIKVDIDDDDLNYHHEYQIKLRFDEGSAKALAGAVKSSDNNTTTPATKSDSSNKVTNPKSSDSSQMFLYGIIFVATGAGLILLKRRAIFK

SEQ ID NO: 60622 - protein, 400 aa, Listeria monocytogenes
MFKRILKSYDYAFIAVFIVLCLFGLIMIYSASWSLAIGKGLPADYFYARQVKNFIISFIFFILFALLPFKFYQNNKVLMLIVFGSIGVLLLIFLVGKTVNNANSWLVLGPRSLQPGEFAKLAVIIYMSAIYAKKQSYIDDFNRGVLPPIFFLAFVCFLIAIQPDTGTAFIIFLVGCCIIITSGMRLRTIMKLIGIGMGIIIGLTLILFALPDSVRNEIVSPTKVARITTFMNPFEYADKEGHQLINSFYAIGSGGVSGQGLGESVQKLGYLPEAHTDFIIAVVAEELGVFGVMFIILALFFIIFKTITTGLRAKDPFASLMCYGIASLIAIQAFINLGGASGLIPLTGVTLPFISYGGSSLMVLSMMLGIVANISMFTKYQRVYKADGSTKELPKKQKRR

SEQ ID NO: 60623 - protein, 416 aa, Listeria monocytogenes
MVVADYLALFAVICIWGLLLINIVLIVAGYVYYLKNEARKVPEIPVEVPFVSVMVPAHNEGKVIVKTVESLLAFDYPVDRYEIIVINDNSSDNSAELLAAIQAKNPTRFLKIINTDNITGGKGKSNALNIGFAESRGELVAIYDADNTPERQALRILVGEITNDAKLGAVIGKFRTRNRNASWLTRFINIETLSFQWMAQAGRWALFKLCTIPGTNFIVRRSLLEEIGGWDVKAVAEDTEISFRIYMMGYRIKFQAKAVTWEQEPQTLPVWFKQRSRWAKGNIYVILKNVPLLFKREGRRVRFDILYFLSIYFLLLTSLIVSDVLLVLYALGLVHTTLAGLSGALWLLAILLFVAGTFITLTTEKGEISFSNLLFIMLMYVTYCQLWMVVAAYGFFIFLKDTVLKRETKWYKTERF

SEQ ID NO: 60624 - protein, 391 aa, Listeria monocytogenes
MLEFDTSSESLATIKVIGVGGGGNNAVNRMIEHGVQGVEFISVNTDAQALNLAKAETKLQIGTKLTRGLGAGAVPEIGKKAAEESREQIEEALKGSDMVFVTAGMGGGTGTGAAPVIAQIAKEMGALTVGVVTRPFGFEGPKRTKQALTGTEAMKEAVDTLIVIPNDRLLQIVDKNTPMLEAFREADNVLRQGVQGISDLIAVPGLINLDFADVKTIMTNRGSALMGIGIATGENRAAEAAKKAISSPLLETSVDGAKGVLMNITGGSNLSLYEVQEAAEIVSSASDEDVNMIFGSVINDELKDELIVTVIATGFDEAKQAQQQAQANRRPNQSIQVNRPNYAVQDEQQNDYAQNAPQQANAPVHEQQAEPQQNSSDVDVPAFIRNRNRRG

SEQ ID NO: 60625 - protein, 62 aa, Listeria monocytogenes
MAKECVITGRKSRSGNKRSHAMNSSKRTWKANLQKVRILVNGKPKKVWVSARALKSGKVERV

SEQ ID NO: 60626 - protein, 362 aa, Listeria monocytogenes
MTELLKTPIHPLYAKYGAKTIDFGGWDLPVQFAGIKAEHEAVRTDAGLFDVSHMGEILVKGPDSTSYLQYLLSNDIEKIKIGKAQYNIMCYETGGTVDDLVVYKKSETEYILVVNAANTDKDFEWMVKNIRGDVSVTNVSSEYGQLALQGPNAEKILSKLTDVDLSSISFFGFVEDADVAGVKTIISRSGYTGEDGFEIYMPSADAGKVFEAILAEGVAPIGLGARDTLRLEAVLALYGQELSKDITPLEAGLNFAVKLKKEADFIGKEALIKQKEAGLNRKLVGIELIERGIPRHDYPVFLNEEQIGVVTSGTQSPTLGINIGLALIDTAYTELGQEVEVGIRNKKVKAKIVPTPFYKRAK

SEQ ID NO: 60627 - protein, 579 aa, Listeria monocytogenes
MAYQALYRVFRPQSFQDVVGQEHVTKTLKNAIVQNKTSHAYLFSGPRGTGKTSAAKIFAKAINCEHGHDGEPCNECEICKGTTDGSIPDVLEIDAASNNGVEEIRDIREKVKYAPTVAKYKVYIIDEVHMLSTGAFNALLKTLEEPPKHVIFILATTEPHKLPLTIISRVQRFDFKRITTQDIIGRLKFILEEEKIPYDEKALMIVARAAEGGMRDALSLLDQVISYGSEEVTVEDALEITGSVAQNLLTKLVSAAFDGDAAEAISTLTALLAEGKDPVRLVEDLLVFFRDVLLYQKAPNLEETMERALIDDDFVALAKRADSLKVYEFVKILNTAQQQMRFSNHPGIYVEVALVQLTQAGQSVAGGGNVPADAASGSDVSDLKRQMEQMHQEIQTLKKQIASGAGAAPADKPTQNRGGSKKAINNGKQFKAPIGKINHVLGEAKKENLQLIRGCWGELLSMLMASQAALLNDAEPVAASQDTFVLKFKHEIHCQMAMDNPNFVETITSSIARLTQVNYTFIGIPEDQWADVRENFLHSHGSDADAEDGANPEAKKPAEDPFVAEAAKLVGEDLLEIKD

SEQ ID NO: 60628 - protein, 572 aa, Listeria monocytogenes
MAKELKGIAASDGIAIAKAYLLVEPDLSYEKTEVTDVESEVKRFESALEVSRTELSMIREKAAKDLGEDKAQIFDAHLLVLNDPELTGPIEESIKNSKTNAETALQETTDMFIGMFESMDNEYMRERAADIKDVRKRVLSHLLGVTIPNPALIDEEVVVVAADLTPSDTAQLNRNFVKGFVTDIGGRTSHSAIMARSLEIPAVVGTKEVTASVAKNDIVIIDGLEGNVIIHPTEEQIAHYEKIKSDFALQQAEWDKLKNEKTVSKDGVHVELAANIGTPNDLEGVISNGGEAVGLYRTEFLYMGRDNFPTEEEQFEAYKAVVSGMDGKSVVVRTLDIGGDKTLPYLELPEEMNPFLGFRAIRLCFANEELFRTQLRALLRASVYGNLKIMFPMIATVNEFRQARDILLDEKAKLKAAGTEVSDSIELGIMIEIPAAAVLADQFAKEVDFFSIGTNDLIQYTMAADRMNERVSYLYQPYNPSILRLVKMVIDASHKEGKWTGMCGEMAGDQTAVPLLLGLGLDEFSMSASSILKSRSLIKRLDQSEMVKLAEEALNKSTAEEVVELVEKYTAE

SEQ ID NO: 60629 - protein, 91 aa, Listeria monocytogenes
MTITIQDLNYEIITNYRDAFDEEKLNERFSDILGRYDYIVGDWGYDQLRLKGFFEDDNRKAAYDNKISTLKEYIYEYCNFGCAYFVIKKVK

SEQ ID NO: 60630 - protein, 291 aa, Listeria monocytogenes
MASKQLKLVIITGMSGAGKTVAMQSLEDLGYFCVDNLPPSLLPKFWELMKESDKMDKIALVMDLRGREFFDSIEPALDELDNTNFITTKILFLEADDKVLVSRYKETRRHHPLEPNGSVLDGINAERELLSDLKGRSQLVINTSNMAPRELRERINNEFQTEDKDIFNVQLMSFGFKYGIPIDADLVFDVRFLPNPHYIDKMRPLTGLDEDVYEYVMKWPETQTFLDKLVDLLMFTLPFYKREGKTQLVIAIGCTGGQHRSVALTEFVGKTIQQKYETTISHRDMKRRKGR

SEQ ID NO: 60631 - protein, 327 aa, Listeria monocytogenes
MLDPNFWNDQQAAQKVINESNGYKETYQAFHALEEEQESMEISLELLKEEADEDLQEELEKDIKAYMATISAFELKLMLSDPYDKNNAILELHPGAGGTESQDWGSMLLRMYQRWSEKKGFKVEMLDYQAGDEAGIKSVTLLIKGHNAYGYLKAEKGVHRLVRISPFDSSGRRHTSFVSVDVMPELDGDIEIEVRTEDLKIDTYRATGAGGQHINTTDSAVRMTHIPSGIVVTCQSERSQLKNREQAMKMLKTKLYQKEQEEKERELAEIRGEQKEIGWGSQIRSYVFHPYSMVKDHRTNYETGNIQAVMDGDLDDFINAYLRSRIG

SEQ ID NO: 60632 - protein, 179 aa, Listeria monocytogenes
MEDKRLIREKILRNLNSIDKVEHRERSIKLAEKLFLLPEWENAKVVGITLARHPEIETEAIILQAKKEGKTILIPKTYYPSRKMEFKKMDSIHPLIKSKFGILEPNELAETVDKKVIDLLIVPGVAFNKDHYRIGFGGGFYDRFLTDFQGHTVSLYLYEQQIEFTPETHDEPVSILIGG

SEQ ID NO: 60633 - protein, 374 aa, Listeria monocytogenes
MSDKTKNTKPVAELSVEQVKEALIEEGKKKGILTYAKIAARLAPFTLDSDQMDEYLEHVGEAGIEVSDDADDEDPDETELVKEETESFDLTDMSVPPGVKINDPVRMYLKEIGRVDLLTADEEIALAKRIEAGDIEAKGRLAEANLRLVVSIAKRYVGRGMLFLDLIQEGNMGLMKAVEKFDFNKGFKFSTYATWWIRQAITRAIADQARTIRIPVHMVETINKLIRVQRSLLQDLGRDPSPEEIGEEMDLPTEKVREILKIAQEPVSLETPIGEEDDSHLGDFIEDQDATSPSDHAAYELLKEQLEDVLDTLTDREENVLRLRFGLDDGRTRTLEEVGRVFGVTRERIRQIEAKALRKLRHPSRSKQLKDFLE

SEQ ID NO: 60634 - protein, 427 aa, Listeria monocytogenes
MNIGIFTDTYSPQISGVATSIMIMENELRKQGHTVYIFTTTDPNADRESEEGRVFRLPSIPFVFFPERRVAIAGMNKFIKLVGRLDLDIIHTHTEFSLGLLGKRIAKKYHIPSIHTYHTMYVDYLHYIAKGKILTPSMVGKMTKSFCDSYDAIITPTAKVRHHLEEQGIHKLMYTVPTGTDISSFAPVEKQRILDLKKLLGIGENDPVILSLGRIAHEKNIDAIINAMPEVLQTKTTAKLVIVGDGPVRKDLEKLVEEKQLADHVIFTGAVDWENISLYYQLGDLFVSASTTETQGLTYAEAMAASLPVVAKRDESIEGFLSDRETAFLFNEDDELASLLINILSDKNTATLVATNGRVKVESISADQFGINIESTYNEVREIYRVKRQNGTIKVKPTLIKSKIASQVFSLSSSTHVQRKERSSRRD

SEQ ID NO: 60635 - protein, 650 aa, Listeria monocytogenes
MILLQVQQISKFFGAEVILDNIKLEVKTGDRIALVGRNGAGKSTLLKIIAGKMSYDGGTISKPKSVEIGYLAQNTGLESSKTIWDEMLSVFDSLRKMEADLRKMELRLGEPELYNDPEKYQALMTDYDTLQHTFKESGGYTYEAEIRSVLNGLRFYPEDYEVEIASLSGGQKTRLALAKLLLAKQDILVLDEPTNHLDIETLAWLETYLQNYHGSLLIVSHDRYFLDKVVNQVYEISRTKIDYYKGNYSSFVNQKQAKLEQMWKEFDKQQKQIAKLEDFVARNIVRASTTKRAQSRRKQLEKMDVLGRPQGDEKAAHFGFQFEKQTGKDVLMVDQLSIGYAKDKRIASNLTFEMKRQDSLALVGPNGIGKSTLLKTLIRDIPALSGEFHFGAGVKIGYYDQEQAKLTSNKTVLMELWDDYPELNEVNVRTTLGNFLFSDDDVLKNVQSLSGGEKARLALAKLTLLEANVLILDEPTNHLDIESKEVLEAALIDFEGTILFVSHDRYFINRIASKIVELAPEKATVFLGDYDYYQEKLAEEKELARLDAEDRRKKGEQVEATASVRKLNYQEEKEQQKLLRQRKRKLEEIEKSMEETDEKIAELELQLTNPEVFQDHEKALEITQELDAVKADGEKLMEEWEQISEELESI

SEQ ID NO: 60636 - protein, 456 aa, Listeria monocytogenes
MEKLWGGRFQGKSEAWIDDFGASISFDQKMAKEDLAGSLAHVAMLGKCGIIPASEAAEITAGLKILQEKLAFGELEFSTVNEDIHLNIEKLLHEEIGSVAGKLHTARSRNDQVATDMHLYLKQAVAEIIQSLKHLRVVLVQKAELHVETIMPGYTHLQHAQPLSFAHHLLAYFGMFTRDLERLEESVKRIDISPLGSAALAGTTFPIDRAYSAELLGFSAVYENSLDGVSDRDFIIEFLSNSSILMMHLSRFCEELILWTSHEFQFVELTDAFSTGSSIMPQKKNPDMAELIRGKTGRVYGNLFGMLTVLKGLPLAYNKDLQEDKEGMFDTLETVQTSLDIFAGMIETMKVNTEIMEESTQKDFSNATELADYLAKKGVPFREAHEIVGKLVLECTQNGIYLQDVALSHYQEINPLIEEDIYVVLSSKTAVQKRNSYGGTGFDQIKVALENAKKTL

SEQ ID NO: 60637 - protein, 362 aa, Listeria monocytogenes
MRKLGISVFPQHVALEESLEYIETAAKYGFSRIFTCLISANDEAEFAKLETICKRAKDLGFDVIADVDPTVFESLNITYKELDRFKELGLAGLRLDLGFSGSEEAAMSFDDTDLKIELNISNGTRYVENILSYQANVGNIIGCHNFYPRKYTGLSREHFLRTSKQFKDLNLRTAAFVSSNSGEFGPWFVVDGGLPTMEEHRGVEITVQAKDLWNTGLIDDVIVGNMFASEDELRALSELNRNELQLAVEFLDGATDVEKEIVLTQKHFNRGDASEYVLRSTMTRVNFKQFDFPAHDTNTIAKGDVTIDNDGYERYKGEMQVALQEMENSGNTNIVARIVPEERYLLDTILPWQHFRLVEKKK

SEQ ID NO: 60638 - protein, 420 aa, Listeria monocytogenes
MSQKIQVENGVLKTPNNPVIPFIEGDGTGPDIWAAAKRVLDAAVKKAYNGEKEIAWKEVLAGEKAFKQTGEWLPQATLDTIDEYLIAIKGPLTTPIGGGIRSLNVALRQELDLYVCLRPVRYFKGVPSPVKRPEDTDMVIFRENTEDIYAGIEFKEGSIESKKLIDFLKSEFGVDKIRFPETSGIGIKPISKEGTERLVRSAIEYAIKEGRKSLTLVHKGNIMKFTEGAFKNWGYDLCEREYGDKVFTWNEYDRIKEAEGTEVADAKQNEALAAGKILVKDSIADIFLQQILTRPAEFDVVATMNLNGDYISDALAAQVGGIGIAPGANINYLTGHAIFEATHGTAPKYAGLDKVNPSSVILSGTLLLEHIGWGEAAALINQSMEKTIAAKTVTYDFARLMDGATEVKCSEFADELIKNF

SEQ ID NO: 60639 - protein, 138 aa, Listeria monocytogenes
MRIMGLDVGSKTVGVAISDPLGWTAQGVETIQIDENRKQFGYDRVKELVLEYEVEKVVVGLPKNMNNTIGPRAESSKIYAEVLEARIGLPVVLWDERLTTSAAERTLIEADVSRKKRKEVIDKLAAVMILQSYLDTTN

SEQ ID NO: 60640 - protein, 377 aa, Listeria monocytogenes
MANKVITNATIYTGKGVLENAFVRFDKQILEVGSMADFQADKAEEVIDAKGQKLVPGFIDVHSHGGYSFDAMDADPEALRKQVNGMLNEGITTYFPTTMTQSHENIEKALKVINEVAQTEPVIGGIHLEGPFVSKVFKGAQPEEYIQAPDLELFKKWFDISGGLIKLVTYAPEHDTSADFENLCFELGVVPSIGHSNDVREHLKTSKATHATHLYNACHRMTHREPGVPGHVLLERGINAELIVDGIHVHPDMVKLAYQMKGPEHLCIITDSMRAKGMPEGKSELGGQTVIVKDKQARLEDGTLAGSVLTYDDGFRNMIKFTGCSVEEAVLMSSGNQAREFNLTQKGAIEAGKDADFNLLDEDLHITATYSFGKKHS

SEQ ID NO: 60641 - protein, 381 aa, Listeria monocytogenes
MSEDLFDVEVRNFEEGDKVTGTVTSVEDKQVYVGIPGSKLDGVVPISELSNIHVETASDVVSVGDTLDLIVTKVEDDILVLSKRKVDAEKASDDIKAKFESGEVFEAVVSDVVKGGLVVDLGVRAFVPASLVEDHFVEDFADYKGTTLTFKVVEFEPENNRVILSHRAVVETEKASQKQALLSEIKEGDVIEGTVQRLANFGAFVDIGGVDGLVHISQISYKHIATPQEVLEEGQKVTVKVIGIDPENERISLSIKATLPGPWDGITEKAQVGSVLEGKVVRLVTFGAFVEIFPGVEGLVHISQISHEHIGTPQEVLSEGQTVEVKVLEVNEADKRLSLSIKELQDAPVEEADYELPEENTGFQMSDLIGDKLKGLQNDDK

SEQ ID NO: 60642 - protein, 327 aa, Listeria monocytogenes
MPVISYIDAITMALKEEMERDDKVFILGEDVGKKGGVFKATAGLYDEFGEDRVLDTPLAESALAGVGIGAAMYGYRPVAEMQFADFIMPAVNQIISEAARIRYRSNNDWSCPMVIRAPFGGGVHGALYHSQSVEKVFFGQPGLKIVVPSSPYDAKGLLKAAIRDNDPVLFFEHKRAYRLLKGEVPETDYIVPIGEANVVREGDDITVITYGLAVQFAQQAAERLAAEGVEAHILDLRTIYPLDQEAIIEATKKTGKVLLVTEDNKQGSIISEVAAIISEHCLFDLDAPIARLAGPDTPAMPFAPTMEKHFMINPDKVADAMKELAEF

SEQ ID NO: 60643 - protein, 1179 aa, Listeria monocytogenes
MKGLQQLIYEQKDIRAVLNALDEKEKAQLVTGLTGSSRALFASVVEGASKRPVVFVTHNLYHAQKLYDDLLSLMDVDRLFLYPADELISSELSISSPELRGQRVEALDFLLSGKPGIVIVPVAGLRKMLPPVSLWKHFNISIVEGEEIDPDVLRQKLVTMGYTMSGMVNTPGEFSVRGGIIDIYPITEEFPIRIELFDTEVDSLRFFDVETQRSTTRVEEFRLLPATEIILDQSYYPDIVKRLEKKMMLTLNELKEQEDKQALIENLEEDLEMLRSGVKPDMFFKYIGLAYPDPASLFDYLPKNTAILLDEFGRILETEESLEREEAEWQTETLSRMETVRDVQVSHSFKKLLEGNHSPKIYLSLFQKQMASMRVSKTTNIVYKQMQQFHGQMNVLKTELESWHKNNYAVVILAPNLERAEKMQQTLTDYDMESTILKKESDVPKYGMVQFVIGTFQNGFELPLAKVAIISETELFNKKIKKVKKRQKLSNAERIQSYSELKVGDYVVHVNHGIARYVGMETLDINGVHKDYLLLVYQGEDKLFIPVDQLDLVQKYVGAEGKSPRLNKLGGAEWKRVKKKVQASVQDIADDLIKLYAEREAEKGYAFSADDEMQREFEEAFPYQETEDQLRSISEIKKDMERPRPMDRLLVGDVGYGKTEVALRAAFKAIMDGKQVAFLVPTTILAQQHFETMKERFQGFPIEIGLLSRFRTKKQQTETLKGMKNGTVDVVVGTHRLLSKDVEYQDLGLLIVDEEQRFGVTHKEKIKQMRSKIDVLTLTATPIPRTLHMSMLGVRDLSVIETPPANRFPVQTYVAEQNNVLVREAIERELARDGQVYYLYNRVESITQKADEISAMVPDARVATAHGQMGESELESVILSFLEGEFDVLVTTTIIETGVDIPNVNTLFVQDADRMGLSQLYQLRGRVGRWNRIAYAYFMYQKDKILREEAEKRLSAIKEFTELGSGFKIAMRDLSIRGAGNILGAQQHGFIDSVGFDLYSQMLKEAIEAKKPKEEQKQIVPVEIDIQADAYIPEYYITDGRQKIEMYKRFRNIETLSELEDLQSDMIDRFGEYPEEVEYLFTMTELKVRALEVGIESVKQEQNKITMLFSESGTAGIRGDIVMQIIGEFGRMVGVGMEGTQLKITINVQNKPLKEWLYQVKSLAEKLRGAMKEKASTEN

SEQ ID NO: 60644 - protein, 393 aa, Listeria monocytogenes
MKISKRLQNLPDQFFSSLVEKVGKKVAEGHDVINLGQGNPDQPTPKHIVEAMKTASEKPLNHKYSLFRGKQELKQAAADFYAREYNVTIDPNTEVAILFGTKTGLVELPMCLMDPGDTMLLPDPGYPDYLSGVVLGEVQFEKMPLIAENDFLPDFTKIPEDIAEKTELMYLNYPNNPTGAVATADFFEETVAFAKNHNIVVAHDFAYGGIGFDGKKPISFLETNGAKEVGIELYTLSKTYNMAGWRVGFAVGNSEVIEAINLIQDHMYVSLFPGIQDAAIEALTGDQACVRELTARYENRRDAFISACREIGWEAVAPAGSFFAWMPVPEDFTSSEFADYLLEEVSVAVADGSGFGEFGEGYVRVGLLMDEERLEEAVTRVSKLHLFDKVTQQ

SEQ ID NO: 60645 - protein, 655 aa, Listeria monocytogenes
MNRNEYNDDSIQVLEGLEAVRKRPAMYIGSTDVRGLHHLVYEIVDNSVDETLAGFGKKIVVTLHEDGSVSVSDEGRGMPVGMHKTGKSTVEVILTVLHAGGKFGQEGGYKTSGGLHGVGSSVVNALSEWLVVTINRDGATYQQKFKDGGKPDGTLKKIGKSKATGTTIRFKPDPAIFPTTSFNYETLSERLRESAFLLKGMLIELIDERVGMAEAFHFEEGVKNFVEYINEGKDVLHPVASFEGENATIEVEMAFQFNDGYSENILSFVNNVRTRGAGSHESGMKAAMTRIFNDYARRVNLLKEKDKNLEGSDIREGLSAVLSIRVPEKILQFEGQTKEKLGTQEARQAVDAVVAEHLAYFLAENPETSSLLVKKAVKAREAREAARKAREETRNGKKKKRSETLLSGKLTPAQSRNPNKNELYLVEGDSAGGSAKQGRDRRFQAILPLRGKVINTEKAKLQDILKNEEISTIIHTVGAGVGTEFDVEDCNYDKVVIMTDADTDGAHIQVLLLTFFYRYMRPLVEAGKVFIALPPLYKVSRGSGKKEVIEYAWTDEELDSAIQKIGKGYMIQRYKGLGEMNADQLWETTMNPDTRTLIRVRVDDSARAERRVATLMGDKVEPRRQWIEKHVEFSMEDSQNILENENMMVEEAKDI

SEQ ID NO: 60646 - protein, 573 aa, Listeria monocytogenes
MIDTTKTNEKATKKQNKSGAELLIDALKKQQVDMIFGYPGGAVLPLYDAFYDCDIPHILTRHEQGAIHAAEGYARVTGKPGVVVVTSGPGATNVLTGIADAMSDSIPLVIFTGQVHTPGIGKDAFQEADMIGLTIPITKYNYQVRDVRDLPKIVNEAFHIASTGRKGPVVVDIPKDMGIIQTESVRPDTIDLPGYQPTYSPNPLQLEKLMQSLSAASKPLILAGAGVNHARATAELLEFAERYQIPIVNTLLGLGSFPQSHDLFLGMGGMHGSYAANMALTDCDLLINFGSRFDDRLASAPKEFATKATIAHIDIDPAEIGKIIETQIPIVADINETLTQLLQMELPVHPDTSHWYKLNMTRKNRHPFNFDRTKKAEIKPQRVIELIGEITQGEALVSTDVGQHQMWAAQFYPFQFDHQIITSGGLGTMGFGFPAAVGAQLAFPDKTVVAIVGDGGFQMTNQELAILNDYQINVKTVIINNGSLGMVRQWQEKFHGERYSHSIFTSQPDFVKLSEAYGVKGVRLTNPETLEKDLRKAFAHPGPIVIDVHVAKDELVLPMVPSGKPNHQMEGVE

SEQ ID NO: 60647 - protein, 630 aa, Listeria monocytogenes
MKQLKVENLTKTYGEKSLFENISLTITEGERIGLIGVNGTGKSTLLQIISGSESGDKGTVTKAKDYTIGYLAQDPAFNEEDTVLAAVFDGDTAALRAMRKYEEVLLAMSLDAENTKLHDAYTAASQEMDASAAWDMNTEAKTILERLGITDLTAKISALSGGQRKRVGLAQVLIETPDLLILDEPTNHLDFQSIRWLEEYLNRFKGAVLLVTHDRYFLDRVTNHMVELDRGSAYRYVGNYEKFMESKAIRMENEVRESEKNKNLYRKELAWMRRGPQGRATKQNARQDRFHDLEKKVKIKTDDSELAIDFVTSRLGKDVFELKNLEKRFDEKQVLQDFSLIIQPGERLGITGNNGTGKSTLLNMLAGKLAPDAGEVVTGQTVQIGYYTQQNEEMDPDMRMIAYLQEAGEQVTTSGGEVISVSAMLERFLFPPNSHGKKIGSLSGGEKRRLFLLRILMERPNVLLLDEPTNDLDTQTLTVLEDYLESFNGTVITVSHDRYFLDKVVNKLLVFRAIGEVEIFYGEYSDYLKELEAKGKPAKSMKKMANTSVEKSSPEKKEKVKLTYQEQLEWDGIEDAISKLEKDIESLNETLEQTGADFTKAAEISGFITAKETELEQMMERWEFLSQYAE

SEQ ID NO: 60648 - protein, 483 aa, Listeria monocytogenes
MGLFDFSVKELHDKLVKKEISPFDLVSESFNRIESVEDKVGSFITLNKEAAFGVAEELGDAGIDPNNMLAGLPIGIKDNIVTKNLRTTAASKILENFDPIYDATVVSKLKNAQTINIGKLNMDEFAMGSSTETSYFHKTHNPWDLSRVPGGSSGGSASAVAAGEVLFSLGSDTGGSIRQPAAFCGVVGMKPTYGRVSRFGLIAFASSLDQIGPITKNVEDNAYLLEAISGLDANDSTSINQPVERFSDSLTGDIKGLRIGVPKEYLAEGVDPGVKQAVLDALKTLEKLGATWDEVSLPHSEYGVASYYILASSEASSNLSRFDGVRYGYRSPNATTLEELYTKTRSEGFGDEVKRRIMLGTYALSSGYYDAYYKKAQQARTLIKQDFINVFENYDVIIGPSSPTTAFKIDGMINDPITMYSNDILTVPINLAGVPAISVPCGFSDGLPVGLQIIGNYFEESLLYKVAHAFEQETTFHKEKPNL

SEQ ID NO: 60649 - protein, 329 aa, Listeria monocytogenes
MTIKQKSSFGAVIVLLIGTILWAVQAGSLSMSIPAFLSGIFSGGNEMVDVVIDLRFPRIIIALLAGAALSVSGLLLQAVMRNPLADAGVIGISAGAKFFSFVIILFLPELYFWLPLFSFIGGALACFLVFLFSYRSDFNPLRFIIIGIAINAVFTGLSDALSSQVALVSSQSASSAASLAMKKWSDVETLLIYVTIGLICALLLAKWCNVLGLENKMARGFGVPVNKTRIWLALIAVLLASITTAVVGVIAFVGLLVPHIARKLVGGNYQILVPFSILFGALLLLFADTIGRTLFQQMEIPASVIMLIIGGPFLIFLMRKGDFYGSKGR

SEQ ID NO: 60650 - protein, 291 aa, Listeria monocytogenes
MVKSMTGFGRATKEFEAFKVTIELKAVNHRYSEFLFRMPKQLAYLEGKLKKTISKQIKRGRIEVFFSITGEQIAKRELHIDWDLADSYYRFIKQASARYELQELPTMGDLLQEQAYLSIEEEVEASSELERLVLETLARATERLDEMRSMEGAELLLYFKQHLAALENSLEIIQAEIPNTEKHYQEKIETRLQNVVGDQFDPSIVLTEVAMLLEKADINEEVERTKSHLKQFYGIILLEEPIGRKLDFLIQEMNREVNTIGSKASSLKITEQVVEMKTTLEKIREQVQNVE

SEQ ID NO: 60651 - protein, 802 aa, Listeria monocytogenes
MSFLHLAIVLPFIVALLIPLFYRWTKQVHTGWLVLPIPVILFIYFLTFIPKTMEGATIVSMPWIPRLEINFTVVVDGLSLLFALLITGIGSLVTFYSIYYLGKKKERLSNFYTFLFIFMTAMLGVVLSDNLIVLYLFWELTSISSFLLIGYWYHRERSRYGARKSMMITVFGGLMMLGGFILLHIMSDSFSIREIISNADVISNNSLFIPAMILVLLGAFTKSAQVPFHIWLPDAMEAPTPVSAYLHSATMVKAGIYIVARFTPLFASSGVWFWTVSLVGITTLFWGSLNATKKNDLKAILAYSTISQLGLIMALLGVGAASLHFDTLSDDIYVMAIVAAVFHLFNHATFKGSLFMMVGIVDHETGTRDIRRLGGLMRIMPITATIAFIGTFAMAGIPPFNGFLSKEMFFESMVNITQLQLFDASTWGVLLPVVAWVASVFTFVYSMIIFFKTFTGKVKPYLLPKKPHEAPFGLLLPPIILSIFVVGIGLFPNLIAEPILEPAVRAIVPGLATDFSIHISLWHGFTPALLMTFGVVAVGIVLFLTHKYWKPWITTRVPKALRIGKTYDNGMYYLEQGSYRMTMFIMTGWLRTYLNYMLSAFILMMASVMIFTQALDFNFSSMTKVTVVDFVLAAVILVTLVGIVFSKSRITSIILLGAMGYTISIFFVISRAPDLALTQLIIETISVVLYLLVFYHLPQFSNIEEKPKWLSMKTFLSIGVGVIITLVSLSAYNTTFYDSISKYYVDNAYVEAAGRNIVNVILVDFRGFDTMFETAVLSIAAIGIYAMIKLRLTKRGENDENE

SEQ ID NO: 60652 - protein, 664 aa, Listeria monocytogenes
MFDNTDSLAVNTIRTLSMDAIQKANSGHPGLPMGAAPMAYALWSRVLNTNPKNSHWFNRDRFVLSAGHGSMLLYSLLHLSGFKLELEDLKNFRQWESKTPGHPEYRYTDGVDATTGPLGQGIAMAVGMAMAERHLEAKYNKDGFPVVDHYTYALCGDGDLMEGVASEAASYAGHQQLGRLVVLYDSNDISLDGDLDKSFSENVKQRFEAYGWEHLLVKDGNDTAEILAAIEKAKQNTSQPTMIEVKTVIGFGAPNAGTSKVHGAPLGDEGILEAKKAYGWNYEEKFFVPEEVTARFKETIGERGEKAEKAWNELFASYKAEYPELAKQLEDSLNNKLPADWDADLPVYDDSKALASRASSGEVINALAGKIPTIFGGSADLAGSNNTTIKTDGEFTKATPAERNIWFGVREFAMGAALNGMALHGGLQVYGGTFFVFSDYVRAAIRLSAIQHLPVTYVMTHDSIAVGEDGPTHEPVEQLASLRAMPGLSVIRPADGNEVVEAWKLAITSTSTPHVLVLTRQGLPTLPNSAKLTAEGVKKGAYVISPAKGEVPEAIILASGSEVNLAIEAQKELQAQGTDVSVVSVPSFDLFEQQSAEYKESVLPNAVRKRIAVEMGASFGWERYVGLDGKVIGIDKFGASAPGETVIKNYGFTVENVVNTVKSL

SEQ ID NO: 60653 - protein, 348 aa, Listeria monocytogenes
MAKDNKTEKATPRRIKKARNEGNVAKSKELNNAFSLLIVAGLLYFFGEMFIKNTIQAFVALLKQPPKLANMESYSLFYLMEFGKVLMPIMVMVVIFGLMNYGVQVGILFSAKAVKPQFKRLNPANYFKRVFSVKGIVEVVKALLLITLLSYVAYIGFRDHLDTLISYTGQNWLYSLGQIFALFKNEFLALFLVIAVIGLLDFFYQRYDYKKGLRMSKQEIKDEMKDSEGRPEVKQRQRSIARGLLQGSITKKMADATFVVNNPTHISVVMRYDKTKDHAPKLLVKGEDELALFIRQVADTDGVPMITNRQLARSIYYTTNPDEYIQEDLYKDVIEVMKELMDADKIKF

SEQ ID NO: 60654 - protein, 279 aa, Listeria monocytogenes
MAESFVRLEHVFYKYEDTEKYAVKDVSISAQKGEWVALVGHNGSGKSTIAKLLNGLLFPEDGLIKIGHFVLSEKNIWEIRRQVGMVFQNPDNQFVGATVQDDVAFGLENHGVPHDTMVERVESALNEVGMQSYALHEPARLSGGQKQRVAIAGVLALQPDVIILDEATSMLDPRGRAEVMETIRIMREQEDITVISITHDLDEVLFADRVIVMNKGEIHSEGTPKEIFQQADAMREIGLGVPFIIELQEKLVAGGFETGSTVLSEGALLDQLWKLNSNN

SEQ ID NO: 60655 - protein, 879 aa, Listeria monocytogenes
MKQLSSAEVRQLFLDFFKEKGHTIEPSAPLVPNNDPTILWINSGVATMKKYFDGSVIPDNPRMANAQKSIRTNDIENVGKTARHHTFFEMLGNFSIGDYFKEGAIVFAWEFLTSPKWIGFDPDKLYVTVYPEDEEAKTLWREKIGLSDDHIVEIEDNFWDIGIGPSGPDSEIFYDRGPAFGDDASDPELYPGGENERYLEIWNLVFSQFNHNPDGTYTPLPKQNIDTGMGLERMVSIIQDAPTNFETDLFMPIIREVEQIAGVKYGHSQENDVAFKVIADHIRTVAFAIGDGALPSNEGRGYILRRLLRRAVRYAKVLTINEPFMYKLVPVVGKIMNSFYPEVENQTDFIQKVIRTEEERFHETLNEGLAILETILKTAKETNEQVIKGADIFKLYDTFGFPVELTEEYAEDHGLKVDHAGFEAEMKEQRARARAARADVKSMQVQGELLANLTEKSAFVGYNSTEHVSEILYLIQNDTLVDEVAAGNEAQVIFKETPFYAESGGQVADKGTIESETGLAYVEDVQKAPNKQNLHRISVKEGVLKTGDTVKLAVDKVKRRETIKNHTATHLLHRALKDTLGEHVNQAGSLVSPDRLRFDFSHFGQITEEELTKMEEIVNEKIWEQINVVIEEMPIAEAKELGAMALFGEKYGDIVRVVQVGKYSIELCGGVHVRNTADIGLFKIVSETGIGAGTRRIEAVTGKEAYRFVTEQENTLKQAASLLKTTTKETPQKVELLQADLREVKRENESLLSKLASAASADIFESPEEIGGVKVIAKQVNAKDMNQLRQFVDNWKDKKIGGILVLGAVQGDKVNLISAVSEEAIKAGYHAGKLLKEVATRCGGNGGGRPDMAQAGGKNPAELGTALDYVSTWVKEQQA

SEQ ID NO: 60656 - protein, 74 aa, Listeria monocytogenes
MKYCLVEKDTCIACGACSIHAPDVFDYDTEGLAFNILDNNTGTKEIPEDLVEMVIDAEFACPSLSIKVSDSSFH

SEQ ID NO: 60657 - protein, 477 aa, Listeria monocytogenes
MTESKFPKDFLWGGAVAANQCEGAYLEDGKGLSLVDILPTVEDGRWEALFNPSKALATDYGFYPSHESIDFYHRYKEDIKLMAEMGFKCFRMSISWPRIFPNGDETTPNEKGLAFYDAVFDECHKYGIEPVVTINHFDTPLEVFKKYGGWKNRKCIDFYLNFCEAIFTRYKDKVKYWMTFNEINMILHLPYIGGGLDVTKEDNPEEVKYQAAHHQLVASALATKLGHEINPENQIGCMLAAGNTYPMTCNPKDVWKSIEADREGYFFIDVQARGYYPSYTKRFFKEHNINIKMEDGDLDALRDHTVDYVAFSYYSSRLTSADPEKNKETEGNVFATLKNPYLKASEWGWQIDPLGLRITMNTIYDRYQKPLFIVENGLGAVDTVEEDGSITDDYRIDYMREHVREMGEAIEDGVELLGYTPWGCIDLVSAGSGEMKKRYGFIYVDRDNKGNGTLNRSKKKSFDWYKKVIETNGKDID

SEQ ID NO: 60658 - protein, 842 aa, Listeria monocytogenes
MAETPNQRITEINLNKEMRTSFLDYAMSVIVARALPDVRDGLKPVHRRILYAMNDLGMTSDKAYKKSARIVGEVIGKYHPHGDTAVYFTMVRMAQDFSYRNMLVDGHGNFGSVDGDMAAAMRYTEARMSKISMELLRDINKDTIDYADNYDGSEREPVILPARFPNLLVNGSSGIAVGMATNIPTHHLGEVIDGVLALSHDPEITIRDLMEYIPGPDFPTAGMIMGRSGIRRAYESGRGSITVRGRVDIEEKKNGKETIVITEIPYQVNKARLVERIAELAREKKIDGITSLNDESDRSGMRIVIEVRRDISASVIVNNLFKMTALQTTFGINMLALVDNHPKVLNLKEILYYYLEHQKVVIRRRTEFELRKAEARAHILEGLRIALDNIDAIIKLIRGSKTSDVAKEGLMTQFNLSDKQAQAILDMRLQRLTGLEREKIEEEYQNLVALINDLKAILADDERILEIIREELEEIKVKYADKRRTEILAGDLVSLEDEDLIPEEEVAITLTKRGYIKRLPLSTYRSQRRGGRGIQGMSTHEDDFVEHLVATSTHDTLLFFTNTGKVYRSKGYEVPEYGRTAKGIPIINLLGIESQEQVNAVINLSEFTDDSYLFFTTKHGVVKRTTLSQFAKIRQSGLRAVELRENDELISVQMTDGSKNMIIATKHGQSIYFPEENIRVMGRTAAGVRGIRLREDDEVIGMEVLEDDEKVLVVTEKGYGKQTPASQYPLRNRGGMGVKTVTITEKNGNLVAMKTVTGEEDLMLMTVSGVLIRFEIDTVSQTGRSAMGVKLIRLDEDEKVATVAKVPKEEDEVELEEEIDETLITQVPDESFEDAPGSDIEE

SEQ ID NO: 60659 - protein, 167 aa, Listeria monocytogenes
MPEQIDGNKLDLEERVVTINRVAKVVKGGRRFRFTALVVVGDKNGHVGFGTGKAQEVPDAIRKAVEDAKKNMVLVPTVDTTIPHTVVGHFGGGEILLKPASAGSGVTAGGPVRAVLELAGVADVSSKSLGSNTPINMVRATIDGIKQLKNAEDVAKLRGKTVEELLG

SEQ ID NO: 60660 - protein, 457 aa, Listeria monocytogenes
MEFDTIAAISTPPGEGAIAIIRLSGPEAIQIADRIFYAKNSLSEAESHTIHYGHIKEDGEVIEEVMVTVMRAPRTFTREDVVEINAHGGIVSVNRVLQLLLRNGANLAEPGEFTKRAFLNGRIDLSQAEAVMDLIRAKTDRAMGVAIRQMDGNLSRLIRNLRQEILDALAQVEVNIDYPEYDDVEEMTQRMLLEKTELVRASVEQLLRTASQGKILREGLATAIIGRPNVGKSSLLNQLIQEEKAIVTDIAGTTRDIIEEYVNVRGVPLRLIDTAGIRETEDIVEKIGVERSRKALADADFILLVLNQNEELTVEDEALFEAAAGHNYVVVLNKTDLETKLDIDRVRELAGENPIVSTSLVNDEGLEALEEAIKTLFFAGDIDAGDATYVSNVRHIALLHQALEALNGVTTGIQLGMPVDIVQIDMTRAWDLLGEITGDSVQDELLDQLFNQFCLGK

SEQ ID NO: 60661 - protein, 158 aa, Listeria monocytogenes
MAEPISTIRDTKKTPEELEKERLEQMKADIAEQDSGFIEILETVKLLQESGALEALNSAIKARGDITKTFLNEWRKEPMTNAINNMMISSKLLTDTKPEQTEEMIANLKNAAKKAEESAKNDEIMGMLAMMKALKDPDINRALRYGVTFLKEVGQTLK

SEQ ID NO: 60662 - protein, 313 aa, Listeria monocytogenes
MTKIAFVFPGQGAQKVGMGQDVAAEYPEAKKIYDDADERLGFSITEIITEGPIELLTKSENAQPALVSTSVAILRALETYGVKADYVAGHSLGEYSALVAGGFLEASDAIYLVRKRGELMEAAVPNGAGAMAAVLGVDRETLKTITEEVTKEGDAVQLANLNCPGQIVISGTTAGVEKAGEKAKESGAKRVLPLAVSGPFHSSLMEPAALAFRDVLAEVKISDGQIPVVNNVDAKETTDKSEISDKLIKQIYSPVLWEDIVEELIKNGVDTFVEIGSGKVLAGLIKKINRDVTVLSAGDAESVKSVAATLKGE

SEQ ID NO: 60663 - protein, 162 aa, Listeria monocytogenes
MEQKTFIKVTCSILTISDTRNLDTDTSGQLIQSALETAGHEVISRVVVPDDVTLIKQKINELAANGSFCLITNGGTGIARRDVTYEALFATIQQEIPGFGEIFRMLSYEEVGSRAMVSRAFAGFSESGLLLFALPGSSNACQLAVQKLIIPELPHLIAERQK

SEQ ID NO: 60664 - protein, 278 aa, Listeria monocytogenes
MSVLNIEGAKLSYQKVGQGPILIFIPGANGTGDIFLPLAEQLKTSFSVVMVDRRGYGDSELTAAIPERASHAYDDYRVTRDAADIAALAKALSDVPVYILGSSSGSIVAMHVLKNHPEVVKKIAFHEPPINTFLPDSEMWQEANEKIVQTALTKNMAEAMQLFGETLHIAPIDAESMSKPAVTIDEVTKDSTTQQMKYWFTYEIRQYTSSNISLDDFKPYVHQITLLNGTDSKGSFPQDVNAFIAKQLGLTIVDIPGGHLGYIQKPAGFAKVLLSIWG

SEQ ID NO: 60665 - protein, 866 aa, Listeria monocytogenes
MDLQKFTQQVQQTIADAQNLAIASEHQEIDVAHVFKVLLTESDFAKRVYDVAEVDTDALQKVIENTLEKIPVVSGSGVNYGQAMSQALFQLMRDAEKEQQQLEDDFVSTEHLILAVMDQKSNPITAELKNQHKAKKQIKEAILKIRGGKRVTSQNAEENYEALTKYGRDLVAEVRSGKLDPVIGRDAEIRNVIRILSRKTKNNPVLIGEPGVGKTAIVEGLAQRIVRKDVPEGLKDKTIISLDIGSLIAGAKYRGEFEERLKAVLQEVKQSDGQILLFIDEIHTIVGAGKTDGAMDAGNMLKPMLARGELHCIGATTLDEYRQYIEKDAALERRFQKVLVPEPTVEDTVSILRGLKERFEIHHGVNIHDNALVAAASLSNRYITDRFLPDKAIDLVDEACATIRVEIDSMPSELDEVTRKVMQLEIEEAALKEEKDPASERRLEILQRELADYKEEANQMKSKWESEKNEISKIREVREQIDHLRHELEEAENNYDLNKAAELRHGRIPAVEKELLELEAENREKTAQEDRILQEEVTENEIAEIVGRWTGIPVTKLVEGEREKLLKLADVLHQKVIGQDDAVQLVSDAVLRARAGIKDPKRPIGSFIFLGPTGVGKTELAKALAFNMFDSEDHMIRIDMSEYMEKHSVSRLVGAPPGYIGYEEGGQLTEAVRRNPYSIVLLDEIEKAHPDVFNILLQVLDDGRITDSQGRLIDFKNTVIIMTSNIGSNLLLERTEEGEISPELESDVMQILQSEFKPEFLNRVDDIILFKPLTLADIKGIVEKLVEELQIRLADQEITITISDDAKAFIAEEAYDPVYGARPLKRYIVRHVETPLAREIVSGKIMPHSSVEIDLADKEFTFKVTE

SEQ ID NO: 60666 - protein, 283 aa, Listeria monocytogenes
MTQISQLLKKAEAILFEKGLDQNAAEILLETRMGLSRSELWMEISRELEPNHEKQFEEDFARYLAGEPVQYILKTAPFYGYDFLVTEDVLIPRPETEELVACAEAFLKKHPVKNVLDVCTGSGIIAIALKKAFPEISVTASDISAPALVVARKNALLLNADVRFVETDLLEAFKQNEERFDMIVANPPYISEAEKAEMSDYVLKNEPSLALFAENDGLAIYERFVDNLKYVLNSSFWVGVEIGYTQGERVKQLFEKSYPHTTVVIHKDINSKDRYVTCSNILV

SEQ ID NO: 60667 - protein, 457 aa, Listeria monocytogenes
MKKTVGEVVAMLDSSIHVDAFRDVVITGVCFDTRQIKSGDLFVPFVGNVRDGHEFVGQAREMGAVATFWQKNVPNPPTDFPVILVEDTLLALQELAAKYIQQVKPKVIAITGSNGKTTTKDIMAAIVETTYKVHYTGGNFNNHIGLPYTILTMPEDTEVAVLEMGMNHRHEIEVLSKIAKPDIAIITNIGEAHIEYLGSREEIAKAKLEITAGLNPSGILIYPHEETLLLGNINGDFRQLTFGKSEAAEIYPLEIRAEAEGTSFITNWEPELEIFVPIIGEHNVFNTMAAMLAAREIGIEGEKIQSALKNMERSKSRLEWITTKSGARILNDAYNSSPTALKTVLKTFMHMDSSGKPKYLVLADMLELGDLSTKLHQESAEVLENDTIQKVFLYGDAMKAFGEVAESKIGQGKVHHFDTKESLETALLSEIKGNEWILVKGSYGMGLKDVVENLIIK

SEQ ID NO: 60668 - protein, 657 aa, Listeria monocytogenes
MSGYFQKRMLKYPLYGLIAATIILSVITFFFSWWLSALVVVGGIILTVAMFYFEYRLNEDVQLYVSNLTYRIKRSEEEALVEMPMGILLYDEHYKIEWVNPFMSKYFDKAELIGESLEEVGPEFLDVITGNDEKGIMSIAWRDHRFDTIVKRKERILYLYDRTEYYDLNKKFQANKSVFAVIFLDNYDEWAQGMDDRRRSALNNLVTSMLTNWAREHRIYLKRISTDRFMAFLTEEMLKRLEEEKFQILDRIRERTSKQNIPLTLSIGIGYKEDDLIQLADLAQSSLDLALGRGGDQVVIKQPEGKVRFYGGKTNPMEKRTRVRARVISQALQELITQSDQVFVMGHRYPDMDVIGSSLGVMRIAEMNDRNAYVVVEPGKMSPDVKRLMNEIEEYPNVIKNIVTPQVALENITEKSLLVVVDTHKPSMVINKELLDSATNVVVVDHHRRSEEFVGSPVLVYIEPYASSTAELITELFEYQPDLEQVGKIEATALLSGIVVDTKNFTLRTGSRTFDAASYLRSLGADTILVQQFLKEDITTFTQRSRLVESLEIYHDGMAIATGHEDEEFGTVIAAQAADTMLSMEGVQASFVITLRPDKLIGISARSLGQINVQVIMEKLGGGGHLSNAATQLKDVTIAEAEKQLISAIDAYWKGET

SEQ ID NO: 60669 - protein, 491 aa, Listeria monocytogenes
MSETKRVRVRYAPSPTGFLHIGNARTALFNYLFARHNDGDFIIRIEDTDAKRNIADGEESQMTNLKWLGMDWDEGVDVPGKYGPYRQSERQSIYEPLIQELLDKDLAYKCYCTEEELDAEREKQKANGEMPRYSGKCRHLTKEQQAEKEAQGFKPSIRFKVPANETITFNDMVKDDVSFESNGIGDFVIAKKDGIPTYNFAVAVDDHLMEISHVLRGDDHISNTPKQILIYNAFGWEPPIFGHMTLIVNESRRKLSKRDGSIIQFIEQYRDLGYLPEALFNFIAMLGWSPEGEEEIFSKEEFIKMFDPKRLSKSPALFDNVKLTWVNNQYVKKLPLNDVVELSLPHLQKAGVVSAELNQAELDWVHKLVSLYHEQMSYGAEIVPLSEMFFADAESITFDEEETAVLAEETVPTVISAFKKELEALEVLEAAEVKAAIKRVQKETGVKGKGLFMPIRIVTTGEMHGPELPLAIEVLGREKVLNRLDTWLKNN

SEQ ID NO: 60670 - protein, 504 aa, Listeria monocytogenes
MTSKPYIMGVDIGTSSTKAVLFNQRGEVIFRQATHYELITDETGKAEESPTEIFDAVLTSIQAVMKNINTEELAGISFSSAMHSLIMVGSNGELLTECITWADGRSSETLEKVKRDNYLFQLYEATGTPIHPMSPFAKICWLKEEKPTLFKRTEKFVDIKSYILYRLFGVWVMDESLASGTGLYNIMEHDWEFEAMEIVKLTPDFLPKVVPETYQLAGVKKEYAELMGIPENLPFIIGGSDGALANIGIQATGQNDVTITVGTSGAVRKLTDQFQIDSRGRTFCYGAGDGYFIAGGAVNNGGKVVEWGLQQFGSEAEISRRDFASFIAKIEEVPPGAAGLLFQPYLLGERAPFWTNDIRGGFVGLTINHTKAHFIRAILEGVAFNLAEVYEAVSAPDDIIYVTGGISAHDAWCKLLADILNREIRVPHTIEGSSLGAAIIGMRSLGILKDLNLKHTLPIKAVYHPSENVLKYAELRLIFKQVTTQLMSSYSQLNSWQKKFDINS

SEQ ID NO: 60671 - protein, 210 aa, Listeria monocytogenes
MNVTSYNWKEEVANAITHGIGFILSIPALVLLIIFAAGKDNPLYLTSFLIYGISLMLLYICSTLLHSFKPCKARTIFNIMDHAAIYVLIAGSYTPFVLITIQGTLGWTLFGVIWGLAIAGIIYKIFMTGKLKLLSTSVYLLMGWMVMFAIKPLYAGLTPTGFWLLATGGIMFTVGAVFYSIPRVPYMHAIWHLFVIAGTAFMYFCILFYV

SEQ ID NO: 60672 - protein, 144 aa, Listeria monocytogenes
MLVPKRVKYRREFRGNMRGRAKGGTEVAFGEYGLQAVEASWITNRQIEAARIAMTRYMKRGGKVWIKIFPHKSYTSKPIGVRMGKGKGAPEGWVSPVKRGKIMFEIAGVPEDVAREALRLAAHKLPVKTKIVKREEIGGEANES

SEQ ID NO: 60673 - protein, 352 aa, Listeria monocytogenes
MSFSKLMMAVCSGLLLVATAIGTVGYYFFSEGSWYKILIEQKIFYIPFVVFVPLTAISIGLIIGGLIGYFVKQKFESIDFSIRLLGQGDLEKKITSEEDENFLEVQQVYKQIDRLRDKMKAQTILTQKLASDRAESTGQTKEAILSEERHRIARELHDSVSQQLFAAMMLLSALNEQSEKSATPAMQKQLKMVESIVNESQSEMRALLLHLRPTQLEGKSLKTGIEQLLKELTTKLPIEVEWQIEDISLQKGIEDHLFRIVQELLSNTLRHSKAKLLEVRLVTMDNLAVMKVVDDGVGFDMDNVRQGSYGLQNMRERVAEFGGTIKIISFPGRGTSVEIKIPLVAKKDVESE

SEQ ID NO: 60674 - protein, 342 aa, Listeria monocytogenes
MKVEDFDFDLPEELIAQTPLLDRTSSRLMVLDKESGDIKDQHFTDIISYLNEGDALVLNDTRVLPARLHGIKDETGAHIEVLLLKQKEGNAWETLVKPAKRIRKGATITFGDGALKATCLEELEHGGRILEFSYEGIFYEVLEQLGEMPLPPYIKEQLADQDRYQTVYAKENGSAAAPTAGLHFTEDLLEQISAKGVEIIFVTLHVGLGTFRPVDVEDTTNHKMHSEFYRLTEESAERINKIKAQGGKVVAVGTTSIRTLETIASRHDGKLVAESGWTEIFISPGYTFQAVDALITNFHLPKSTLIMLVSALSDRTKILAAYNHAVEEQYRFFSFGDAMFIH

SEQ ID NO: 60675 - protein, 323 aa, Listeria monocytogenes
MSFASETKKELTHMDVSDSDAKVELAAFIRMNGAISFSSQLVIMDVQTENAAIARRMYQLLKDLYEVPIELLVRRKMKLKKNNVYIVRLKSGTRGILEDLRILEPPMTFTKSIDRGFVKKRSAKRAYLRGAFLASGSVNNPETSSYHLEIFSVYEEHNEAICALMNQFDLNARTLERKNGFITYLKEAEKITEFLSIIGATSALLHFEDVRIMRDMRNSVNRLVNCETANLNKTINAAVRQIDNIKYIQSTVGLEALPERLREIAALRIANEDVTLKELGEMLTTGQVSKSGINHRLRKLDQIAERLRSGETPAQVGLKISNS

SEQ ID NO: 60676 - protein, 358 aa, Listeria monocytogenes
MYDRLQAVEDRYDELNELLSDPDVVSDPKRLRDLSKEQSGITATVETYREYKNVNEQINETKELLGEKLDDEMREMAKEEFAELQKEKTDLEERLKLLLVPKDPNDDKNVILEIRGAAGGDEAALFAGDLFRMYSKYAESRGWKVEIMDANPTGIGGYKEIIAMMNGNDAFSRMKYENGAHRVQRVPETESGGRIHTSTATVAILPEAEEVEIELHDKDIRTDTFASTGAGGQSVNTTMSAVRLTHIPTGIVVSMQDERSQLKNKDKAMKVLRARVYDKFEREAREEYDANRKSAVGTGDRSERIRTYNYPQNRVTDHRIGLTIQKLDQIMEGKLDEIIDALILEDQTSKLEHLNDAN

SEQ ID NO: 60677 - protein, 402 aa, Listeria monocytogenes
MENWKKNLYVVWVGCFLTGTGLNLIMPFLPLYIEELGVHNPDQVSMWSGIALSSTFLVSAIMSPIWGKLADQKGRRIMLLRAALGMAIAMILMGLVSNVYQFVGLRLLMGIFSGYISTANALIATQVPRHRSGWALGALSTAAVSGVLIGPLIGGALSDTFGVRPVFYITGVLLLGSFFLTLFFVKEKFTPVEKKEMRSGKEVFLSLKNPGLIISLFITTMMIQIASNSVNPILTLYVRDLAGNAQNIAFISGMIASVPGVAALIAAPRLGRWGDRIGSERILLGALIGSMLLQIPMAFAQNPLQLGILRFLLGLTDGALLPAVQSLLTKNTPREVAGRIFGYNQSFQYIGNVIGPLVGSSVAAHFGYGDVFLVVAGFIFINVLISFYFNRKMHGEKGNHAN

SEQ ID NO: 60678 - protein, 875 aa, Listeria monocytogenes
MNKLVLIDGNSIANRAFYALPLLNNDKGVYTNAVYGFAMMLMNVLEKEKPSHVLVAFDAGKTTFRHTTFKGYKGGRQKTPSELSEQFPFIRELLTAYDIPQYELANYEADDIIGTLTKKAEADGMEVAIITGDRDLTQLASEKTTVYITKKGIADMETNTPETLKEKYNLTPEQIIDMKGLMGDSSDNIPGIPGVGEKTALKLLHEFGGTVESVLEHAEEISGKKLKEKVLENKELAILSKELATINVDSPIECTVESTKYDGYQTEKVIPLLKEMNFTTLLKNIEGDTPEESKELKELSFEIVTELKEQHFGGKTALYVELENDNYHTANFIGLTVHSSQGTYFFTKETAESSEAFRKWVESDQTKVVYDAKKTIVAMNRIGLAISGITFDIMLASYLLNPSDSIDDFTSVAVRHDYTEVETDEAVYGKGAKRSTPEESIVAAHLARKAVAIADLEKRLVDDLEKNEQLALMEDLELPLTFVLAEMEMQGVSVDTDRLEDMKVELGGRLKTLEASIHSLAGEEFNINSPKQLGVILFEKLELPPVKKTKTGYSTAADVLESLSGKHAIIDEILLYRQLGKIQSTYIEGLLKVTDKETHKVHTRFNQTLTQTGRLSSVDPNLQNIPIRLEEGRKIRQVFVPSKPGWKMFSADYSQVELRVLAHISEDENLIYAFKHDYDIHTKTAMDVFHVEKEEVDSLMRRQAKAVNFGIVYGISDYGLSQNLGITRKEAKDFIDRYFVSYPAVKEYMQDIVRFAKEKGYVETILHRRRYIPEIVSRNFNVRGFAERTAMNTPIQGSAADIIKKAMILMSERLVSEKLEAKLLLQVHDELIFEAPEAEIAKLEEIVPDVMENAVELSVPLKVDSAFGDTWYDAK

SEQ ID NO: 60679 - protein, 375 aa, Listeria monocytogenes
MFELVNSYIDSLALFLAILFIQGMSFRKIRQYRPNWFQNGSRRLFLSILLGVYYGLAGIYFIYEGAYENNPVIYTNMRILILMVTSVFGGRIPLIFAYLVMLFGRISFDIASPTTSRYVILMTLIFAACLLVTFWKKQRFSRFVALIILNFPAILYYFVNNFDEGRILRGFEIIEYFLLFFVTALLVFYACNYIDKSNLVIQNLTETAMTDSLTNLPNMRFFTQQFGWIFTKSQKRKKSLSLFIIDIDHFKEINDFHGHQAGNTVLAQFSSILKNRTFPPRTMFARIGGEEFAVLLQNVGTEQAALIADFFREEVERAKFPYNPASGKVTVSIGVASASSNFSTTESLFEAADQALYQAKQNGRNQIAVHQGELE

SEQ ID NO: 60680 - protein, 137 aa, Listeria monocytogenes
MPTINQLVRKPRQSKIKKSTSPALNKGLNSFKRELTDVNSPQKRGVCTRVGTMTPKKPNSALRKYARVRLSNGIEVTAYIPGIGHNLQEHSVVLIRGGRVKDLPGVRYHIVRGALDTAGVENRGQSRSKYGTKKPKK

SEQ ID NO: 60681 - protein, 488 aa, Listeria monocytogenes
MNLEETMPLVFERSIPGRIGFSLPESDVPETNAGDYFDQAYIRSIPADLPELSELEIMRHYTNLSNHNFGVDSGFYPLGSCTMKYNPKINEKVARFPGFANIHPNQPESSVQGALELLYDLQTSLVEITGMDEVTLQPAAGAHGEWTGLMLIRAFHEKNGDTKRTKVIIPDSAHGTNPASAAVAGFDVVTVKSNEKGLVDVADLKKVVGEDTAALMLTNPNTLGLFEKDIVEMAEIVHEAGGKLYYDGANLNAIMAKVRPGDMGFDVVHLNLHKTFTGPHGGGGPGSGPIGVKKELIPFLPTPVLTKKEDIYTFDYNYPDSIGRVKPYYGNFGINVRAYTYIRTMGPDGLKLVTEYAVLNANYMMRKLQEAYDLPFDQVCKHEFVLSGNRQKKLGVRTVDIAKRLLDHNFHPPTVYFPLIVGEAIMIEPTETESKETLDSFIDTMLKIAKEAEENPEIVQEAPHSTYVKRLDETRAARKPILRYQKEV

SEQ ID NO: 60682 - protein, 284 aa, Listeria monocytogenes
MISRNLKIYFRDRTAVFMSLLTVLIIIGLYAIFLGNNMEEMFKQASGKTVGIQELVNTWVIAGILSITPVTVSLAVFSLKVHDEELSIARSFAITSASRWRIVISYIVSGLVASFLLSVITLFVGEMYIWLTGGEFLPFESWIRLIGIILINVLCCSSIMFFIASLVKKASAFSSVSTIVGTVIGFIAGIYLPIGSLPAAVQTAMKCFPFTYGASTIREIMTKEPLKEVFAGNTGAMDATKEMIGITIYWGDKTVTTGLSLLILSAFAVVFGVLSVILMKRQTK

SEQ ID NO: 60683 - protein, 37 aa, Listeria monocytogenes
MKVRPSVKPMCEKCKVIRRKGKVMVICENPKHKQKQG

SEQ ID NO: 60684 - protein, 176 aa, Listeria monocytogenes
MEITIVKGDITEQEVDVIVNAANSGLLGGGGVDGAIHQAAGPDLLKECQEVINRIGSCPAGEAVITSAGDLKATYIIHAVGPIWKDGEHQEANKLASCYWKALDLAAGKDLTSIAFPNISTGVYGFPKKLAAEVALYTVRKWAEEEYDTSIKEIRFVCFDEENLKLYNKLINSEVV

SEQ ID NO: 60685 - protein, 279 aa, Listeria monocytogenes
MAEISEELRLGEVVLNVGHLKEMAGFYQEVIGLKLLEENERMVRLGVSGSDEALLVLKKIDNAVVPEVPRIGLFHTAFLLPTRESLADVLLHLAKSGYPIDGAGDHAYSEALYLHDIEGNGIEIYADRPKAEWMRDSDGNLPMVTEQVDVDSLLQIATDEPFTGMPNGTIIGHVHLQVADADKAEQFYKEALGMKLTTAIPSARFFAAGDYHHHIGSNVWAGRNLELLQENETGLAWFTIITPDKDAIITTLEEQGYDVKRFESTISVTDSNGIKIHFK

SEQ ID NO: 60686 - protein, 331 aa, Listeria monocytogenes
MTIRFSILDQSIINPGEQPSEALRNTVELAQLAEQLGYHRFWVAEHHNSDEIAGAAPEVLLGYIAAKTSTIKLASGGIMLQHYSPYKVAEQFHVLENLAPGRISLGVGKAPGGFQPATDALQKDFVKPTRTFDAKLEELVDFVTRHSDTTIAAKPLPENKPEIFLLGGSASSAKQAAKLGISFVFAYFINGEEAVLKEARELFEQYQINTKASFQLAPIVVVAETKIAADRHIPERESIKVELADGRRVNVGSREQAEAYVKDIDQTYRFITQRIGAITGTKQEVGVEIKRLSKEYNIQDFVVLTPVKSAEIKRYSYQLLSESIKEEVVHG

SEQ ID NO: 60687 - protein, 163 aa, Listeria monocytogenes
MRRIITATVNNSSGVLNRITGVISRRQYNIDSISVGWTEIPNVSRITIVVHVDSLYEIEQVTKQLNKQIDVLKVSDITDDAHIERELALLKINSPAALRSELNAVIEPFRATVIDVGTKNVVIQVTGTSEKIDAFVDTVRPYGIKQMARTGVTGFTRSPKKMG

SEQ ID NO: 60688 - protein, 237 aa, Listeria monocytogenes
MTETKEEKVHKVFEKISPSYDRMNSVISFKLHVKWRKETMKLMRVQKGTNVLDVCCGTADWSIMMAEEIGPEGHVTGLDFSENMLKVGREKVKEADLHNVELIHGNAMELPFPDNSFDYVTIGFGLRNVPDYMQVLREMYRVLKPGGQLACIDTSQPNIPGWKQVFNAYFRYVMPVFGKFFAKSYKEYSWLQESTREFPGMARLAEMFQEAGFSYVRYISHSGGASATHFGFKKKEQ

SEQ ID NO: 60689 - protein, 793 aa, Listeria monocytogenes
MSKNGNFLKKVGLAFLSILIVASTIFQTTVVKAATSYGSQFLNTVELLDKDGVPQTDFGYYDNMDVHYTWSIPNSTNVKAGDTMDFTLPSQLALATDLAFDVKDSKGQVVGTATVKKATNQVTLVFSDYVEKHSDVKGELDFWTAFNQKVITGNETVDLVFPLENGTTVIDVEVGEKTPVSPTETLFKYGWVDASNPSLIHWVVRVNYAKVNIPNAVFTDIIGAKQTLNFDSIKAFHGTYSADRVFTAGAPISSTNFSATSDGFSVALGNLTDSVQISYTTTTTDGGKSTQYDNTAKLAGTDFVTKQTSTWTPASGGGGEGGGTTGSVTLTKEDAKTKATLEGAEFKLVDSKGTVLQENITTNASGQLSIADLKFDTYQLIETKAPTGYKLDTTPVEFTIGENNQAITVTKENTLNTGSVELTKLDAATKATLAGATFELQDKEGNTLQTDLKTDENGVLKVTDLVPGSYQFVETSAPTGYKLDNSPVSFEVIAGETDQVVKVTKENTLEVGSVELTKLDSATKATLAGATFELQDKEGNTLQTDLKTDENGVLKVTDLVPGSYQFVETSAPTGYKLDNSPVSFEVVAGETDQVVKVTKENTLEVGSVELTKLDSATKATLAGATFELQDKEGNTLQTGLTTDENGVLKVTDLVPGTYQFVETKAPIGYELDTTPVSFEIVAGETDPIVKVTKENTLVPPTPVPPTPVPPTPVPPTPVPPTPLPPVPYEPTVPPTKPEVPVTPKKTENSEDSPKTTPIRITQSLPKTGDTNSFAGLGVILIALSLSGLLLKRK

SEQ ID NO: 60690 - protein, 856 aa, Listeria monocytogenes
MKKLHVKKQGNNLLKESQMGKEKVLEKLGVMETGLTNVEVTERLAEFGPNQTVEEKKVSNLRLFIRAFNDPFIYILAMLMVVSYLTDDMEATVIMALMILASGILGFIQTSRAERASYALKNMVKNRVNVIRNGSMDLVMQDAIVPGDLIEISAGDIIPADARVISATDLLINQSALTGESIPAEKFVEDKRADPEIFERENLLFMGTDVLSGHGRAVVLRTGSSTFFGSLSIAATERRGDTSFDKGVKSISKLLFYFMMVMVPIVFMINGLMKGNWLEAFLYAVAIAVGLTPEMLPMIVSTNLAKGAINMSKKKVIMKELSAIQNIGAMDILCTDKTGTLTEDKLELIKYIDSAGETSERVLKMAYLNSYFQTGWKNVLDHAVIAKLDESTASGWKKVGEIPFNFDRRRLSVVVENRAETRMITKGAVEEMLTVCTHKEFGGAVSTLSESEKSELQDMCAEMNRSGIRVIAVAYKTGKVGEAFTKTDEEQMIIAGFLGFRDPVKASTKEAIAHLFKNQINVKVLTGDNEIVTKRICQEVGIPANGFLLGADIEELSDEELTRELRKYHIFAKLTPMQKSRIIGLLKKAGHTVGFLGDGINDAPALRKADVGISVDTAADITKDASSVILLEKSLTVLNDAVMEGRNVFGNILKYLKMTASSNFGNVFSVLVASAFIPFLPMLSLHLLLQNLLYDFSQLTLPWDKMDRSFLKKPHQWEQKGMLRFILCIGPVSSIFDIATFLIMWFVFSANTVAEQALFHSGWFVVGLLTQTLVVHMIRTEKIPFIQSRAAAPVMIATLSVMALGIIIPFTGFGHSIGFVSLPGSYFPWLILILVGYMATMQLVKTIYIRKFREWI

SEQ ID NO: 60691 - protein, 590 aa, Listeria monocytogenes
MIEQARAILQQNFGYQDFRNGQVDVISKLCAGEDTLAIMPTGGGKSLCYQIPALLFDGLTIVVSPLISLMKDQVDALVSEGIAATFINSTLTNREIDIRLDAAFSGELKMLYIAPERIETPGFQRLIEQVPISLFAIDEAHCISQWGHDFRPSYLTLCDSLDKMTRRPLVIALTATATQAVSDDICRLLKIRADSVVKTGFSRDNLAFQVVKGQDKDKYLIDYLTKNVTESGIIYASTRKEVERLHSFLQKKGVESGMYHGGMTDLARKDWQEKFLYDDIRVIVATNAFGMGINKSNVRFVIHYNIPRNIEAYYQEAGRAGRDGVPSDCILLFSPQDSRIQQFLIEQSEMDDERKQNEFAKLRQMTGYGYTEICLQKYIVQYFGDDEPNCGKCSNCLDTREATDITILAQQVFSCIKRMGERFGKVLIAKVLTGSADQKVKDWRFDELSTYGLMKDASQKDVLQLIDYLTAEKYLQPTDSQFPSLKLTDRAVSVLRGELKVERKQAKRAEKVKIDVNSDLFEKLREVRRELAAKHKVPPYIIFSDETLREMCAYMPQTEDALLEVKGIGAMKRDKYGAEFLAVLQQEASK

SEQ ID NO: 60692 - protein, 239 aa, Listeria monocytogenes
MGRKWANIKEKKASKDKTNSRIYAKFGIEIYVAAKSGDPDPHSNQKLRFVIERAKTYNVPKHIIDRAIEKAKGTGDETYSELRYEGFGPNGSMIIVDALTNNVNRTASDVRAAYSKNGGNMGVSGSVAYMFDNTAIFGVEGKDADELLELLMEADIDVRDILDEDGQAIIYAEPEDFHKVQEGLKAAGIEEFTVAEIEMIPQNDIQLSGEDLEKFERLIDALEDLEDVQKVYHNVELED

SEQ ID NO: 60693 - protein, 274 aa, Listeria monocytogenes
MEIRERILADMQVAETIDAHEEIRKSVEFLKAYLKKNTFLKSFVLGISGGQDSTLTGKLAQMAISEMRAETGDDEYRFFAVSLPYGTQLDESDRQDALNFMEPDNRLTVNIKASVDASVAALAEAGVELSDFAKGNEKARERMKVQYAIAAMHKGVVVGTDHSAEAVTGFYTKYGDGGTDINPLFRLNKRQGKALLKELGCPEHLYLKKPTADLEDNKPALPDEVALGVTYDQIDDYLEGKEVPADAAAKIENWFIKTEHKRHMAITIFDDFWK

SEQ ID NO: 60694 - protein, 604 aa, Listeria monocytogenes
MDKDYFTMRAHLYNITTDLEVPFKLNDVANIWFCTTKNAKRKLQQYQAKKMLTYLPGLGRGNVSRIIFPKQLELEVLDVLEQSLAEDAFSNILFLLQLPIPKSWFTSISTEIQQMFGLQVTENQQEVLRSIVRRKLTTLDPLQTSVSMEAFLITQISDSLVKYDEKKKRIIPHIAHHWKVSDDFTEWTFYLRKSVLFHHGRTLDSEDVKYTLMRSMQAESVSFWQLQDIQSIYCPNKFTLSIQLKKTDPFFIRYLCTANMAILPRDIIFDEYKWISTGPFRVAERNDERLILEAFDGYFLERPILDRVEFWTVQTGNNLKTIPMQFTSVDYEENPAYVERRKPGVGVNFICFNTHRNGTPQHPAFREAIYHLIDCQKASDQHFENYGTVASNYYPEKSLPPKKHPEKITTLLKTANYQGEKVVFGTTQHPTAVKESKWIQEQAVKFGINLERKIISHQEASYSNVPAEETDFMMMGEIPASDDEMAYLDFLNNPYLLPQQLFNQVIIKELTEKLVAFKKEKDASKRDALQTSIDSWLTENHYLIYLHHPEKSQSLHSMIKGIAENPYGYFDLSKVWIETSPLKTLKPDYKQSHRGKAPHTIKQK

SEQ ID NO: 60695 - protein, 283 aa, Listeria monocytogenes
MKTVKLNNGVEVPILGFGTYQITDAAEAEHAVKDAIKAGYRHIDTAQSYMNEEAVGRGIAASGVDRKELFITTKIWVENVSYKGVMSSFDRSLKRLGLDYVDLLLIHQPFNDVYGAWIAMEELQASGKIRAIGVSNFSPDRVIDLAAFNEVTPQVNQIEVNPFQQQTANLAILRKEGVAIEAWAPFAEGKNDIFNNPVLTKIGAKYGKSAAQVILRWLVEQDIIVLAKSVKPERMAQNLAIFDFELTEADKEEIAGLDQGESQFFSHADPEMVKWMASRKLNV

SEQ ID NO: 60696 - protein, 57 aa, Listeria monocytogenes
MSKTVVRKNESLEDALRRFKRTVSKSGTLQESRKREFYEKPSVKRKKKSEAARKRKF

SEQ ID NO: 60697 - protein, 294 aa, Listeria monocytogenes
MLGDLFTKPKKRKYATIPSDGTKADVPEGIMTKCPECKKIMYTKELQKNLMVCNYCGFHHPIGAKARIDMLVDEGSFEEIDASLTTANPLGFEDYMDRIEKDKQKSGLNEAIVTGHATIGGNPLVIAVMDSRFRMASMGSVVGEKILRAVEDADKTNKPFVIFTASGGARMQEGMLSLMQMAKTSAAFKRFSNHGGLIITVMTHPTTGGVSASFASLGDYNFAEPGALIGFAGRRVIEQTVREELPEDFQTAEFLLKHGQLDDCISRLDLQNKLSFILSIHVKAPGVGGEVDGE

SEQ ID NO: 60698 - protein, 1201 aa, Listeria monocytogenes
MLDVNNFEYMKIGLASPDKIRSWSHGEVKKPETINYRTLKPERDGLFCERIFGPMKDWECSCGKYKRVRYKGVVCDRCGVEVTKSKVRRERMGHIELAAPVSHIWYFKGIPSRMGLVMDMSPRALEEIIYFASYVVTEPGDTPLEKKQLLSEREYRVYREKYGKGFSAGMGAEAIKKILADIDLEKETNDLKEELKSAQGQRRTRAIRRLEVMEAFRNSGNNPSWMVLDVLPVIPPEIRPMVQLEGGRFATSDLNDLYRRVINRNNRLKRLLDLGAPNIIVQNEKRMLQEAVDALIDNGRRGRPVTGPGNRPLKSLSHMLKGKQGRFRQNLLGKRVDYSGRSVIVVGPNLKMYQCGLPKEMALELFKPFVMKELVGRGLAHNIKSAKRKIERMAPEIWDVLEEVIREHPVLLNRAPTLHRLGIQAFEPTLVEGRAIRLHPLVCTAYNADFDGDQMAVHVPLSAEAQAEARILMLAAQNILNPKDGKPVVTPSQDMVLGNYYLTLEREKAVGEGTIFKDINEAQLAYQNGYVHLHSRIAVFAGSIPNERFTDEQRNQLLITTVGKLIFNTILPKSFPYINEPTKFNLEIETPAKYFVDTTTDVRAHIAAQELIDPFKKKILGNIIAEVFKKFHITETSKMLDRMKDLGFKISTKAGMTVGIADILTLEEKHEILEKAHDTVEKITKSFRRGLITDDERYERVIAVWNAAKDEIQGKLILSLDRLNPIFMMQDSGARGNISNFTQLAGMRGLMADPSGRIVELPITSNFREGLTVLEYFISTHGARKGLTDTALKTADSGYLTRRLVDVAQDVIIREDDCGTDRGLTIKAIREGTEIIEPLEERLEGRYSRKTIRHPETKEVIARENDLITEAIATQIVDAGIEEVTIRSAFTCNTKHGVCKKCYGKNLATGTEVEVGEAVGIIAAQSIGEPGTQLTMRTFHTGGVAGDDITQGLPRIQEIFEARNPKGQAIITEVGGEVVSIEEGRDRQQEITIQGTDDRRSYNIPYTARLRVEEGTIVERGEALTEGSVDPKALIRVRDVLSVQEYLLAEVQKVYRMQGVEIGDKHVEVMVRQMLRKIRVMDTGDTNILPGTLMDIHTFTEANREAILSGSQPATGRPVLLGITKASLETDSFLSAASFQETTRVLTDAAIKGKRDELLGLKENVILGKLVPAGTGIGRYRKLKSEVIKETAEVTDEITNI

SEQ ID NO: 60699 - protein, 243 aa, Listeria monocytogenes
MDKEIKYAFVTGASGEIGQAICMSLARAGWNLYLHYYQNKETVEKLLPLLQAEEVDVILIQADFDDLASLTEIEKQVFQLDAFIHAAGHAHYSLFQDTTDTNIAELWNVHMFMPMRLIRTFMPKLMKSSQGRIIFISSIWGEVGASMEVAYSTVKGAQIAFCRALSQEVGLSGITVNAVTPGVVETKMMDQFSEEEKDNLRQEIPLNRFAQPEEIAETVAFLTSKKASYITGEVLRLNGGWLM

SEQ ID NO: 60700 - protein, 140 aa, Listeria monocytogenes
MDGISSLSGASQDTNNAVTSSVSKTLGKDDFMKLFLTSLQYQDPSSPLDTNEMMSQMAQLSLMEQVANMTTAVDKLSEQAQNSALQSAVNFIGKDIKGVSLNGEVISGKVESVQQTTNGVMLKLKDNDSLVPMTYVTEIN

SEQ ID NO: 60701 - protein, 341 aa, Listeria monocytogenes
MASTIYDIAKHAGVSKSTVSRVLNNQANISEESRKKVLAAIDQLNYQPSKLARALTSSGFDAIMVISNRSTTTTTGNPFFSEIIQSISTQAELENFDLILQTAKNSEDELKKCLSKIQEKMIKGIIMLSSPADEDFFHQLDPYNIPIVVTGKVEGHYKNIYSVDTDNFGDSYALTKHLIKQGHQKIACIHAPLDYHVSIDRLAGFRSCLFDHQLDLRNDWIIDSGYSIEDSYKAALRLMEGPDKPTAVFATDDLKVLSIYKMAADKNLQIPTDFSVIGYNDKVASSFLSPPLTSIDIPINKLGKKATNLLFRLIHQDKNVPKTTIIQTEMIERESIQKINA

SEQ ID NO: 60702 - protein, 330 aa, Listeria monocytogenes
MGLQDELTMMQPVVMKIFSKSVRENRLSHGYLFEGTRGTGKKRTALWLAQSLFCLESTETELACGKCTNCTRIASHNHPDVHLLEPDGASIKIDQVRALKQELSKRGMESDQKVVIIYDAEKMTVQSANSLLKFIEEPEGGLLLLFLTTNPGQILPTIQSRLQPVTFKSLTFDSLLASLTAAGISEQKARIYASITGSVEEAKAFEESEWFSEARNVVIKLYEGIHHQGTSPLIIIQESWMPLFKEKDKMALGLELLLLLYRDRLHLTLDENYEPICTAQKEMLGQDALRKSLSETTGEIEKILAAKSKLDSNMNTQLLMEQLVLEIQGR

SEQ ID NO: 60703 - protein, 1184 aa, Listeria monocytogenes
MSGHSGHDVKYGRHRTRRSFARISEVLELPNLIEIQTASYQWFLDEGLREMFRDISPIEDFAGNLSLEFIDYDLGEPKYSVEESKNRDANYAAPLRVKLRLINKETGEVKDQEVFMGDFPLMTEMGTFIINGAERVIVSQLVRSPGVYFNGKLDKNGKKGFGSTVIPNRGAWLEYETDAKDVVHVRIDRTRKLPVTVLLRALGFGSDQEIIDLIGDNDYLRNTLEKDNTDNAEKALLEIYERLRPGEPPTVDNARSLLVSRFFDPKRYDLASVGRYKINKKLHLKNRLFNQTLAETLVDPETGEIIASKGDILDRRNLDQIIPNLENGVGFRTLRPTDGVMEDSVLVQSIKIYAPNDEEKEINIIGNAYIEENVKHITPSDIISSISYFFNLLHGVGDTDDIDHLGNRRLRSVGELLQNQFRIGLSRMERVVRERMSIQDMTTITPQQLINIRPVVASIKEFFGSSQLSQFMDQTNPLGELTHKRRLSALGPGGLTRERAGYEVRDVHYSHYGRMCPIETPEGPNIGLINSLSSFAKVNKFGFIETPYRRVDPETNRVTDKIDYLTADEEDNYVVAQANSKLDEQGTFTEEEVMARFRSENLAVEKERIDYMDVSPKQVVSVATACIPFLENDDSNRALMGANMQRQAVPLMHPEAPFVGTGMEHVSAKDSGAAVTAKHDGIVEHVEAREIWVRRVSLVDGKEVTGGIDKYTLRKFVRSNQGTCYNQRPNVAEGDRVVKGEILGNGPSMDSGELALGRNVLVAFMTWDGYNYEDAIIMSERLVKDDVYTSIHIEEFESEARDTKLGPEEMTRDIPNVGEDALRDLDERGIIRVGAEVKDNDLLVGKVTPKGVTELTAEERLLHAIFGEKAREVRDTSLRVPHGGGGIVLDVKIFTREAGDELPPGVNQLVRVYIVQKRKIHEGDKMAGRHGNKGVISRILPEEDMPFMPDGTPVDIMLNPLGVPSRMNIGQVLELHLGMAARALGIHVATPVFDGANEEDVWSTVEEAGMARDAKTILYDGRSGEAFDNRISVGVMYMIKLAHMVDDKLHARSTGPYSLVTQQPLGGKAQFGGQRFGEMEVWALEAYGAAYTLQEILTIKSDDVVGRVKTYEAIVKGESVPEPGVPESFKVLIKELQSLGMDVKMLSADEEEIEMRDMDDDDFTNQNDAFNIVQPENAAAEKTE

SEQ ID NO: 60704 - protein, 431 aa, Listeria monocytogenes
MFQTLVNFFKVADIRKKILFTLAMLVIFRIGTFVPVPGVNAAALQSSMDGGILGFLNTFNGGALKNFSIFAMGVMPYITSSIIVQLLQMDVVPKLTEWSKQGEMGRKKLNQLTRYMTIGLGLVEAFGMAYGFNRMSSAGLVIEPSIGRYAIIAIVLTTGTMFLMWLGEQITVKGVGNGVSIIIFAGIVARIPDGVRQLYVSQIENAGDQLFLHVLTLVGVGVAILAIVVAVIFFQQALRKIPIQYSKRVAGAKQSGAQATHLPLKLNSAGVIPVIFASAFIITPQTILTFFDQSNDVVKVLKDVFDYTKPIGMILYVALIVAFTYFYAFIQVNPEKVADNLKKQGGYIPSKRPGRETQAYLTSVLYRLTFVGAIFLSAVAILPTIGTTVFSLPQSLAVGGTSLLIVIGVALDTTKQLEGQLVKRNYRGFIK

SEQ ID NO: 60705 - protein, 240 aa, Listeria monocytogenes
MSKKVVLTREASKNKPWQTYFSQNGYEVMSIPLIKTQPIKINLTREQQETDWLFLTSANAVEYFFTNQYERSNYKIAVIGEKTKEKLAEFGHEPSFVPSIYQSEVFLEEWLNENPEKTSILLPQSNLSRTIIKDTLIEKGYIVFSIELYETIFPEASKKLLTEQLKLNETQIIVFASPSAWKNFYSIAKSFPAQKEKWHIASIGSITTEAILADGWEVKYQPKTFTMKHLADLIIQEELK

SEQ ID NO: 60706 - protein, 273 aa, Listeria monocytogenes
MEKYVVIGNPIRHSLSPAMQNRIFQELGMNAEYNSVLIEEDAFETEIKKLMDSGVRGFNITTPFKERILPFLDELDNLAAASGAVNTVLKKEDKWYGFNTDGKGYLEGLEEIRSITEDDSILITGAGGASKAIYLALSTHTDAKITVANRTTEKAIEMTKDNNNHHAITLEEAEKQLADFTIIIQTTSIGLEASKNKSPISLANVKQGTICSDIIYNPAETAFLKEAKKNGAITQNGLPMFVNQGALAFEIWTGIKPERSLMKEAVLEQLGGN

SEQ ID NO: 60707 - protein, 280 aa, Listeria monocytogenes
MTKQLLVLQSDFGISDGAVSAMYGVINSVSIDLQIYDLTHQIPQFNIWEASYRLLQTVTYWPEDTIFVSIVDPGVGSKRRSVAVLTEDGHYIITPDNGTLTHIAHYGTIKAVRLIDEEKNRLPKSGASHTFHGRDIFAYTAARLAAGVINFEDIGPAANPDSIVSLSLSDSYLEGDQAFGTIDIIDRPFGNLWTNIRRTDFFELGANYGDSIEVLIKHHDRIVYKNFVTYSRSFADLRIGEALIYVNSLDNLGLGINQGSFVDAYSVGTGTSWKVTLKKV

SEQ ID NO: 60708 - protein, 493 aa, Listeria monocytogenes
MGKVMLIGAGPGDAQLLTVKGLAALQKADVIVYDRLVEPAMLQERKASCKLIYVGKEPLHHPIPQDEIERILVREAATNELVVRLKAGDPYVFGRGGEEGETLHKAGIPFEVIPGITSAIGGLAYAGIPVTHRDFASSFHVITGHLKKGRDPLDWEALARLEGTLVFLMGMTNLPNICANLLEHGQKPETGVAIVQWATRGKQLTVTGNLQTIEQKVAESGISSPALIVVGDVVSLRPQLNFFEEMPLFHTKVLLPRARAGKSMLAEQIRDLGGEVTMYPNIQVLDVAPTKTKEQLSEVSELLFTSKEAVERFFDYLAKLDLDIRSLKNSHLTAIGKQTKEAFSEKGIIPDSFIKRRSTELILEHLPRLQKNVSNLIIGSVVDTTEVNVILADVKAIEMMPLYDMRPVTERPFDLESFEQVCFSSSRSVQNLLDVLTIEEKAILQTKTILSIGRFTSATLASFGMNNFIEAESATPESLIELIQKTKLEGVPQ

SEQ ID NO: 60709 - protein, 277 aa, Listeria monocytogenes
MKRPVDFFAMKENGEKITMITAYDYPSAKNVEQAEADMILVGDSLGMVVLGYDSTVPVTIDDMIHHTKAVKRGATDTFIVTDMPFMTYHGSVNETIQNARKIIQESGAHAVKLEGAGEVVNKIARLTEAGAPVVAHLGLTPQSVGLTGSYKVRAKSAQEAQELMDNALAVEAAGAIAIVLEAIPRQLAEKVSKALSIPTIGIGAGLETDGQVLVYHDIIGYGISRRAKFVKAYADIDETIEPALASYVKEVKAETFPEVKHSFTMAEEDLKGLYGRE

SEQ ID NO: 60710 - protein, 422 aa, Listeria monocytogenes
MLTFITEIFSTPAFILGIIAAIGLIALRKTGSDIVKGTLKTIFGFIMLQQGSAIIVGSLIPFSTMFENAFQLKGVVAEDNAIAAAVQQILGTETSLILVFGFIINVILARTTRWKYIFLTGHMMFSFAATMAIVFDQMGFNSWQIILFGSIAQGISSIVFPALAQPFVRKVTGNDQVGFGFWGSSLVWATGWLGGKLGNKANSTEDLKVPKKLDFLKEMSVLMGIVMAVIYIFTSFFVDEPVMKELAGTQSNVLFAILQSFTFVVGILILLQGVRMFLGELVPAFKGISEKIVPGAIPALDVPVFYSFAPTATTIGFLCAVVGGLGATLVSTMLPVVVLPSVIGLFFMGGAAGVFGNAMGGRRGAIIAGLLLGFIFQMIVAIAYPILGLDGYGIQGLWFASTDAIIVIVIIRLIGALFGIAL

SEQ ID NO: 60711 - protein, 520 aa, Listeria monocytogenes
MTIAITIISSLLFLIVGLVVGSLIFKSSTEKKLAAARGTAELIVEDAKKEAETTKKEALLEAKEENHRLRTEIENELRGRRTETQKAENRLLQREENLDRKDTSLSKREATLERKEESISKRQQQIEEKESKLAEMIQAEQTELERISALSKEEAKSIILNQVEEELTHDTAIMVKESENRAKEESDKKAKNILSLAIQRCAADHVAETTVSVVTLPNDEMKGRIIGREGRNIRTLETLTGIDLIIDDTPEAVILSGFDPIRREIARIALEKLVQDGRIHPARIEEMVDKARKEVDEHIREVGEQATFEVGIHSIHPDLIKILGRLRYRTSYGQNVLNHSLEVSKLAGILAGELGEDVTLAKRAGLLHDIGKAIDHEIEGSHVEIGVELATKYKENDVVINSIASHHGDTEATSVIAVLVAAADALSAARPGARSETLENYIRRLEKLEEISESYDGVEKSYAIQAGREVRIIVEPDTIDDLSSYRLARDIRKRIEEELDYPGHIKVTVIRETRAVEYAK

SEQ ID NO: 60712 - protein, 88 aa, Listeria monocytogenes
MEQASFVVIDETGIHARPATLLVQAASKYSSDVQIEYTGKKVNLKSIMGVMSLGIGKGADITIYTEGSDEKEAIEGLTEVLKKEGLAE

SEQ ID NO: 60713 - protein, 491 aa, Listeria monocytogenes
MTDELEQKALITIFGGTGDLANRKLYPSLYHLYSKGSLGDNFAVIGTARREWSNDFFRDKVKESIKDIDGSEKDADAFASHFYYQSHDVTNKESYLTLKDLSDELDAKYELDGNRLFYLAMAPNFFGTIASRIKSEGFVDTDGFHRLIIEKPFGHDLASAEELNNSLRQAFKEDEIYRIDHYLGKEMIQNISVIRFANSIIESLWNNRYIDNIQVTLTEVLGVEDRGRYYDESGALRDMVQNHILQIVSLLAMEPPINLSTREIRHEKVRALRSLRVFEGKEVHQSFIRGQYGPGEVDGKELKGYRQEDNVDPHSNTETFVAAKLEIDNFRWAGVPFYIRTGKRLAKKTTQIAIQFKDVPLNLFGQQQSLGGNVLVIHIQPDEGITLHLNVKEPGQGMVTMPVNLNYIHSSPDGMNTPEAYEKLILDCLRGDATYFSHWDEVSLSWNFIDHIADVWTNTKDHFPNYKSGSMGPKEADDLIQRDGFQWFPID

SEQ ID NO: 60714 - protein, 187 aa, Listeria monocytogenes
MKTELEKMIAGEMYDPSDRELAHGRNRARKFCREINDAMDSESRASVLKRLFGGTKENVYVEPDFRVDYGSNIYVGENFYANFDCVILDVCEVHIGDNCMMAPGVHIYTATHPLDPVERNSGLELGKPVEIGDNVWIGGRAIINPGVKLGNNVVVASGAVVTKSFPDNVVVAGNPARVIKTIEVEEK

SEQ ID NO: 60715 - protein, 328 aa, Listeria monocytogenes
MTFFKKLKDKITQQTDSVSGKFKDGLSKTRGNFSGKINEMVARYRKVDEDFFEELEEILIGADVGFETVMELVDTLRREVQLRNISDPKDVQEVIVEKLVEIYQGDEKEDEALHIEEDGLTVILFVGVNGVGKTTSIGKMAHRFKQEGKKVMLAAGDTFRAGAIDQLEVWGERTGVDVIKQAEGSDPAAVMFDAVQAAKARKADILLCDTAGRLQNKVNLMNELEKVKRVITREIPNAPHEVLLVLDATTGQNAFVQAKQFKETTDVTGIILTKLDGTAKGGIVIAIRNELDIPVKFVGLGEQMDDLQAFDANEYVYGLFADMVDNEK

SEQ ID NO: 60716 - protein, 497 aa, Listeria monocytogenes
MEKKYILALDQGTTSSRAMIIDEEGEVIGVAQEEFDQIFPKPGWVEHNANEIWASILAVIAGVLLKTNISSKEIAGIGITNQRETTVIWDKESGNPIYNAIVWQSRQTEDICKQLRKDGYEDTIRSKTGLLIDPYFAGTKARWILDHVDGAQERAEKGELLFGTIDTWLVWKLTGGRAHITDYSNASRTLLYNIYDLEWDDELLKMLNIPKAMLPEVRPSSEVYADTVPYHFFGEEVPVAGIAGDQQAALFGQGCFEKGMAKNTYGTGCFLLMNTGEKAVRSENGLLTTLAWGIDGKVEYALEGSIFVAGSAIQWLRDGLRMVRQSSDSENYASRIESSDGVYVVPAFVGLGAPYWDSDVRGAVFGLTRGTEKEQFIRATLESLAYQTRDVLYAMEQDSGISLKTLRVDGGASANNFLMQFQSDILGVPVERPENKETTVLGAAFLAGLAVGVWKDKNEIKKHWKLDKRFEVEMKEEQREDLYEGWHKAVKAAQAFK

SEQ ID NO: 60717 - protein, 423 aa, Listeria monocytogenes
MAKLSIAYLESLTIKDIYSLAKEHKIAYYSKLTKRELIFALLKSNAEKEGFFFMEGVLEIIPNEGFGFLRPINYSSSSEDIYISASQIRRFELRTGDRVSGKVRPPKENERYFGLLHVEAVNGENPEVAKERVHFPGLTPLYPDRQIHLETEKYPISTRTIDLIAPIGFGQRGLIVAPPKAGKTVLLKEIANAITTNHPDTELIVLLIDERPEEVTDIERSVKADVVSSTFDEVPENHIKVAELVLERAMRLVEQKRDVVILMDSITRLARAYNLVIPPSGRTLSGGIDPAAFHRPKRFFGAARNIEEGGSLTILATALVDTGSRMDDVIYEEFKGTGNMELHLDRQLAERRVFPAIDMRRSGTRKEELLLSKERLEQLWKIRKAMPKQGDGLDISERFVRYLKKTDNNEAFYELLQEEMFKK

SEQ ID NO: 60718 - protein, 309 aa, Listeria monocytogenes
MKRKIIVGSRRSKLALTQSNWVINKLKENYPEFDFEIKEIVTKGDRILDVTLSKVGGKGLFVSEVEQALSDEAIDFAVHSMKDVPSSLKEGLIIGAIPKRESPLDCFVFNQVNSLDELPQGSVIGTSSLRRAAQLLKHRPDFVIKPIRGNIDTRLQKLHAENFDAIILAKAGLARMGWLENTTLKLEDIPPEVCLPAVGQGALAIECRESDQQIRDMLTSIHHEETGICVEAERVFLKKLNGGCEIPIAGFATRANEFVQFKGLVGNADGSIILESEQVGANPSEIGNKVAEDLLSEGADTIIKELRNV

SEQ ID NO: 60719 - protein, 555 aa, Listeria monocytogenes
MKFVKNNETAVFALGGLGEIGKNTYGVQFQDEIILIDAGIKFPEDELLGIDYVIPDYSYLVKNKDKIKGLFITHGHEDHIGGVPYLLRDLNIPIYAGKLASALIRNKLEEHGLLRQTKIYEYEEDDVFKFRKTSISFFRTTHSIPDTYGIVVKTPSGNIVHTGDFKFDFTPVGEPANLTKMAEIGKEGVLCLLSDSTNAEVPNFTMSERVVGESIKNIFRDVEGRIIFATFASNIYRLQQVVESSIETGRKIAVFGRSMESAMEIGKQLGYIQAPKDTFIDVHQLNKTPAGNVTILCTGSQGEPMAALSRIANGTHRQIQIQPGDTVVFSSSPIPGNTTSVNRTINLLYQAGAEVIHGKVNNIHTSGHGGQQEQKLMLRLMKPKFFMPIHGEFRMQKIHAESAEECGVPEENSFIMANGDVLALTSETAHVAGKIHAASVYIDGSGIGDIGNIVLRDRRILSEEGLVIVVVSIDMKNSRVMAGPDIISRGFIYMRESGNLIGEAQGLLTRHLNKVMEQKTTQWSEIKNEITDTLQPFLYEKTKRRPMILPIIMEV

SEQ ID NO: 60720 - protein, 195 aa, Listeria monocytogenes
MAKVVAIIGDPREKGTSRDLFQKYLSFFQEHPTIEVKIYDIRELAFDPNLPEGYRTEQTPEIIALKNDVHSADLLLFSYPVWWFNVPAVLKGVIDHLFWRGESYSFKDKKYFLTGPWRKKRARLIYTIGGMEIQHRLFGRPALTALRYPLWMSGVFSVKVTSIDRLDLSIRRTDNYYNKKVTHAAKKDIQFLLKK

SEQ ID NO: 60721 - protein, 471 aa, Listeria monocytogenes
MSIQIFNTLKREKQPFKPLKDGEVKMYVCGPTVYNYIHIGNARPIIVFDTVRRYFTYRGYDVKFVSNFTDVDDKLIRAANELKLTVPEVADRFIGAYFDDVDQLNVAKASVNPRVTENMDEIIQMISTLIEKGYAYESAGDVYFQTKKFKDYGKLSGQELSELQHGARVEYNERKQDELDFTLWKAAKPGEIFWESPFGNGRPGWHIECSALAKKYLGDTIDIHAGGQDLVFPHHEDEIAQSEAATGKTFANYWMHNAFLNIDGEKMSKSLGNFITLHDVLKDNDPNVIRFFMLSVHYRKPITLNDAILEDAKNGLERLMIAYQNIDHRIQTDDGEYVEEAHEDEWLEQLTELKQAFEDDMDDDFNTANAITTFHELAKRANIYLAKETVSINVLREFLSMMRLFAEVLGLKLENTQTDSLDDSEVEALIEERLQARNERNFARADEIRDILKEKNIILEDTAQGTRFRRG

SEQ ID NO: 60722 - protein, 440 aa, Listeria monocytogenes
MMKKTGFRSFILTILVVLSIVLSYFIWKGQPDYEAINVKEVEKTTIDKTMTTSQVFKPYKLAVNANENNYQSLDADLLNELMAQGKAFSFSEVVLASKKSSEDYEKLIHKNGTIEIIFPNNIPFSIFAQIFQVEGEGLESAFFNRIVFDINKTDTGLHSVYFTNDDQENIYQSSLQNKDIDKIEKIVKKNESKLTQNDKLISNKRNLFLSSEKTKLNRKKYIIDSLEINLFTSALFQDSGTVKSEGNTYTDGSSVIEMDTDNKVLEYVNPSQERTNPEDLSSVKRAGLIQDSFNFVNDHAGWTGDGAYYFTGYAAESATTNFSLFIDNLQVYNENGMADISVTEGLEAVYKYMRPFFRLDTDVPGEKKEVTLPSSYSVYSALAQNPNVKAEEIEDIVPGYHMTRSESSGMNRLVTLEPTWLYKYHDKWFIFQPDAEKAGE

SEQ ID NO: 60723 - protein, 152 aa, Listeria monocytogenes
MNNEQNMNQQIALFYFGYKAFTETADLIIAKHSLKRLHHRILFFTARMPGLTINELLTFLEISKQALHQPLAELKERELLTIEQGRRDKRQRCIFLTSAGKELENELGAAQRKQMSEIFTNSADTDGMHFTEVMEGYAKNRPGAAFIKDFKE

SEQ ID NO: 60724 - protein, 224 aa, Listeria monocytogenes
MLTHEISENEKPREKLQNYGIEALSSSELVALIIETGTKNESVLTIANRIIMKFKNVGEMQYASIEEFQLVNGIGIAKASKIMAAIELGRRISIVTEQEEVVVRCPEDAVKLVMPELAFLFQEHFHCLFLNTKNQVIYRQTIFVGGLNASIVHPREVFRLALRKSAASIMCFHNHPSGDPTPSSEDLLVTKRLAEAGNIVGITLLDHIIIGKNKYISLKEKGYF

SEQ ID NO: 60725 - protein, 90 aa, Listeria monocytogenes
MDSKDQTMFYNFGDDSIEEDVKKLMKQVYVALEEKGYNPVNQIVGYLLSGDPAYIPRHKDARSMIRRLERDEIIEELVKAYLKNNEIGEK

SEQ ID NO: 60726 - protein, 1066 aa, Listeria monocytogenes
MKWIMKLRWAILAFWLAAAVVLMFIAPPMADLVREKGELKLPDGYPSSLATEMQKKHNPDDKGSAYIAVYTADHKLTGTELNDIQKSLDSIEKDKDELHVTNVLSSFNQPELKDKFLAKDGKTMVASLTVDDTDASVKSIRNALDKKMDVKGVDTYLTGNKLIQEDVVQGSEDGLHKTEGITVVFILVVLFLVFRSAVAPFIPLITVGISYLVAQSTVAFLIDIFNFPVSTYTQIFMVCIMFGIGTDYCILLMSRFKEEMGAGLNPREAVHATYRTAGKTVIYSGVAVLVAFTSLYFVQFDLYRSAVAVGVGIVVLLAALYTLVPFFMSTLGTHLFWPLNKNISHKENKIWGAAGKFTFARPWIALLIVAAITLPPILLHTGTESFNSLDEISDKYPSKKGFEIVSDSFGAGQVAPTQIFIENDDNMRTTDYIAQIEKISDDLSHLKGIDMVMSASRPAGKRVDDIYIKNQAGQVNDGVGQATDGVGEVKKGLDSASSELKKSEPALDKAVAGVGDLQKGTVATQEGINQLQTALAQIQKGIESGATGAGDLKQGVAEAKSQLATLQNGEAQIQAGYAEIQKNLQNVADQLKGFENPSSQAIDTSKLEEQFKKIGASFQAFAAAHPEVRNDPRFQKLAADIQGLETAGNELKTSAGQQMAALQAKMKELNQGIQQLATAMNQLNEQSKQISDGLSAFSTGLGQIETGLDQLEKGLNQAAVGQGQVVSKMPEVSNALTQIAAGQGALKDGFAGISGQMGQLTDGLTSGADGLGKVESGLNTANGLIDDWSKVPYASSGIYVPDALLKNADFQKVLDQYISSDGKLATINVILTKNPYSNEAMDSIDDINDQLAASMKGTKLENAKIGIGGMTSANYDTRDMSTADYHLVLVIVLASVFVTLVIVLRSLVMPIYLIASLVLTYFAALGFAEIIFMRILGYSGLTWATPFFGFVVLVALGIDYSIFLMSRFNEYNGLSVRDRMIKAMKNMGGVIFSAVIILGGTFAAMMPAGVLSLLEIATVVLIGLVLYAVVILPLFVPVMVKLFGRGNWWPFITRKGDHQENVPPKK

SEQ ID NO: 60727 - protein, 373 aa, Listeria monocytogenes
MSINEIIIYLMVIFMILGAIDKIIGNKFGLGAQFEEGIMAMGSLTLAMVGIITLAPVLAKILSPIVVPIYTALGADPAMFATTLLANDMGGFALAQELALTPDAGLFAGAILGSMMGPTIVFTIPVALGIIKKEDHKYLATGVLSGIITIPIGCLIGGLVAGFSPIMIFKNLVPIILVAALIMLGLWFKPEGMIKGFTIFGKGVVIVATIGLVAGAIQQLTGLTIIPGIAPIGEGIEIVGGIALVLAGAFCLVFVITKVFNKPLMKMGKLLGMNEVAAAGMVATLANSIPMFQMLKDMDERGKIINVAFAVSAAFVLGDHLGFTAGVAQDMIFPMIVGKLVGGVTAVAVGIYMANRMMKKNKAKEQTAVKDNG

SEQ ID NO: 60728 - protein, 604 aa, Listeria monocytogenes
MKEVNYREDDWREAKSALAPFAAANWVGGLFNNLEKVSKNMEEAEEDVQELDSDHAISFQHTNYRGKYSAIEDDLMVLYKFSCHAGEKMETLVDQPFYEKLDAFVDGMQDLSISTYSTTNRIGAKSKQTYTTTSGGSQVIESIKEGATIEDLMNGDNFYANQMQLQYRDWQRANPDQDVSKKDFQMGMLHSRAFEYKSIKDEQQEKEFWVNIVATVVIVGVSIFCPPAGLALAVGYGSLEAGSAISGKDWVSGRELSTEERALRGGLALLDIVPGVKALSTGAKAASAGSKLVRVGDNVLAGSKNVGKGTIDNGIQAGKQAMDLRLANAKKVSEAVQKKLTKDLDDIGTMAKTIQNKTKETFTLPPREQLAFARGGSIPEQSATGAAAIAAKKKLKDIMQNMDNLNVKGGGKDDIIEQNKSLKFTSLEESEKWGIDGFSVWRNSLSSREIQAIRDYTDIWHYGNMNGYLRGSVEKLAPDNAERIKNLSSALEKAELPDNIILYRGTSSEILDNFLDLKNLNYQNLVGKTIEEKGFMSTTTISNQTFSGNVTMKINAPKGSKGAYLAHFSETPEEAEVLFNIGQKMLIKEVTELNGKIEIIVDLL

SEQ ID NO: 60729 - protein, 820 aa, Listeria monocytogenes
MMFGRFTQRAQKVLALSQEEAMRLNHSNLGTEHILLGLVREGEGIAAKALYELGISSEKVQQEVEGLIGHGEKAVTTIQYTPRAKKVIELSMDEARKLGHTYVGTEHILLGLIREGEGVAARVLSNLGISLNKARQQVLQLLGGGDATGAGRQTNTQATPTLDSLARDLTVIAREDNLDPVIGRSKEIQRVIEVLSRRTKNNPVLIGEPGVGKTAIAEGLAQQIVRNEVPETLRGKRVMTLDMGTVVAGTKYRGEFEDRLKKVMDEIRQAGNVILFIDELHTLIGAGGAEGAIDASNILKPPLARGELQCIGATTLDEYRKYIEKDAALERRFQPIKVDEPTVEESIQILHGLRDRYEAHHRVAITDEALEAAVRLSDRYISDRFLPDKAIDVIDESGSKVRLKSFTTPKNVKEMENNLSDLKKEKDAAVQGQEFEKAASLRDKEQKLKKSLEETKANWQEKQGLDHSEVTEDIVAEVVASWTGIPVAKLAETETNKLLNMEKLLHERVIGQDAAVKAVSLAVRRARAGLKDPKRPIGSFIFLGPTGVGKTELARALAESMFGDEDSMIRIDMSEYMEKFSTARLVGAPPGYVGYEEGGQLTEKVRQKPYSVVLLDEIEKAHPDVFNMLLQVLDDGRLTDSKGRVVDFRNTVIIMTSNIGAQEMKQDKSMGFNVTDPLKDHKAMEHRVLQDLKQAFRPEFINRIDETIVFHSLQEKELKQIVTLLTAQLTKRLAERDIHVKLTEGAKSKIAKDGYDPEYGARPLKRAIQKEVEDMLSEELLRGNIKVGDYVEIGVKDGKLEVRKKDAPKKKTTSKKVKAK

SEQ ID NO: 60730 - protein, 167 aa, Listeria monocytogenes
MKKVFITTGTEHYLRQLMANYTGGNVTLLQNFSQSLLYQESTGEKLFQEGAEYRVLQSSGSIKGFGVVVFEYIHLRDEEIPIFLQMYQRASLHFSETPGLQSTKLTKAMNMNKFLIISFWDSEVFFHDWKKSPLSKEITNIMRKNNTQSGFSHEDIYHYPEFSHDAK

SEQ ID NO: 60731 - protein, 556 aa, Listeria monocytogenes
MNVMQENQIKLIEHIKQAVVQAVGLEETEVPEILLEVPKDKKHGDYSTNIAMQLARVAKKAPRQIAESIVPELKKDNKLIKEVEIAGPGFINFYLDNAYLTDLVPVILTEDKKYGESDFGKGEKFQIEFVSANPTGDLHLGHARGAAIGDSLANIMKMAGFDVSREYYINDAGNQINNLVLSAEARYFEALGLESEFPEDGYRGADIISLGKDLAAKYGDKYVHTSEEERRSIFRVDALAFETGKLRADLEEFRVSFDEWFSETSLYEENKVLPALERLRENGYIYEQDGATWLRTTDFEDDKDRVLIKSDGSYTYFLPDIAYHLNKLERGFDVLIDIWGADHHGYIPRMRAAIEALGYSPNQLEVEIIQLVHLFEDGVQVKMSKRTGKSVTMRDLIEEVGLDATRYFFAMRSSDTHMNFDMSLAKSTSNDNPVYYVQYAHARISSILRSGKEQGLEVTKDADMSLLQTEAEYDLLKVLGEFADVVAEAAAKRAPHRIVRYLNDLASAFHRFYNSNKVLDMDNLEVTKARLALIKTAQITLRNGLTLLGVSAPEKM

SEQ ID NO: 60732 - protein, 237 aa, Listeria monocytogenes
MLNQKYQLLLHNEYDTKSGDLVKKEIVATKKTKNLLEDLTSHLLCVTNQIEYGKFITWYEMEIKKVLQVHPNQHFIIKISFQQLYFRETMLLLENLQKDSRRLTIELVGDSQISPYSKEHFSAEDSDAFLKGKLKMLKKWHYFISKHIESGAIEQTLIFTPYIDELKYSLTQKSKLLHNITELKFFLSFWKNWAELRFVDFLVLVDEKNEFVSHVLLPDELNVRCKMYENFGGMVSE

SEQ ID NO: 60733 - protein, 103 aa, Listeria monocytogenes
MHVKKGDKVKVITGKDKGKSGKVLAAFPKKDRVLIEGINMVKKHTKPSNVNPQGGILNVEAPIHVSNVMLIDPKTGEPTRVGYEVKGDKKVRVAKKSGEVIDK

SEQ ID NO: 60734 - protein, 518 aa, Listeria monocytogenes
MFKIMKDFTEQEKIIVLDFGSQYNQLITRRIREFGVYSELHPHTITVEEMKALNPTGIIFSGGPNSVYDEDAFRADERIFDMGIPILGICYGMQLMTTHFGGKVERAKDREYGKADIHVEKPNRLFAGLPTDQVVWMSHGDLVVEEPAGFEVTVTSKSCPIAGIADEERSLYGVQFHPEVRHSVYGNELLKNFALNVCGCKGDWTMENFSEVEIAKIQEIVGDKKVLLALSGGVDSSVVGVLIHKAIGDQLTCIFVDHGLLRKGEADQVMETLQGEFNMNIIKVDAKKRFMDKLAGVSDPEQKRKIIGNEFIYVFDDEANKLDGVEFLAQGTLYTDIIESGTATAQTIKSHHNVGGLPEDMQFKLIEPLNTLFKDEVRALGTELGMPDAIVWRQPFPGPGLGIRVLGEITEEKLEIVRDSDYILREEIKNAGLEREIWQYFTALPNIRSVGVMGDGRTYDHTVVVRAVTSIDGMTADWARIPWDVLEKISVRIVNEVDHVNRVVYDITSKPPATVEWE

SEQ ID NO: 60735 - protein, 444 aa, Listeria monocytogenes
MAKYTKEDIFRFADEQNVKFIRLQFTDILGIIKNVEIPVSQLKKALDNKIMFDGSSIEGFVRIEESDMYLFPDLDTWVVFPWTAEKGKVARMICDIYNPDMTPFAGDPRANLKRVLKEMEELGFTEFNLGPEPEFFLFKLDENRRPTLELNDSGGYFDLAPTDLGENCRRDIVLELEEMGFEIEASHHEVAPGQHEIDFKYEDAVTACDSIQTFKLVVKTIARKHGLHATFMPKPLFGVNGSGMHFNMSLFNEKGNAFFDESGELELSQTAYHFLAGMLKHARGYTAVTNPTINSFKRLVPGYEAPCYIAWSGKNRSPLVRVPSSRGLSTRLELRSVDPSANPYLAMAVLLKAGLSGIKDELTPPAPVDRNIYGMNEEEREATGIYDLPESLGHALIELEKDDIIKAGLGEHIFEHFIEAKTIECDMFRTAVHPWEREQYLEIY

SEQ ID NO: 60736 - protein, 90 aa, Listeria monocytogenes
MAVKIRLKRIGSKKKPFYRIVVADSRFPRDGRSIETIGTYNPLLDPVEVKIDEEATLKWMHNGAKPSDTVRNLLSREGIMEKFHNQKLGK

SEQ ID NO: 60737 - protein, 921 aa, Listeria monocytogenes
MEYKDTLLMPKTDFPMRGNLPNKEPEWQAKWEEEKLYEKIQEKNAGRPTYILHDGPPYANGELHMGHALNKTIKDIIVRYKSMAGFSSPYVPGWDTHGLPIETAIAKKGVKRKEMSIAEFRKLCAEYAMKQVDGQRTGFKRLGINGDWENPYITLLPEYEAEQIKVFGEMAKKGYIYKGKKPVYWSPSSESALAEAEIEYQDKTSASIFVAFKVTDGKGVLDEGTNIVIWTTTPWTIPANMGITVNPDLDYVVIESAGEKYVVAEALLPSLREKLGFEDATVVKTVRGSELDRVVTKHPFYDRDSLVMNGEHATAEAGTGAVHTAPGHGEDDFLIGKKYDLEILAPLDDRGVFTEEAPGFEGVFYDTANKMVTEKLEEVGALLKMEFITHSYPHDWRTKKPVIFRATAQWFASIDAFRDDLLAAVKGVNWTPAWGETRLFNMVRDRGDWVISRQRAWGVPLPIFYAENGEAIITDETINHISELFREHGSNVWFERDVKDLLPAGFTHPGSPNGEFTKETDIMDVWFDSGSSHQAVLNARPELSRPADLYMEGSDQYRGWFNSSLTTAVAITGEAPYRNVLSHGFALDGEGRKMSKSLGNTLLPGKVIKQLGADIVRLWVASVDYQADVRVSDEILKQVSEVYRKIRNTMRFLLGNINDFNPTTNTVSYENLREVDKYMLIKLNDLVKNVKDSYEAFEFSTIYHQINNFCTVELSQFYMDFAKDVVYIEAADSHDRRAMQTVFYEAVVTLTKLLAPILPHTTEEVWNSLIGEGAESIHLQDLPDVKVLANSEEITAKWDAFMQIRDNVQKALEFARNEKLIGKSMLAKVTLYVDGEAKTLFDSLEGDFAQLFIVSDFELVEGLENAPESAFKSNQVAVQITVAEGETCERCRVVKKDVGVNPKHPTLCGRCADIVVKHYEA

SEQ ID NO: 60738 - protein, 266 aa, Listeria monocytogenes
MKQAIGFIDSGVGGLTVVREVLKQLPHEQVYYLGDTARCPYGPRDKEEVAKFTWEMTNFLVDRGIKMLVIACNTATAAALYDIREKLDIPVIGVIQPGSRAALKATRNNKIGVLGTLGTVESMAYPTALKGLNRRVEVDSLACPKFVSVVESGEYKSAIAKKVVAESLLPLKSTKIDTVILGCTHYPLLKPIIENFMGDGVAVINSGEETASEVSALLDYHNLLDATDEEIEHRFFTTGSTQIFKDIAKDWLNMPDMTVEHIKLGK

SEQ ID NO: 60739 - protein, 239 aa, Listeria monocytogenes
MDAVRKNRLFQHSTMAALVGGLFSGTTSFKELLQHGDLGIGTLDQFDGELIILDGEAFQIRSDGQAYKVKPEDTTPYASTTFFDADTSFSVSEPTSKQAVEEKIAELVQGPNVFYAVKMTGNFRYVDTRVVPKQQRPYPPLIEAVKEQPTYHFEYITGTIVGFWTPAYISGIGVSGYHVHFIDDMRKIGGHVFDYEMLEGTVEVAQQTEFELQLPQTTEFLRSDLSTPDMLEQIEAAEN

SEQ ID NO: 60740 - protein, 725 aa, Listeria monocytogenes
MEQMQDKIMKLVQKSLTYKPAQINAVIKLMEEGNTVPFIARYRKEMTGSLDEVEIRDIEETFEYVTKLENRKEEIIRLIDEQGKLTDELRAAIVKAEKHQALEDLYRPYKQKKRTKATIAKEKGLEPLAEWLMSFPSNADPLTEAANYISEEKEVESAEAALLGAHEIIAEQISDEPSFREWIRNFTRKFGMIESRAKNAEADEKGVYEMYYEFNEMIGKVASHRILAFNRGEKEDILRVQVQVDTTKIFQYLFEKVIQNRNSATRPYVEEAILDAYKRFIGPAIEREIRGELTDKGEEQAIHIFSENLRKLLLQPPLKGKIILGVDPAFRTGCKFSVLDQTGKVLEIGVVYPHTAKARRPEAKQKIAEILSTYQVEVIAIGNGTASRETEQFIVEVIRESNSNAYYCIVNEAGASVYSASETAREEFPDYQVEERSAVSIGRRLQDPLAELVKIDPKSVGVGQYQHDVAQKRLNETLTFVVETAVNQVGVNVNTASASLLQYVAGLNKTVANNIRKYREENGSFASRKELKKVPRLGAKSYEQSIGFLRILEGENPLDKTAIHPESYKAAEQIVKAAGFGLKDIGSEDLKAALQALSIPEEAEKLTIGKETMRDIIDNLIAPGRDLRDELPAPLLKQDVISMEDLKQGMELQGTVRNVVDFGAFVDIGVKQDGLVHISKLSNSFVKNPMDVVSVGDVVTVWVDEVDTKKNRIALTMLNPNGSVK

SEQ ID NO: 60741 - protein, 800 aa, Listeria monocytogenes
MKPSMKRQIAQTGIIHRPLPIETEHALETLAKKKQVLSSRTLFSSKQHVSLEFTHQGAGDFTISGQDEIKLSSPVVMPHWPAGAPDDGDYTNFGNVTISASIGNEDWSGFNRVRIQVFPDFPGVTNPYLMISFKNDGTVKVPDIYGREGVHGVNLINHEWNDVIFEIEGLPRDRMTEMSFSYYLNGPERLTAGTMELFINEIKLEQISEPEISKGWLPQNNTLIYSHNGYSKDMPKVAFCANKHAATTFTIHDKETDKVVFTGKSYQNATETGNFVILDFSDLQTVGEYYLKFADMQTEIFQIGTSEVIWESSIWKSLNFIFCERCGCPVFGKHTTCHADIIAEHDGKQLSFNGGWHDAGDVSQQLIQTAEVTMALYEMAASLPEKEETLRMRLLEEGEWGLDFILKTRFGDGFRATSAGMTRWTDGLVGGMDDAIARVHNQAYENFYCAGIEAYIGSQIADNATMQNHLLRIAEEDLLFAIKELEKHGTSQKPIFWEHTYQTSESLYYATASWAASMVYQLTNKEIYAEKAAEWLDLMLEAQEKAGIRDSETSELYKGFFYRDKSHKVIQHFNHQAREHLYLLALEAALETQPSHAEKQTWLQAVEMYGDYLKKVTRFTKPYPLIPAGLYKKDEYLDEASFHLQHLLIDERAIEEYQLQFEQGIKINDEVALRKFPIWFSFRGNNAILLSAGKAASIAGKILKDKALLDIAEGQLQWVIGMNPFGQSMMHGEGYRYAQQYSVLNGEITGEIPVGMETFRNEDEPYWPEFNNATYKEVWVGNAGKWMSIVADLNKITGKS

SEQ ID NO: 60742 - protein, 222 aa, Listeria monocytogenes
MTLMMKNITKNYQDGEQVIEVLKNVSLEVAQGEFVAIVGPSGAGKSTFLSIAGALLSPTEGEIAIGGKVLNDLTSKDLTKVRLDKVGFIFQGANLIPYLNVRDQLLVIAELSGDKGRVAKEKADELLKELGLTARENNYPESLSGGEKQRVAIARALMNDPDIILADEPTASLDASRGHKVVQMIADEVKRKNKAAIMVTHDERVLDLVDRVIRIEDGYLKD

SEQ ID NO: 60743 - protein, 430 aa, Listeria monocytogenes
MSSVVVVGTQWGDEGKGKITDFLSENAEAIARYQGGNNAGHTIKFDGVTYKLHLIPSGIFYKEKISVIGNGMVVDPKALVEELKYLHDKGVDTSNLRISNRAHIILPYHIRIDEADEERKGANKIGTTKKGIGPAYMDKAARVGIRIIDLLDKETFKEKLEHNLGEKNRLLERFYELEGFKLEDILDEYYEYGQQFKEYVCDTSVVLNDALDDGKRVLFEGAQGVMLDIDQGTYPFVTSSNPIAGGVTIGSGVGPSKINHVVGVAKAYTTRVGDGPFPTELFDSIGDTIREVGHEYGTTTGRPRRVGWFDSVVVRHARRVSGLTDLSLTLLDVLTGIETLKICVAYKLDGKTITEFPASLKDLARCEPVYEELPGWTEDITGVTSLDDLPVNCRHYMERIAQLTGVQVSMFSVGPDRAQTHVIKSVWRLA

SEQ ID NO: 60744 - protein, 87 aa, Listeria monocytogenes
MADRNQRKVYTGRVVSDKMDKTITVVVETYKKHGLYGKRVKYSKKFKAHDENNIAKTGDVVRISETRPLSATKHFRLLEVVEEAVII

SEQ ID NO: 60745 - protein, 104 aa, Listeria monocytogenes
MERVASIMYLYPGNKEEYKKRHDELWPEMKEALKAHGAANYSIFLDEKTDTLFAYVEVEDKAIYDKIAETEICQKWWKYMAPIMKSNPNNSPVAVDLKEVFYLA

SEQ ID NO: 60746 - protein, 296 aa, Listeria monocytogenes
MNLQTMIRTLQDYWSEQGCIMLQSYDVEKGAGTMSPYTFLKAIGPEPWKAGYVEPSRRPADGRYGENPNRLFQHHQFQVVMKPSPDNIQELYLGSLEKLGINPLEHDIRFVEDNWENPSLGCAGLGWEVWLDGMEITQFTYFQQVGGLECFPVTSEITYGVERLASYIQDKENVFDLEWTEGISYRDIFFQAEFENSTYAFETSNTDMLLTLFDTYEREATRQMQDGLVFPAYDYVLKCSHTFNLLDARGVVSVTERAQYIGRIRNLARRIAKTFYESREKLGFPLLKEEGGKRHE

SEQ ID NO: 60747 - protein, 632 aa, Listeria monocytogenes
MRITDLLSKDVMIMSLQATTKEAAIDEMIASLKSNGKINDEVLFKKAIMNREAQSSTGVGEGIAMPHAKTKAVNEPTVVFAKSEKGLDYDALDGQPAHLFFMIAAPDGANATHLETLAALSRLLVHPAFVQSLRDAKTPEEVINLFNNEQEDSEETVVAPTSTNDTGKSVVAVTACPTGIAHTYMAAEKLQETANKLGVRIKVETNGSRGVENRLTDKEIAEADGVIIAADVQVDMPRFDGKHLIAKPVAAGIHKPEELIKEAISGNAPIYKAEEGSQATESADGLSIGQQIYKHLMSGVSHMLPFVIGGGIAIAIAFMLDQMLGVPQDQLAKLGSYNEIPALLKQIGDVAFGFMLPVFAGYIAYSISDRPGLVAGFVAGGVASVGGAGFLGALVGGFLAGYAVELIKLALKKLPKTLDGIKVVLFYPVLSVLIVGLLMLLLNVPMSALNTWLNDFLNSLSGTNAVILGLLLGAMMAADLGGPINKAAYIFATGTLAASVATGGSAIMAATMAAGMVPPLATFVATLIFRNKFTAQERDAGLTNSILGASFITEGAIPFAAADPLRMIPSFIAGSAITGAIVMFLNIKVLAPHGGVFVIFLVSQPWFYIIAIIIGTLISAGLIGVLRKKPTV

SEQ ID NO: 60748 - protein, 178 aa, Listeria monocytogenes
MMNRVVLVGRLTKDPELRYTPAGVAVATFTLAVNRTFTNQQGEREADFINCVVWRKPAENVANFLKKGSMAGVDGRVQTRNYEGNDGKRVYVTEIVAESVQFLEPRNSNGGGGNNYQSGNNNNNYNSGGNNFGQAPTNNGGFGQDQQQSQNQNYQSTNNDPFASDGKPIDISDDDLPF

SEQ ID NO: 60749 - protein, 341 aa, Listeria monocytogenes
MINQVYRLVSERQFEEANIEEALTEDVVVVRPTYLSICAADQRYYTGSRGKEMLSKKLPMALIHEGVGQVTYDATGEFEIGTKVVMIPNTPTEDDPVIAENYRRSSLFRSSGYDGLMQENVFMRRDRVVRLPENMDMEVAAYSELISVAFHAITRFKQKANANQSVFGVWGDGNLGFITCLLLKTIYPESKVIIFGKTQYKLDFFSFVDEAHLVDEIPEGLVIDNAFECAGGKGSQYAVEQIIDLIKPEGTISLLGVSENPIEFNSRMVLEKGLTVFGSSRSGKEDFQNTVNFLSENERAVEYLSSLIGQRKVVRNLQDIIEAFETDLRNPFGKTVMEWKV

SEQ ID NO: 60750 - protein, 417 aa, Listeria monocytogenes
MELANKMLHALEHEDMALAKKYFDEVVQAGTDEEQYYLAEELFTLGFLDETEDLYELLLAKYKDEGELLVRAAEVALEKDDIDSAQDYLEKVNKEDEAYIESLLVLADLYQMQGLFEVSEQKLLEAKQIAPNEPIIDFALGEYYLSQARFASAVQSYQTAVEAGLTIISNGAVSVYERIAEAFAASGAFEEALSYYERALEDKESIDTLFGMGLTAYQAKDYTKAIHALEHLREHDPSYTTLYSYLAKSYEENGEPEKAIAVLKDGLMQDEFNKEMFLEAGKLAVKLRLPEEAEEFYRQAIVLDEEYSEAIMQLNKLLIAQENYEGVIELVEGLGEEVISEPQIFWDVSVAYQETEQYNKAKANYELAYSHFTNNPTFLKEYGLFLREEGEHAKSQEVLRNYLELEPEDTEILSLFD

SEQ ID NO: 60751 - protein, 373 aa, Listeria monocytogenes
MTLSKGLENVYVAETSISSIIDDMLTYVGYGIDDLMENNASFEEVIYLLWHLRLPNKDEFKKFKREIQENMAVSETIITSLRMQNHQKLHPMSVLRTTVSMLGVFDTEAELDDGEAVYRKGLRLQAKMPTIVAAFSRIRRGLDPIPPREDLNMAANFLYMITGEEADELSVEAMNKALVLHADHEFNASTFTARVCVATLSDVYSGVTAAIGALKGPLHGGANERVFDMLEEIDQAGDVRNYIQEKIDTKQKIMGFGHRVYRGGDPRAQHLREMSRKLTAEKGEEKWFDISLQVEESVWELKHLKPNVDFYSASVYHALGIDRDLFTLVFSVSRVSGWLAHIFEQYRDNRLIRPRAIYVGPENRSYLPVEERI

SEQ ID NO: 60752 - protein, 175 aa, Listeria monocytogenes
MILLVIDTQKLIMTNNLYNFDSLVPNIEQLIATARKNKIEIVYIRHDDGPNTELTEGKEGFDIYKKFQPTTHERIFDKTVNSAFKGTGLLEYLKEKGTKKIVVAGLQTDFCIDATVKCGFEHGFHMIVPAHANSTEDNHFMSGENSYKYYNEWMWPGRYATCISMEETIKEMEHN

SEQ ID NO: 60753 - protein, 179 aa, Listeria monocytogenes
MSKDLEVAGRYANALFQVAQDKDLVDVFSEELTELKAALKANKDFVKLLENPTFTTEQKKNLASAVFEKINPTLRDFIYLLIDRSREDYLSVIADVYQKRVNDLRGVADADVYSVVPLSEQELTALSRVFATKMNKTKLNIQNHIDKSLLGGVKVVIGTRIYDDSLKTKLKDMERQIKA

SEQ ID NO: 60754 - protein, 237 aa, Listeria monocytogenes
MAEKKILVVDDEKPIADIVKFNLNKEGFDVYCAYDGDEALELVEEVQPDLILLDIMLPGRDGIEVCREVRKKYDMPIIMVTAKDSEIDKVIGLELGADDYVTKPFSNRELIARVKANLRRHSQVSSSTAEEEENSELEIGSLIIHPDAYVASKRGETIELTHREFELLHYLAKHMGQVMTREHLLQTVWGYDYFGDVRTVDVTVRRLREKIEDNPSHPAWLVTRRGVGYYLRNPEQE

SEQ ID NO: 60755 - protein, 398 aa, Listeria monocytogenes
MNKTIEMDGTTYDFTYEDLVWSITFPKSKTRAKELAQLELLEKPATHFTPAKISSDSDSYTISYEIAPRTYGFEQVRKMGREDKLRALRNIADLGELLNTRYTFFLHPDNLIFDINLVPSIVHRGIKNILPPYELTEETFFKQYQCFVIAMFSKKFSFENLYNGSLSGARGTQFEKSILDAKTVQDIATILEEAYMKEHAAVQKNMASVPKKKYSTFRGLAVGFIIVAILLAIPVSYFAFVKVPLQNDLLTANENFLKTDYDKVITGLENVDPEKMPQSVQYELAYSYVKGEKMSDKKKENIMNTISLKSDAKNLLYWIYNGRGEFSKSLDIAKLLDDPTLAMYSLTKQIEQVQSDTTLSGDEKVEKLKTLEESLKEYDEKVNESTTTEDETTNTEAK

SEQ ID NO: 60756 - protein, 802 aa, Listeria monocytogenes
MLVSYNWVKEFFQDFPLTAEELGEAITRTGIEIEGVEELSASLKNVVVGEVLSCERHPDAEKLNKCLVQTDEAEPVQIICGAPNVAAGQKVIVAKVGARLPGGLKIKRAKLRGEVSEGMICSLAELGFESKVVPKAYAEGIYVLPAHVETGVNAITLLGLDDAILDMAITPNRADALSMKGVAHEVGAIIHQKPAQPTEPDVSEKGKAEDFISVEVENPAETPYYAIKMVENIEIKESPLWLQTKLMKAGIRPHNNVVDVTNYINLLYGQPLHSFDYDKIGSKKIVVRSAKEQEEITTLDGEKRTLQAGHTVITNGVEPIAIAGVMGGEFSEVTENTTTVALEGAIFSSSSIGKASRELYLRTEASIRYDKGSDAWKVEKALAHGGALIAELSGGTLVGGVVEVDNREKAVNKIETSLTRINRILGTAITLTEIETIFDRLGFVLEVKNDALIIEVPTRRWDITIEADILEEVARIYGYDEIPVTLPATSTTGGLSDSQKARRVMRAYLEGAGLNQALTYSLTSKKDATRLALSDEKTVALSMPMSEEHSHLRTSIVPQLIRSASYNIARKNMDVALYEMGTVFYATEGDNLPIEQEHLAGLITGNWHIADWQKTPKPVDFFVLKGIVEGLVNKLGIKSELHWKQTEKEELHPGRTASLVLEGQEIGYLGALHPAVEANYDLKETYVFEINVAALLDATKEKVVYHPIPRYPEMTRDLALLVDKDTNHAAISQVIKEHGGKLLVDIELFDIFEGESLGENKKSLAYTLTFLDSERTLVEEDVQKATNKVVEALQEKLNAIIR

SEQ ID NO: 60757 - protein, 995 aa, Listeria monocytogenes
MGAKVSVQINGVARDVVEGTRMLDYLNAEGIQHPHICYSEQIGPIQSCDTCMCEVDGELMRACSTNLTDGMEIKTNSELAKDAQLEAMDRILENHLLYCTVCDNNNGNCKVHNTTELLGVEKQERPYREKGYLNDFSHPFYRYDPDQCILCGRCVEACQQVQVNETLSIDWERSQPRVIWDDDRPANLSSCVSCGLCATVCPCNALMEKSMLGQAGFMTGLDEDMLEPMIDMVKKVEPNYQTVFAVSEMEASMRETRTKKTKTVCTFCGVGCTFEVWTKDRKILKVEPTGEGPVNKFATCVKGKFGWDFVNSEKRITTPLIREGNEFVPASWEDAIHLVATKLREIQAKYGNDSLGFISSSKTTNEENYLMQKLARQVFETNNIDNCSRYCQAPASDGLTRTVGIGADSGTVEDIESAGLVIIVGASPADGHPVLASRIKRAQKTRGQKLIVSDLRKHEMAERSDLFIHPKQGTDFVWLTAVAKYMIDQGWHDEVFMENRISNVADYLAFLEPFTLEYAEKETGLSVETLKKVAQMVHEADGTAVCWGMGVTQNIAGSHTSSAIANLLLVTGNFGRHGAGAYPLRGHNNVQGACDMGSLPNVLPGIQPLGNDEVRARFEEAYGVSISSEPGLKNNEMLDAIEAGTLHSMYVIGEEMAWVDSNSNHVQEILASLDFFVVQDVFLSKTAQFADVVFPAAPSLEKEGTFTNTERRVQRLYEVLEPLGDSKPDWWIIQEVARACGRTDWNYDHPSEIMDEIASLAPFFAGVRYDRMQGFNSLVWPVSADGKDMPLLYEERFNFPDGKAQFSTLPYIAPITFPEEYNLTLNNGRLLEQFHEGNLTDKSKGLDYKLPEVFVEVSHELAKERDLESGSLVRLSSPYGRIKLRAVVTDRMKGNEVYVPMHSVSSETAVNLLTSSAGDVRTKTPAYKQTKVNLTVLEKTGKNPLPDHNPRNRKRFPQNGAEVARKWSREDYQPISKVNCACGGNCGCGGKGRNH

SEQ ID NO: 60758 - protein, 332 aa, Listeria monocytogenes
MERYDRQMRVKNIGKDGQEKLLTKTILIVGVGAIGSYAAEICARMGFGKLILIDRDYVELSNLQRQSLFTEQDALDKQAKSYAASKALQLINSDITIEYIVDDANVTSLTPYVGTIDYILDCTDNFMTRDFLNQFCFSHQIPWIFTSCAGNYANLMPIIPPDSACLHCLLGDIPQTNAASCDIIGVDGALIPIVAGMQVSLLTQMIINPDFKANTYYQLDNWHFSFQTIEVKKRPDCSSCAPGKMVSEVPFSGQTVTLCGRDTVQFRLPNKSNYREIKLLLTEQKIIYNENPALLSFQYEKFQFVIFKNGRVLLHGSENIAEAKKIYHLFFN

SEQ ID NO: 60759 - protein, 542 aa, Listeria monocytogenes
MAKDIKFSEDARRAMLRGVDQLANAVKVTLGPKGRNVVLEKKFGSPLITNDGVTIAKEIELEDPFENMGAKLVSEVASKTNDVAGDGTTTATVLAQAMIQEGLKNVTAGANPVGVRRGIEKAVATAIEELKAISKPIESKESIAQVAAISSGDEEVGKLIAEAMERVGNDGVITIEESKGFATELDVVEGMQFDRGYTSPYMVTDSDKMEAVLEKPYILITDKKINNIQEILPVLEQVVQQGRPMLIIAEDVEGEAQATLVLNKLRGTFNVVAVKAPGFGDRRKAMLEDIAILTGGQVITEDLGLELKTATVDQLGTANKVVVTKDDTTIVEGAGDSTQISARVNQIRAQMEETTSEFDREKLQERLAKLAGGVAVVKVGAATETELKERKLRIEDALNSTRAAVEEGIVAGGGTALVSIYNKVAALEAEGDVETGINIVLRSLEEPVRQIAHNAGLEGSVIVERLKHEAVGVGFNAANGEWVNMIDAGIVDPTKVTRSALQNASSVAALLLTTEAVVADKPDENGPAAVPDMGMGGMGGMM

SEQ ID NO: 60760 - protein, 270 aa, Listeria monocytogenes
MAENKRVISIENRIPELKKYRKKKLVRHLAILIGIFVILIAITLYFLSPLSKLDKIAVSGNKQLTENEVRKESGLEIGEFVIGISNGKTEDALKKNTLIKDATVSKEGLNDVQINITEFKTIGYQQQDGKYYDVLESGIMLTDQPRQFPIGNDLLFQNFKNGKTLEKMVDQINKLPKDVVSSISEVIYSPTKSDKNHIKLYMNDGNQVSADISTFAEKMQHYPAIVAQLAKGQKGVIDIEVGSYFQSYYQQNAEKKATEEAAKEKKETNE

SEQ ID NO: 60761 - protein, 419 aa, Listeria monocytogenes
MKRFKKVGIVSAVLVMALSLAACGGGKDTSKSGSSDEKTLTVSVDAGYKDYVNKIKGDFEKDNDVKVKVVEKDMFETLEALPLDGPAGTAPDVMMSAFDRIGSLGQQGHLAEVKLGNKDDYDEKDQKQVTIDDKIYGAPAIIETLVLYYNKDLLDKAPATFKDLETLSKDSRFAFTSEKGKNTGFLAKWTDFYFSYGLLAGYGGYVFGDEGTNPKDIGLNNKGSVEGITYATKWFQDVWPKGMQDNKSADDFIQDQFVKGKAAAILGGPWSAANYKEAKINYGVAKIPTLNNGKEYSPFAGGKGWVVSNYSKNKDVAQKWLDYVTNQKNQETLYDMTNEVPANLKARDTAKSKNDELTNAVIEQYKNAQPMPNIPEMSEVWTGAENLMFDAASGSKTPQQSADDAVKVIEDNVTQKYTK

SEQ ID NO: 60762 - protein, 203 aa, Listeria monocytogenes
MSKIIIATANKGKAKEFEKIFAKFNIEVATLADFPEIGEIEETGTTFAENAALKAETVASVLNQTVIADDSGLIVDALDGAPGVYSARYAGVAHDDAKNNEKLLKNLEGVEPDKRTARFHCTLAVATPSEKTSFYTGEVEGVIAEQLCGTNGFGYDPLFFLPEFGLTMAEIPAEKKNEISHRANAIKQLEKDLVEVVEKVTKK

SEQ ID NO: 60763 - protein, 286 aa, Listeria monocytogenes
MEKIGFVGTGVMGSSMAGHLLEAGYEVLVYTRTKTKAEDLLDKGALWVETPGELANKVDILISMVGYPKDVEELYLGENGFLENLAVGTVAIDMTTSSPALAKKMAEFGREKGIGVLDAPVSGGDIGAKNGTLSIMVGGSEDVFLKVKPIFDILGSSVILQGDAGAGQHTKMVNQIAIASNMIGVTEAIIYAEAAGLNPSRVLDSISGGAAGSWSLANLIPRVLKDDFSPGFFIKHFIKDMGIAISEAKQMGLELPGLTLAEKMYQTLAEQGLSEEGTQALIKYYR

SEQ ID NO: 60764 - protein, 176 aa, Listeria monocytogenes
MTVEKWNVDPAHSSIEFQVKHMMVSKVKGAFSDFTADIEMDPEDLTSAKLNFSVAAASVDTRQAQRDGHLKSEDFFNVEKYPNVTFTATKITADGDDEYEVTGDLTIRDVTKPLTLEVSYEGTGKDPNTGNMVAGFEAKGKFNRKDFGLNYNAALETGGVLIGDEVKLNIQIEASK

SEQ ID NO: 60765 - protein, 425 aa, Listeria monocytogenes
MDLQLPRGTRDILPEEVSKWHFLETEFKNVCENYQYEEIRTPVFEHTELFERGVGDSTDIVSKEMYTFQDKGGRSLTLRPEGTASVVRAFVEHKLYGEVSQPIKMYYNEPMFRYERPQGGRQRQFTQMGIEALGSDDPSIDVEVISLAMEFFRKIGLTNIKLVINSLGDKESRLKHREALVAHFEPHIDEFCAECQVRLHKNPLRILDCKKDHDNPLIQSAPSILDFLNEESVAYFENVKNYLNALEIPFEIDPTMVRGLDYYNHTTFEIMSVEEGFGAKTTLCGGGRYHGLVREFGGPDTPGMGFGIGVERILLALEKADIEIPAKKPLEVYVITAQPEAELKGVTLVNKLRQNGISAEKDYLKRKFKAQLKDANRKNAVYTIILGEEELQTGNYQLKNMETGEQEAVSETTILEKLSNTKGEK

SEQ ID NO: 60766 - protein, 1711 aa, Listeria monocytogenes
MKSKFFIGMMTFLLSLICLTGMKAEAKSVGDISPDDISPEISDNRFQSAEGKVLPNFEVDMSISDQNNGKLSIDEDFELTSDGDIILIGTVQGQYIQGTPILNENGQLNKIPNRDQGIIMRVDRTTKKVEWARVVNYEDGNYNSQYAADKWFSSYKSITTNSSKSTFYVGGEVVNYYGDSGGGSTLIVKSIDANGNFQIAHKSYVSYGVPSRSDLTYAYFMDIQMEGNTLTMSASARYAAQGKQFIRYTLEPASLSITKNEFNPLDNTFWAKYQRTDVLKVDNKGLMAYNADVNGANQLKMSIRESENNYKEITLFDSVPEILANSSPYIFMEDRGDGNVFVVMSTPTTWYIALVNIASEQVVETKKMTMNSSTTLNSVIYSEGKGLLLGGSTHAEESIFGSEPLNKNNGYYLALGNDLNVTDSQILRTNQHNSLTTIINGVGNKVDGFFSYDGLNNDGYIQNVEYPNTYDVNPNGAMIFAEFNLQPAPVLDTGNPILAFYQGERRADFDELEGVKAYSGIDSSDVTKSITKNTFDLYTVGVQQQLYQIEYLPGSGNKTTGTRNVQLIHPLETPKLEKSYADSHGAFKVGEVVPANAIHAFNGLDSANNVTYVVTAVDDEKITVDASIKRTEGTKTAVINKEITLMTSTADETAVIDVTSVALAAGKYTSLTDVRNEGHFHIYAETMDSVSIDPKYVKLTEDPENPVDWNAPGVYYVTASLDPASGYTAKDVKVSVAVVDVGSPKVISVNMKPYNPTTALVVAEDDINGAGVYKINWAIKDANGLIIQQGVEESGATIRVQTPVPIDLSTLNDGNYTLSVSAADRIGHTSEASEKAFTVDRQAPVVTADDKITYEINTKKTEEEFLNDVNVKTEAGAVIKTNFDTMVRMDSPGDYTVLVEATDAAGNQSDPIYVIVTVEDTVAPIISADEAISYNQGNIRTEALFLTDIHATTDEPATITSDFADQVKFDTPGVYAVTLKANDISGNQAIPRTVNVTIKDVTAPVITADEAIIYEKGITKSATDFLTDIHATTNDGSAITSNFATVVDLNTPGDYDVTLSSTDTGGNISDPVTITVTVRDTTPPVITADTTITYEKGTTKTAAAFLTDVNATTNDGSAVTSNFNPISLKQVGTYQVTLSSVDENGNYALPVKVTVVVQDTQKPVISSSATSITYERGEKKQETGFFLDLAIKTDDGTPVTSDFDTAVNLDTAGTYTVTLNSEDESGNKADPVTITVTVADTEKPIITADTTITYAKGTTKTVAQFLTDIHATTNDGSTIISNFDPTVLAQEGTYTVVLNAKDESNNEADPVTVTITVVDTKGPIINALNAITYERTINKNEADFLADIEATTDDGSTITTDFNSKDLDTVGTYIVTLNAEDASGNKATPVKVTIKVEDTIPPIITADQSITYERGITKTEQAFYTDIKAATSDNSPISSDFSKIDLTKTGNYEVLLRATDQSGNKALPLKINVLVQDTIAPVIKTTSREITAERGTPMTEQQLLAKIGANTDDGSKITTDYNPAIVNTSGDYLVHLYAVDAAGNQAIPVEITIHVKDTTAPIIKADKKISYPVGTVKTVTEFLQDIHATTDDGSKITTDFDPNMLKTPGKYTIHLNAVDADGNKAKTIDVSLTVEEKVTPPKPPTPDDGGNNTNGSNGTNGSNTDITVNPTKQNTTATNESIPALGDTKSTIPVIVGMFLLATSLVLIRRK

SEQ ID NO: 60767 - protein, 601 aa, Listeria monocytogenes
MCGIVGYIGTNNAKGILLEGLEKLEYRGYDSAGIALQNKELVTVVKEKGRIADLASLVPSDAFGTTGIGHTRWATHGKPNHENAHPHQSKSGRFTIVHNGVIENYTLLKEEYLKNHSFVSDTDTEVIVQLIELFAAELSTKEAFKKALSLLHGSYAICLIDQTNTETLYAAKNKSPLLIGKGENFNVIASDAMAVLKETDEFVEIMDKEIVIVTKDGFTLETLEGEEITRASYKAELDASDIEKGTYPHYMLKEIDEQPAVTRKIIQAYQDEAGEINVDKTIIDEILSSDRIHIVACGTSYHAGLVGKNLIEKMAKIPVEVHVSSEFAYNLPLMSKKPLFIFITQSGETADSRQCLVKVKELGYRTLTLTNVPGSTLDREADHSMYLYAGPEIAVASTKAYTAQISVLAVLAVSLGREIGDEEALNINLAAELGIVATAMEAMVSSKEVIEHIAGEYLATSRNAFFLGRNIDYFVAMEAALKLKEISYIQAEGFASGELKHGTIALIEDGTPVLALITQESINWNIRGNVNEVLARGAKTCIFAMENVAQPGDRFVIPQVHPLLTPLASVIPCQLLAYYAALHRDCDVDKPRNLAKSVTVE

SEQ ID NO: 60768 - protein, 293 aa, Listeria monocytogenes
MIKSQKSFSGTSQGALYLVPTPIGNLEDMTFRAIRMLKEADIIAAEDTRNTVKLLNHFEITTRMTSYHQFTKENKEDNIIQRMLGGEVVALVSDAGMPSISDPGYELVQSALDANIPVIPLPGANAALTALIASGLAPQPFYFYGFLPRQNKERTQAIEKLAAREETWILYESPHRLKETLKAIIKITGNDRKIVLCRELTKRFEEFLRGTVEDALNWAMDEEIRGEFCLIIEGNSNPQLAEEQLWWQELDIKTHVSTVMEQENVSSKDAIKTVMKARNLPKREVYSAYHEIK

SEQ ID NO: 60769 - protein, 461 aa, Listeria monocytogenes
MEKKKKFRLFDAVLMAVCVVLVVESAAPAAAIGSSQFFWWIALLILFFLPYGLVSAELGTTYDDEGGIYDWVKRAFGRKWGARVAWLYWINYPIWMASLAVLFVEVITQIFPVSFGTPVSILIQLIFVWIVVIVSCYPVSDSKWILNIAAFCKVAIMLCLGVLGIYFAITKGLANDFSGKALLPTFDLESLSFISVILFNFLGFEVVTTLASDMENPKKQIPQAIIYGGILIAFFYLLAAFGMGAAIPTSELSTSGGLIDSFIMLIGGVNPFVIIIGIMFMYTLVANLVSWALGVNYVAMYAAKNKDLPAVFGKTNPKNDMPTGTSILNGIVASVLIVAAPLIPNENIFWAFFALNVVALLGSYILMFPAFLKLRKLDPDRERPFKVPGGKILLYLMTFVPMILLIITLIFSAVPLNGSSAELNEKIPILIGTIVAVIVGEICIWLAGKRKDKGEIKNEND

SEQ ID NO: 60770 - protein, 236 aa, Listeria monocytogenes
MEQMDAHQIISFIQNSKKATPVKVYLKGDLEKIDFPSDVKTFITGNAGTVFGEWAVVEPLLEANKANIEDYVIENDRRNSAIPLLDMKNINARIEPGAVIRDQVTIGDNAVIMMGASINIGSVIGDGTMIDMNVVLGGRATVGKNCHIGAGSVLAGVVEPPSAQPVIVEDNVVVGANVVVLEGVRIGEGAVVAAGAIVTKDVAPGTVVAGIPARELKKLDAKTASKTEIMQELRQL

SEQ ID NO: 60771 - protein, 539 aa, Listeria monocytogenes
MKKTIKITTSLLLSFACVFSIGDFTKPHTVEAEIVYSLTNPKPVNEIFTDPKLAQVVADWLKLPAATSSVTQTQLNTIKALHFDSKGVQSLEGVEYLKNLTQVFGYGNQVSDLGPLSNLTKLEVIQMPRNQISDLTPIANLTALMSLDFEFNNLQTIEPIKNLTNMLELNVSANPISDINAVKNMTQLEFLTLRDCEVSDLSPVENLSNMLMFWAGRNNISDITPLKNMSKLLGLSLFGNQIKDVSVIKNLTSLEDFDIKANQVSDISSLATSTTLETLTLSFNQIIDISPLKNLTNLTRLELENQTRALDAVEIDNPLILPAPVIDENGSRVQPSKVSHAGVYANGEITWEGLQSNYILNYEYALPVTIGSLTTTYSGKITQPLLEKPVDPVTPVDPVDPVDPVDPVDPVDPVDPVDPVDPVDPVDPVDPVDPVNPVDPVDPVDPVDPVDPVNPVDPVNPVNPDPVNPMKPVEPIIPVTLENQFTLVNQTISVNEEIATQPAKDIVKLPKTGESGMTSSLFGGLILTVTSAILLRKRK

SEQ ID NO: 60772 - protein, 589 aa, Listeria monocytogenes
MKKMGVKIGLCILLIMPFTISFSANVSAEENISIKAAQDVVNIPDPALKSYLNGLLGQPSTSDITEAQMDTITDVTISNASLTDLTGLDYAHNLTILHLTNTGVTDYSLVANIPSLTNLNISGSNLTTNSIPDLNGLTNVTNLNLSSGKLDNSALTKFNKLPNLTFLNLDNNPSITDFMPLKSLPNLASLFIQFCGVNDFRGIDSFPKLTNLAAFGQNVGSAILINSTIKSSALNYNEANQTIFVPFTLMTERSMNFDGYLFPFTTNTASSSTYFTLNGVQISGSRLSIDDTGVTVSGITKDFFDSITKMEYNAFYDNPAGSYNSPPNFNSYSVSSGTYDHYFDIDHSLTITNDSAISYGEQTTVTEEQFLKDVHAETDDGTPVTSDFNTIVDFSKPGVYTVTLNAENAAGLKATPTQVTVTILAKPVITADKSISYTKDTTKTEQQFLQDIAAKTSDGSKVTSDFDSVVDLAKVGTYKVTLNAVSADGLNADPVIILVNVVAGNEPPTPPGPGPDPTPDPTPNPNNPNINPNPDNGQSAKSEIASNPSNSEVNIALPNTGDASQATTVLIGIILAGVAILFFRKRKHS

SEQ ID NO: 60773 - protein, 248 aa, Listeria monocytogenes
MTRYKAIISYDGSGFYGYQVQPNTRTVQAEIEKALTKMHKGKTVRVTASGRTDTGVHAKGQVIHFDSELDITAEKFQKALQVMTPFDISFLTVEEVPDDFHARFGTVGKEYRYVVKRTKIFDPFSRNFALHYPYELDISKMKLASKRLIGEHDFTSFCSARTERDSKVRTLYSIDFYEEDDETLVIAFQGNGFLYNMVRILTGTLLDAGQGRISPDDISEALLARDRQKLISKTAPPQGLYLWRVDYE

SEQ ID NO: 60774 - protein, 721 aa, Listeria monocytogenes
MKLNFRKKKKDSTKKKRAIIPLRLNILFFIIFILFSVLILRLGIVQIVQGDTYKRQLEETDNVTVSKNVPRGSIYDRNYNLLVGNSAVKSITYTRSQQTQTAETLHVAQTLEKLITVEPEKLTDRDLKDYWILTHQTESLNRLSAKEQALDSSKAYKIQVDKVTKEDIASLTSEDLKVATIYKKMTTGYAMTESVVKNKDVTDEEIARVSENMDSLPGVDTTTDWNRYYTYDETLRSILGSVSTAKEGLPKDKAEYYLSQGYSRNDRVGKSYLEAQYESVLAGSKSQSESVLDSKGNIIETVNKYEGSKGKDLVLSVDVEFQKAVEEILQKNIKQGKQYAGSDLFDRAFVVAMDPYSGEVLALAGQKLNDKGEFEDYSLGTFTTAYAMGSAVKGSTILGGIMDGAITNKTVFTDQPIVLKGTKPKSSWFNRTGAGNRPLDPVGALEISSNSYMYQVAMKMGGANYVPNGPLRAPLSTFDDMRYYYNQFGLGVKTGIDLPGEQTGYKGDDQTIGKILDFAIGQYDSYTPLQMAQYVSTIANGGSRIAPSMVKEIRNPSTNGDSVGTLATANEPKVLNKIGVSESDIKTVQQGFYEVTHGSTGTARTVFTSSDYDVAGKTGTADAFYDGPKEGNKMASVWNTTFVGYAPVEKPEIAISVVVPWIYRPYGTDQKTNMKISKEVFDKYFELKKERSESKKDTSKVEQPINNKEAAAKAQSEQTEN

SEQ ID NO: 60775 - protein, 218 aa, Listeria monocytogenes
MGQKVHPIGMRIGVIRDWDSKWYAEKDYADFLHEDLRIRDYVAKRLSDASVSRVEIERAANRVNITIHTAKPGMVIGKGGSEVEALRKNLNELTQKRVHINIVEIKRADLDAKLVAENIARQLEGRVSFRRAQKQAIQRTMRAGAKGIKTQVSGRLGGADIARAEHYSEGTVPLHTLRADIDYAWEEADTTYGKLGVKVWIYRGEVLPTKKNNVEGGK

SEQ ID NO: 60776 - protein, 363 aa, Listeria monocytogenes
MKVAISGGGTGGHVYPALALIRELKKSHPEAEFLYIGTEKGLEAGIVKREGIPFEAIEITGFKRSLSLENIKTVMRFLSGAKKSKQILRDFKPDVVIGTGGYVCGPVVYAAAKLKIPTLIHEQNSVAGLTNKFLSRYTDKVAICFEEVSDSFASEKIVFTGNPRASEVVGVDSEGALEAYGLVSGKPTVLVFGGSRGARGVNEAVEAVLPEWNNRDFQLLYVTGDVHYEKIKDSLAELNLGNHISVQPFIYDMPKILNAVTLVVSRAGATTLAELTALGVPSILIPSPYVTANHQENNARALEKNNAAIVITEAELKNTDLMATVDSILNDEAKLNSMKLSAKQMGRPDAAAKLVEAVLSIMK

SEQ ID NO: 60777 - protein, 467 aa, Listeria monocytogenes
MVVGDFPEERDTIVIGAGPGGYVAAIRAAQLGQKVTIIEKEYYGGVCLNVGCIPSKALITIGHRFKEAGHSDNMGITADNVNLDFTKAQEWKGGVVNKLTSGVKGLLKKNKVEMLEGEAFFVDDHSLRVIHPDSAQTYTFNNVIIATGSRPIEIPGFKYGKRVLSSTGALALTEVPKKLVVIGGGYIGTELGGAFANLGTELTILEGGPEILPTYEKDMVSLVKRNLKSKNVEMVTKALAKSAEETENGVKVTYEANGETKTIEADYVLVTVGRRPNTDEIGLEQAGVKVTERGLVEVDKQGRSNVSNIFAIGDIVPGVPLAHKASYEAKIAAEAIAGEKSENDYTALPAVVFSDPELATVGLTEKEAKEKGFDVKAAKFPFGGNGRALSLDAPEGFVRLVTRKEDGLVIGAQVAGMNASDIISEIGLAIESGITAEDIALTIHAHPSLGELTMEAAELALGRPIHM

SEQ ID NO: 60778 - protein, 622 aa, Listeria monocytogenes
MADSKSFTFELNESVLTAQVGRLDEMAMVVEQRFSELKMTIEDVGNADPGSKISESLGGLQSGLGTISSAFGQLGSSSEAITSGFGTAVGSVGGITDAFKNLGSSVQNGTLFSSLATGIGGMSTMLGGVSGGVQGITNLASGFMELKNHLGGLMSSIGGVGGIMGKLTSPMGLVIIGIVALVAAFAYLMTTNESFRNTVMSVVTQVAQLFGQLVASLMPIIMQIVTAVMQIGAALMPMVMQFISFFAQLLAQLMPFINMLISMLMPVIMQIVQVVMSLVSALLPSIMTVIQGIMSVIQFLIPIIMQIATVVVQIVVTIISYISKIMPIVMTIIGVIVSIITTIISYVVIIATTIASVIGKIISFIASVITAVIGIVQPIIAFITNIFTTIVTIIGAAFQMVFTVASKIWNSIMSTISGIIDGIKAVITGISTTVSSVFNGVKRIITGVFDGIKSAWGGLTDFVGNIFDGVSSAIQTVVDNVKGFVNVVIRGINGAIGLINKIPGVEIGKIPQLISGTTNFQGGFARMNEGGRGEMVVLPSGSQVIPHDATMKYARESARGNKSMLYTSQGADLARVENLLERLLQKNPVIKMDDKVVAEVVSRNQANSFDQYNYTMGGAAYS

SEQ ID NO: 60779 - protein, 300 aa, Listeria monocytogenes
MIQEGKLEQQFFDYLHSERNYSVNTSTAYENDLLDFRRFLNEQAITTYQQVTFLDVRIYLTELKQKSFSRTTVARKISSLRSFYTFLLRENVINENPFTYVSHAKNQLRLPKFFYSEEMEALFQVVYEDNETLTLRDRVLLEVLYGTGIRVSECAGILLPDLDTSYQAILIRGKGNKERYVPFGAYAEDAITDYLPERVNLMSRYKKSHDALLVNHYGDPLTTRGIRYCLTKIISKASLTRKIHPHMLRHTFATDLLNNGADMRTVQELLGHASLSSTQIYTHVTKEHLKSTYMKHHPRA

SEQ ID NO: 60780 - protein, 224 aa, Listeria monocytogenes
MFIHGFQEEVGNLWQETLRHPFVRSLADGTLEKEAFYYYLLQDDYYLSHFEKVIEKSVEQAGTAELAAEMREVQVRLQQSELLMREQFYPRVGLTERDFSERKPAPTAYHYTSHLHRMVDFGSFGVTIAALLPCYALYADIGKMYEGARSSEPFYQELLDSYVDENYQKVVLQQKRLVEQAASMADARELALMKQAFQISVEMEWAFFDMAYKKQNWRGSVNYV

SEQ ID NO: 60781 - protein, 247 aa, Listeria monocytogenes
MDKTKRKMIYETFMLILILLSLALLPYRNNFTFILNWIIWVIFTLDYLVRLYRADNKWHYVKTHPFQLIAIIPFYGGFRAARIVSFVHLLSITAMGRRYIVPIYSFFRSNGLNRFLMIFVLLVIIIPVPMVFIEPEINNYPDALWWAIVTATTVGYGDIVPVTPIGRILASIMMLFGIAFIGMITSTITNFFRAKKPTNSSTQRANKITQLISETPDLTKEEIAVVEQFLTLRKKELADENTKSDSE

SEQ ID NO: 60782 - protein, 255 aa, Listeria monocytogenes
MQRYFVTSELENDNDTLAITGENFHHIARVMRMKESDQVFIVFPSKKTCIAAITAINEEEVLLNLVKWLEEDTELPIEITIASGLPKGDKLELIIQKSTELGAHKFISYKAERSVVKWDDKKVIKKIERLQKIAQEAAEQSHRTIIPEVHYAASFKELMFGHVHYDFVIAAYEESAREGEDSALASLFQTMKPGQSVLCIFGPEGGISEKELLLLEEANAKLAGLGPRILRTETAPLYVLSAASFYFDLYKNKNR

SEQ ID NO: 60783 - protein, 294 aa, Listeria monocytogenes
MMNKENPLNKYHTGKFEKQRQDYPGLQSKMTPVPDTGESSYQGANKLTGKKAFVTGGDSGIGRAAVIAYAREGADVAINYHPDEEVDAQEVKAIVEEAGQKCVLLPGDLRKEGLAKDLVKKAYNELGGLDILVLNAGLQQYQLDIQKLPAEQLRDTFEVNVFSVVFAIQEALNYLKAGASIILTSSIQGVKPSAHLVDYAMTKSSLISLTKSLAAQLGEKGIRINAVAPGPIWTALQISGGQPQDSIPEFGQDQPLGRAGQPAELASAYVLLASDEASYTTGQVYGITGGAPIN

SEQ ID NO: 60784 - protein, 371 aa, Listeria monocytogenes
MASKTKKAIIDVKKQFEAVHKQFELVQILNEKGEIVNPDLMPDLTDDQLVELMTRMVWTRVLDQRSISLNRQGRLGFYAPTAGQEASQLASHYALEKHDYILPGYRDVPQLIWHGLPLTKAFLFSRGHFVGNQFPEDLNVLSPQIIIGAQIVQAAGVALGLKKRKKDAVVITYTGDGGSSQGDFYEGMNFAGAYHAPAIFVVQNNKFAISTPREKQSAAETLAQKAVAAGIPGVQVDGMDPLAVYAVTKFARERAVAGEGPTLIETMTYRYGPHTLSGDDPTRYRTKELDGEWELKDPIVRFRTFLEGKGLWNEEKENAVIDQAKEEIKVAIKEADATPKQTVTDLLKNMYETPTAPIKEQLAIYEAKESK

SEQ ID NO: 60785 - protein, 179 aa, Listeria monocytogenes
MNRLKDQYLKEIVPALMSKFNYDSVMEVPKIDKIVINTGVGDATANAKVLDSAVEELALITGQKPVITKAKNSIAGFRLREGMPIGAKVTLRGERMYDFLDKLVTVSLPRVRDFRGVSKKAFDGRGNYTLGVREQLIFPEIDYDQVSKVRGMDVVIVTTAKSDEESHELLTQLGMPFQK

SEQ ID NO: 60786 - protein, 102 aa, Listeria monocytogenes
MYAIIETGGKQIKVEAGQEIYVEKLAGEVGDVVTFDKVLFVGGDSAKVGVPFVEGATVTAKVEKQGRAKKLTVYKYKPKKNYHKKQGHRQPYTKLTIDAINA

SEQ ID NO: 60787 - protein, 172 aa, Listeria monocytogenes
MEKMYNVGKIVNTHGLIGEIRVIATTDFPEERFQVGNTVYLFEKNSKKPEKLIIRSHRKHKNFDLLMFEGFTGIHQVERMKEGVLKIKETQLTNLEENEFYFHEIIGCTVVTTDGEELGEITEILTPGANDVWVVKGADKKEKLIPYIADVVKEINIDDQKITIEVMEGLLD

SEQ ID NO: 60788 - protein, 907 aa, Listeria monocytogenes
MRITSIDIIGYGKWSDAHFNNIANFQVFYGENEAGKSTIMAFIHSILFGFPTKQQSIPRMEPKNGGPYGGRLTLEDTSFGKVIIERLKGKATGDVRIYYGDGQTAGEEKLPEIIGEIDRNTYEAIFSFDIHGLQNIHQWKKKEFERYLLATGTTGSDALLKTAETLQKKLDSLYKPSGRNPLINQQLKRVKEAQQAFQNAKKQNAQYEELINEKEQATARQAELQIEKTTKRVELDTLETLGDLWPLYQEWKALSNKASQKKEATFPPDGIIRLEHLQLREKEWQNQLIQLEERKKNLISNNDYEHSAFFAKNEAEITYLIETYAAFGEREIQLKNLKQEINFHQVDSKQTFRVWTSELEQTMARLKEKEQFHKEQQHEIQLKLKLTNDTEEKLQKKIDQIEMDMWDNRTFQQAKEKMQQKPKTFRTKTFVSFGVFAVALSLMIVFQSIWSVALVFVSALIVGYAIMTTWKALPTNNEQLLVFLEQKKIRQEWQQLLNEMDIIASQIAELRATENKLNETIYQHTMELKQLFSDLGIKHNPDANWAYELAVYKKNSEKAQLAMELISKLEPLAEKQEVYKARLANLELPGKYTDTEEKITFLRQGLLYYRNHLTENAKLAEKLEQVTMQLDLVKQDLLLIKKEKADLLASANAKNEEEFRMAAIRVKEEQNWRERLVLIEAQLEPEKRIALNQYENQATIKEKELQLEETLRQIELEQEKIHASLAAQNHAIHKLEEGGTFAVLMQEFYSEKSKLQQIAAEWTETKLALQILQDTMQRLQEGKLPKTLKLASEYFNHLTNGNYDKVYLQDNRLQVESKNVVPFFPEELSQATKEQLYLAIRFALIDVIHKDFPLPIIIDDGFVHFDSARMGQMMQLLRKRKSENQVIFFTCHQETRKYFSSEDIRML

SEQ ID NO: 60789 - protein, 359 aa, Listeria monocytogenes
MYQMKNKLQVKIPGKLYVAGEYAVVESGHTAILTAVNRYITLTLEDSERNELWIPHYENPVSWPVGGELKPDGEHWTFTAEAINIATTFLKSEGIELTPVKMIIETELIDQSGAKYGLGSSAAATVAVINALMTKFYPEISMLKKFKLAALSHLVVQGNGSCGDIASCMYGGWIAYTTFDQEWVKHRLAYKSLEWFMKEPWPMLQIETLEEPVPTFSVGWTGTPVSTGKLVSQIHAFKQEDSKNYQHFLTRNNEIMKQIIQAFHTKDEELLYSAIKENRRILQELGTKAGVNIETSLLKELADSAENMGGAGKSSGSGGGDCGIAFSKTKELAEKLVNEWEKLGIKHLPFHTGRVQITE

SEQ ID NO: 60790 - protein, 263 aa, Listeria monocytogenes
MRVAVSGFKGRMGHEVVKTVLREADLELVAVLDHEPKEKNINEMVEFSSLDVPVFGNLSEMLEEIKPDCVVDFTTPKVGYSNTKTILEHGVRAVVGTTGFTPEQISELRTIAESKKIGALIAPNFAVGAVLMMQFAQKAAKYFPNVEIIELHHDNKLDAPSGTGVKTAEMMAETREFVKQGAADEVELIEGARGAEYEGMRIHSVRLPGLVAHQEVIFGAEGQGLTIRHDSYDRISFMSGVALSVRKTKELETLIYGLENILD

SEQ ID NO: 60791 - protein, 396 aa, Listeria monocytogenes
MEKNIETKKINLALLVCLVGFPQISETIYTPSLTEIAKGYGVSLNLAQMTLSIYFLAFAVGVFFWGVSSDFLGRRKAMNFGIFIYILGCFACLFSNNITMLFIGRFVQAFGASTGSVTTQTILRDNYHGNDRHHLFAKISAALAFSPAIGPLIGGFIGQYYGFRVVFLFLVVMGMILLFWSLKRLPETKTVNATSFSVQKIVVIGKKMIFDRYTIAFGALIGIFNGILFSYYSEAPTIFIERFHLNQSQYGFMGCAVAMATILGAWLSNWRLMQNSPHKIIKEGILLAIIGTLALSVVAIFPLTNQVILYILFISIILAGIGMALPNCLSLALVKFQEAAGTASAFLSLGYYVIVSLCTFFIGVLHSGSMLVFPSFCLVLLLIALLCIKIATRNNR

SEQ ID NO: 60792 - protein, 688 aa, Listeria monocytogenes
MSKDFLLEIGLEEMPAQYVTSSVLQLEKRVTDWLTENKIEFGEIKTYSTPRRLTVLVEGMAEEQANRVEEAKGPAKKIALDEEGNWSKAALGFAKSQKVDPADLTFRDIKGVEYIYIKKEVIGEKTSTLLPSLEKVVTSMTFPVSMHWGSNDLRYIRPIKWLIAMFDEEIIPFEITGVTTSNTSRGHRFLGKSATIKQPSDYPNALLEQFVVVNAEERKQAIVEQLRELESMENWQIKEDDDLLEEVTNLVEYPTVLSGNFEKEYLELPEEVLITTMKEHQRYFPVFSQAGELLPHFVTVRNGNHENLDTVARGNEKVLRARLSDADFFYQEDLKMTIDEAVAKLQNIVFHEKLGTLTEKMKRVQKVALMLADYLDWQEEDKQDIIRLTNIYKFDLVTNIVGEFPELQGLMGEKYALLQGEKPAIATAIREHYLPNSAEGELPQTDLGSLIAIADKLETLIGFFCVNIVPTGSADPFGLRRSAFGAMRIIQANGWNIPMLEVISRIVDMERAEGSTELPDADVKKEVQTFLKNRLRVILQGHHIRHDIIDAVIGGDPNVIPQLIDRAQILNEHAEAEWFRPTIEALSRVVKIAKKYEDGVEVDPALFENEYEQALFDKLEKLKFDYAGLTIIERLKAFADLRTTIDAYFDNTLVMSDNDELKNNRLALLFELASFIKEFAQMDEINVK

SEQ ID NO: 60793 - protein, 287 aa, Listeria monocytogenes
MTIQWFPGHMAKARREVTEKLKLVDVIFELVDARIPLSSSNPMLEEIIHQKRRVIILNKADTADEKTTKEWIDYFAEKGLPAVAVNAQEGKGLFKIEQAAEKLMAEKFDRLRSKGMKPRAIRAMILGIPNVGKSTLINRLAKKNIARTGNKPGVTKAQQWIKVGKTLELLDTPGILWPKFEDQEIGYKLALTGAIKDDLLQMEEIAGYGLRFLENHYPDRLQTWLKVETVSEDPIETLAFIAEKRGLLDRYNDPDYSRAAETVVREIRQQKLGRMSFDFPNWEDEVE

SEQ ID NO: 60794 - protein, 133 aa, Listeria monocytogenes
MISGLSHITLIVKDLNKTTTFLREIFNAEEIYSSGDQTFSLSKEKFFLIAGLWICIMEGDSLQEQTYNHIAFRIQSEEVDEYIERIKSLGVEIKPERPRVEGEGRSIYFYDFDNHLFELHAGTLEERLKRYHE

SEQ ID NO: 60795 - protein, 131 aa, Listeria monocytogenes
MFTINTKSQLPIYEQIVQKIKEQVVKGVLQEGEKILSIREFASRIGVNPNTVSKAYQELERQEVIITVKGKGTFIANQTDKLSSPKKLAETRTKLKETILDLVYLGVNIEEIHKLADEYSQDIIGGDVVEG

SEQ ID NO: 60796 - protein, 435 aa, Listeria monocytogenes
MTKKSRFDQFGFQPFIGLAIDKLGFYEPTEVQQKLIPGILKGESIIGQSQTGTGKTHTFILPIINNVNPEKDAVQAVITAPSRELATQIYNEIRKVTKYSEKEIAVQLVIGGTDKQRAIDKLKKQPQIIVGTPGRINDLIREQALFVHTAKTLVIDEADMTLDMGFLNDVDHIAGKMPANLQMLVFSATIPQKLKPFLSKYMENPRYEHIQPKVAASKTVEHRIMATRSRNKLDLLKNVLVGSQPYLAIVFTNTKTTADEVANGLIERGLKVAKIHGDVNPRERKRTMKQIENLDYQYVVATDLAARGIDIQGISHVVNYELPDDLDFYIHRTGRTGRAGHSGIALTLFEPADEDRLNQLEKMGIEFKHVDWKNKEFVTLEDRNRRAKREAKRETADPREIGMRKKAKQKGKPNYKKKINYKMNEIKRRERRKKR

SEQ ID NO: 60797 - protein, 89 aa, Listeria monocytogenes
MALTQERKNEIIAEYRVHDTDTGSPEVQIAVLTAEINSLNEHVRVHKKDHHSYRGLMKMVGHRRNLLTYLRKKDVQRYRELIKRLGLRR

SEQ ID NO: 60798 - protein, 233 aa, Listeria monocytogenes
MRLDKLLSHTGFGSRKEVKPLLKSGAVVVNGTIQKDSKTQVNPDKDQITVHGTPVVYQEFVYFMLHKPQNVVSATEDNVSETVIDLLAQEDTLTDPFPVGRLDKDTEGLLIITNDGTLAHNLLSPKKHIDKTYYAKIDGDVTAEDVEAFAAGIELDDGYTCKPARLEIITPNEIKVTIQEGKFHQVKRMFAARGKSVSYLKRISMGNLQLDESLALGEYRPLTEAELAILQNK

SEQ ID NO: 60799 - protein, 343 aa, Listeria monocytogenes
MKAVVKTNPGYDQMELKDVEEPQVYGDKVKIKVAFTGICGSDIHTFKGEYKNPTTPVTLGHEFSGVVVEVGPDVTSIKVGDRVTSETTFETCGECIYCKEHDYNLCSNRRGIGTQANGSFAEFVLSREESCHVLDERISLEAAALTEPLACCVHSALEKTTIRPDDTVLVFGPGPIGLLLAQVVKAQGATVIMAGITKDSDRLRLAKELGMDRIVDTLKEDLAEVVLGMTGGYGAERVFDCSGAVPAVNQGLPLTKKKGDFVQVGLFAEKKNAIDEESIIQREIAYIGSRSQKPSSWILALDLLANGKIDTDKMITKVYGLDDWREAFEAVMAGNEIKVLVKS

SEQ ID NO: 60800 - protein, 399 aa, Listeria monocytogenes
MNKYFKNLATILFTVSVLTTSIIASPAMASAYEESHNVSTIYTSPLDTPHVGDTKITGKTTPLSSFSIAIYTSEGRLTGTFFGTTNTDGTYSVDLSDFTVYHPSGYVTTGKVIYEENSFVRSGTETGGDKVIKVTVSYDYIQTAINELFLNNNPTGTILTITDQNAINAVQEQINTVTSSEKESFQEQLNNAQQQLDARIAQEQAAIQAVNQLFLEDSPVNSIKAETTQDLIDQAQTLVDVLPASELKDTLQANIVKAQTELDERSKPVTPPKNDPEPDNPEEPVTPVDPATPIPDEPSTPTDPATPEKPEITTPENPESTVVEADSSENEPEKSADSKIVNNPIQITSQATKTATKQAKSSATKTTLPLPKAGDTETTSSILFGTLMLSSLVLFKRKK

SEQ ID NO: 60801 - protein, 691 aa, Listeria monocytogenes
MNRFFRNAIFYVIIFLVIIGIVASFNSNKEAAKDISYSEFVSKLEDGKVKSVEIQPDRSVYTINGEFKSSDKSSDDKKTGLGQSKTSSTAFTTYALNSDTSLGDLQKTLDKEDVKMNVVPAKQNSGWVTFLTSIVPFVIIFILFFFLMSQSQGGGGGKVMSFGKSKAKLYNDDKKKVRFTDVAGADEEKQELVEVVEFLKDPRKFAELGARIPKGVLLVGPPGTGKTLLARAVAGEAGVPFFSISGSDFVEMFVGVGASRVRDLFENAKKNAPCIIFIDEIDAVGRQRGAGMGGGHDEREQTLNQLLVEMDGFGGNEGIIIIAATNRADVLDPALLRPGRFDRQIMVDRPDVKGREAVLRVHARNKPLAKSVDLKAIAQRTPGFSGADLENLLNEAALVAARSDKKEIDMSDLDEASDRVIAGPAKKNRVISEKERRTVAYHEGGHVIVGMVLDEAEVVHKVTIVPRGQAGGYAVMLPKEDRFLMTKAELMDRITGLLGGRVAEEVTFGEVTTGASNDFERATELARRMVTEWGMSDKIGPLQFTSGNGQVFMGRDFGSDKGYSDKIAYEIDTEVQSLIRYCYDRAKTIITEHQEQHKLIAETLLKVETLDARQIRSLFDDGVMPPDIDTIDVEAEYPSEKDEEVAGKSFEEEREELKEEEKVEETQEEPKEVTSEDAPNIEQTPNDKKDE

SEQ ID NO: 60802 - protein, 272 aa, Listeria monocytogenes
MINQNLYYQSVANSKPIEIYLFFDPACDDCWNIEANMLRLQMEYGNYFKLRYVLHNNLQTFVCKQKRAGNSNLSLKEQQIGAHLSYISCLAVKAAELQGKKQGITFLRKIQAAYFLENKDIASDEVLYDIAVSTGLDLSEFKKDLASTVAKRAYIGDQKVAQEMEIHENPTVVFFNKNIEDAGLKLSGLHRYEVYVHVLSELLNDAPQPEERPQMEEYLAKVKVTSSASMADFYGVSEQQIERQMKKWRLQQKVELIDAPAGQSHWKYIGNL

SEQ ID NO: 60803 - protein, 223 aa, Listeria monocytogenes
MTIAKMIDHTALKPDTTKEQILTLTKEAREYGFASVCVNPTWVKLSAEQLAGAESVVCTVIGFPLGANTPEVKAFEVKDAIQNGAKEVDMVINIGALKDKDDELVERDIRAVVDVAKGKALVKVIIETCLLTDEEKVRACEIAVKAGTDFVKTSTGFSTGGATAEDIALMRKTVGPNIGVKASGGVRTKEDVEKMIEAGATRIGASAGVAIVSGEKPAKPDNY

SEQ ID NO: 60804 - protein, 399 aa, Listeria monocytogenes
MAKNRHLFTSESVSDGHPDKIADQISDAILDAIISKDPDARVACETTVTTGLVLVAGEITTSVYVDIPKIVRDTIKEIGYTRAKYGFDAETCAVLTAIDEQSPDIAQGVDEALESRSGNEIDAAIEAIGAGDQGLMFGFATDETEELMPLPIFLAHGLARKLTELRKTNKLDYLRPDAKTQVTVEYDEFNQPVRIDTIVVSTQHHPDITQEQIAKDLHTYLFPEVIDASFLDEDTKYFINPTGRFVIGGPLGDAGLTGRKIIVDTYGGYARHGGGAFSGKDPTKVDRSGAYAARYVAKNIVAAGLAKKVEVQVAYAIGVARPVSISIDTYGTSDYSEQELIDGVNALFDLRPAGIIHMLDLRRPIYRQTAAFGHFGRSDLDLPWERTDKAEALKKLIVK

SEQ ID NO: 60805 - protein, 450 aa, Listeria monocytogenes
MTHIKFDYSKALRFFEERELDYLEPAVKAAHDSLHNGTGAGNDALGWINLPTDYDKEEFARIKKATEKIHSDSDVLIVIGIGGSYLGARAAIETLNHSFYNVLEKGARKTPQVFFAGNSISSSYLHDLIEVVGDRDFSVNVISKSGTTTEPAIAFRVFKELLIKKYGEEGAKKRIYATTDKAKGALKTLSDNEGYETFVVPDDVGGRFSVLTAVGLLPIAVSGVDIDALMNGAAAASKDFDKPELKNNIAYQYAAARNVLYRKGKVTELLISYEPGLQYFNEWWKQLFGESEGKDKKGIYPSSANFSTDLHSIGQYIQDGRRNLFETVIKVDKPRHNLTINKEDVDLDGLNYLAGETVDFVNTKAFEGTLLAHTDGEVPNFVVEVPELDAYTFGYLVYFFEKAVAISGYLNGVNPFDQPGVEAYKANMFALLGKPGFEDKKAELEKRLND

SEQ ID NO: 60806 - protein, 156 aa, Listeria monocytogenes
MKQEELDIILENHGKWLFNEGGDRADLSNADLKNTNLRFANLRLADLRGADLSYANLRFANLSNADLSYANLSNVNLNWVNWQHVEGLTVICVQVDTTRKNNQIAYIKELDIWITGCFQGTLDELKASVEQTHGDNEKLRKRYYRVIDFILKEVAE

SEQ ID NO: 60807 - protein, 97 aa, Listeria monocytogenes
MKHDQPIVPRKEDETKLLQNRLRRIEGQIRGIAQMVEDDRYCTDILVQISAANKALKNVGLQVLEHHTAHCVVDAAKNGEDDVMEDLLKAIRQFSKT

SEQ ID NO: 60808 - protein, 146 aa, Listeria monocytogenes
MKLHELKPSEGSRKERNRVGRGTGSGNGKTSGRGHKGQKARSGGGVRLGFEGGQLPLFRRIPKRGFTNINRKEFAIVNLDVLNRFEDGTEVTPELLVETGIIRNEKSGIKILSNGNIEKKLTVKANKFSAAAKEAIEAAGGKTEVI

SEQ ID NO: 60809 - protein, 249 aa, Listeria monocytogenes
MAEVHFVGAGPGDKELITLKGYQLLKEADVVIYAGSLVNPELLEYCKASCEIHNSASMNLIEIIDCMEAGVTAGKEVVRLQTGDFSIYGSIREQVEEMKKRSIPFTCTPGVSSFLGAASSFGVEYTVPEVSQSVIITRMAGRTPVPSRESLRSYAAHQTSMVIFLSVQGIRKVVSELIKGGYKPETPAAVIYKATWAEEKKVTGTLEDIAEKVTEAGITKTALIMVGDFLGEEFYYSKLYDKDFKHEYR

SEQ ID NO: 60810 - protein, 458 aa, Listeria monocytogenes
MAQTSTIQNDTKAAEEYAARVFETIKQRNPGETEFHQAVEEFLNSVIPALAKEPKYEANGILEQLTEPERLISFRVPWVDDSGTVHVNRGYRVQFNSAIGPYKGGLRFHPSVTGSIVKFLGFEQIFKNSLTGLPIGGGKGGSDFDPKGKSDSEVMRFCQSFMTELQKHIGPDTDVPAGDIGVGGREIGYLFGQYKRLRGAYDAGTITGKGLSYGGSLARTEATGYGLVYFTVEMLEAAGETIRGKKIVVSGSGNVAIYAIEKAHELGAKVVACSDSAGFVYDKEGIKVETVKQLKEVERKRISEYTTIHPSAEYYAGGDVWSVPCDIALPCATQNEINADQARALVKNGVIAVAEGANMPSTLDAVDIYHENKVLFGPAKAANAGGVAVSALEMAQNSTRMSWTFQTVDEHLQNIMKDIYKNSSNAASEYGAPGNLVIGANIAGFLKVADTMISQGII

SEQ ID NO: 60811 - protein, 247 aa, Listeria monocytogenes
MTLQGKVAVVTGGSRGIGRDIAINLAKEGANIFFNYNGSPEAAEETAKLVAEHGVEVEAMKANVAIAEDVDAFFKQAIERFGRVDILVNNAGITRDNLLMRMKEDEWDDVININLKGTFLCTKAVSRTMMKQRAGKIINMASVVGLIGNAGQANYVASKAGVIGLTKTTARELAPRGINVNAVAPGFITTDMTDKLDEKTKEAMLAQIPLGAYGTTEDIANAVLFLASDASKYITGQTLSVDGGMVM

SEQ ID NO: 60812 - protein, 294 aa, Listeria monocytogenes
MANITAQMVKELREKTGAGMMDCKKALVETEGDMEKAIDYLREKGIAKAAKKSDRVASEGMTHVISNEKHAVVLEVNAETDFVAKNDNFQQLVDALAKQILAVRPDSLEDALKTEMPNGQTVQDYITEAITKIGENISLRRFEVKEKADNSAFGEYIHMNGRIGVLTLLEGTTDTTVAKDVAMHIAAINPKYISREDVSSEEVAHEKEVLTQQALNEGKPANIVEKMVEGRLKKYLSEISLEDQPFVKNPDITVGEYVKQSGGKVVSFVRFEVGEGIEKKEDNFVEEVMSQVKK

SEQ ID NO: 60813 - protein, 379 aa, Listeria monocytogenes
MAKIKVMSIFGTRPEAIKMAPLVLALEKEPETFESTVVITAQHREMLDQVLEIFDIKPDIDLDIMKKGQTLAEITSRVMNGINEVIAAENPDIVLVHGDTTTSFAAGLATFYQQKMLGHVEAGLRTWNKYSPFPEEMNRQLTGVMADIHFSPTKQAKENLLAEGKDPATIFVTGNTAIDALKTTVQKDYHHPILENLGDNRLILMTAHRRENLGEPMQGMFEAVREIVESREDTELVYPMHLNPAVREKAMAILGGHERIHLIEPLDAIDFHNFLRKSYLVFTDSGGVQEEAPGMGVPVLVLRDTTERPEGIEAGTLKLIGTNKENLIKEALDLLDNKESHDKMAQAANPYGDGFAANRILAAIKSHFEETDRPEDFIV

SEQ ID NO: 60814 - protein, 222 aa, Listeria monocytogenes
MNHWEDFLAPYKQAVEELKIKLKGMRSQFELENNHSPIEFVTGRVKPVASILDKANQKHIALDHLVEEMQDIAGLRMMCQFVDDIEVVVRLLRQRNDFRIVEERDYITNKKPSGYRSYHVVIEYPVETIQGEKKILAEIQIRTLAMNFWATIEHSVNYKYQGEFPEAINKRLKRAAEAAFQLDEEMSQIREEIQEAQVYFSQNKDVSKDKKAVHQVMPKKNK

SEQ ID NO: 60815 - protein, 209 aa, Listeria monocytogenes
MTKGILGRKVGMTQVFTENGELIPVTVIEAAQNVVLQKKTVETDGYEAVQIGFEDKRAILSNKPEQGHVAKANTTPKRFIREFRDVNLDEYEIGAEVKVDVFAEGDIIDATGVSKGKGFQGVIKRHGQSRGPMAHGSRYHRRPGSMGPVAPNRVFKNKLLPGRMGGEQITIQNLEIVKVDVEKNVLLVKGNVPGAKKALVQIKTATKAK

SEQ ID NO: 60816 - protein, 896 aa, Listeria monocytogenes
MRKVYEIFILDWRRLFKAPLALLLVIALIILPSLYAWFNIEALWDPYSNTSGIKVAVSIDDEGAEIDVPGKKPQQVNVGNQLKKTLEKNKKLGWTFVSEDEAKKGVKSGKYYASIHIPKDFSEDMVSVVNDNVTKPTIDYSVNEKINAIAPKMTESGATTIVNQISSEFVGTVSKAVLEEFNKAGIDLENELPTIRRLKTKVFQVQDALPELKKMGAEAVKIEAKLPELKAKANQVVELNEKIPELNKATENVLLVEQQLPKIDQLGQDILVLQKKIPEIKQIAESVKEVDENFGTIKKTVNDAVNESGKALDVIDTAMAAIPTVEKIAQNGSGYVDKVSDFADEINKSFDTLAPAIKQNLTLMKQMADNIYQVTEAIKNGSITPEQAITELKKMEQDIDSLQQMITKQTATLESLNETLPNKPFTDLIANLKTINSQLGAQKETITKVRTELENGAQPSEELLNQLNEQAKNVSEKLDQILANYDSEIVPAIKVGLNQIQGDLKDSQKLLETLQAKIPEITQVLKDSRETLQTGQTYLEEFQERLPEIQKTLDEATKVINTKLDTIIAGINEAANFYQNDYPNVKANIKKAANFIRDDLPGLEKEINQASGLIQEKMPEFEKAIKIAADLSREELPEFEKAINNAANKITDFDKNYDLQSIIKMLRNDADKDSSFIASPVKLKETSYYPIPNYGSASSPFYTALCLWVGALLLISLLRVDVEVPAGIFSHYHRYFGRLLTFLSIGLMQALIVTLGNIFLLGVSIAEPLLHVLFSMFISVVFMTIVYTLVSLFNNVGKGIAIILLVLQISGAGGNFPIQVSPPFFQAIYPFLPFTYAVSLIRESVGGLYMPTVWIDMSVLAGFAILFITLGILLKKPLDKVVPKLSEKAKRSKLIH

SEQ ID NO: 60817 - protein, 273 aa, Listeria monocytogenes
MPEMPEVENVRATLQELVPGKKIDQVIVRVPKMIVSTPPDEFVHMLVGQEIEGVRRRGKFLLFDLTNCTILSHLRMEGKFRLMDENEEVSKHTHIIFHFEDHTELRFLDVRKFGTMEVTNKYGEGETRSIKKLGPEPLTQAFTLTDFATGVKKTSRAIKTALLDQKLVAGVGNIYADEICFEAKVRPERAANSLSDKEIKRIFKATKSIMTEAVALGGSTVRTYVNSQGKLGQYQNKLKVYGKTDEPCVVCGTPIEKIKLNGRGTHFCPNCQK

SEQ ID NO: 60818 - protein, 1136 aa, Listeria monocytogenes
MKRSALWKDIYREIWRSKSRFISIFMLIMLGVAFFSGLKATGPDMLLTADNYFNKYELANFNVQSTYGLDETDKEALEDISGVAQVELGYTADTLMKDKNIVTKLFSTSKSDNLNQYKVISGRLPEKSGEIALDNNQLVHKNVKIGDKVTFVKSDGNKLTDTLKKSTYKVVGFVSSPAYIQKSERGSSTVGKGKTDAFGVIPEQDFNLPEYTIANLTFDNLAAKQAFSDEYVSTEEKDKKSVEQALGDQPEKRLNKIKTSEQKKLNEATAEINKGKAELKANEAKLADAKAQLEEGFSKYNAARASYDAKIKQSEAEIANGEAELANAKKQLDAAKIQIDQGEQALIQAEMELEEGRAAWEDANNLLNTANGYLREAKSTLENVLKQPDLTDFELDRASLTDSFQMLASELDLSNADREEYENAMNNLLDDYENGNISDAEIRESINAALAQVANAENEYQSARTALDAEKQTIEQGEKTLAAKNQELQQAKIAYQEGLTKYQDGLEKISLAKQQLAVGKQTGSLELQSALAKLNTGQAEYDKNFALFKKEKAKAEAKLTSAEKDVQIGQQKLDALKVPKYYVLDRNDNPGYSEYKENADRLTSLSTAFPIFFFLIAALVCLTTMTRMVEEQRTQIGTLKAFGYSNGSIILKYLVYGSIASVIGSVLGILIGFQFFPNIIFNAYKSMYEMPSVDIGFYWSYSLLALFVALFCTTFTAYVACRAELRANAATLMRPKAPKIGKRIFLERISFIWKRMNFTSKVTARNLFRYKQRMLMTVLGVAGCTALILTGFGLRNSISDIAKMQYGQIMKYDAAIYQDMSAPPAAKETFDEIMNDSNIKSKLAMSQTNIETVKSGQSAQTTSIIVPKNLNELPNYIVLRDRASHTTEKLTDDGAIITEKLAKLFDVKPGDTITVKNAENDKFQIKVSAITENYAMHYIYMTKAYYQQVFKEKPSYNLDLLMLKDTSEKVESDFAEKLTDSKAILNVTFSNNVSSLLNETLDSLNIVIVVLITSAALLAFVVLYNLTNINVSERIRELSTIKVLGFYPKEVTMYVYRENIILTLMGIAAGFILGFFLHRFIITTAEVDQMMFSPAISWTSYLFSGILTLVFATVVMVVMHIKLKRIDMIEALKSVE

SEQ ID NO: 60819 - protein, 757 aa, Listeria monocytogenes
MATQKKKTSGRKKSSTRSKKKQSASFRLEITGVILIAIGVIGLLQLGFVGRGFFALAEMFVGLLSYVLLAGSVILGGYMVIRRKMPHLFSKRLVGIYLIVLGFLTYIHMYFIIHNLGANASVVSSTWKLVLENLFRPNQVGFVGGGMIGAAITSITYFLLDRLGTNLIAVLLIIYGFSLVSGISIRQFFSKIAEFVRYLFTKGKVATEKGKEVKAKRDKKKAEKIVDVEPDEVIDVIEPLQEEKTPPIISNFSSKVEQEKAPVEEKISQKEQDLEMFQQESFENEIYQLPPVDILAPAKVTDQSKEYDQIKVNAKKLEDTFESFGVKAKITQVHLGPAVTKYEVQPSVGVKVSKIVSLSDDIALALAAKDIRIEAPIPGKSAIGIEVANQNVAMVSLREVLENNPKNNPDEKLQIALGRDISGEAMMANLDKMPHLLVAGATGSGKSVCINGIITSILLRAKPHEVKMMMIDPKMVELNVYNGIPHLLAPVVTNPKKAAQALQKVVAEMERRYDLFSHTGTRNMQGYNDYVKKHNELNEEKQPELPFIVVIVDELADLMMVASNDVEDAITRLAQMARAAGIHLIIATQRPSVDVITGVIKANIPSRIAFAVSSSIDSRTILDMGGAEKLLGRGDMLLLPVGSSKPTRIQGAFLSDAEVEDVVNYVISQQKAQYSEEMIPDDIPEVEGEVTDELYHEAVELVVEMQTASVSMLQRKFRIGYNRAARLIDEMEQRGVVGPHEGSKPRRVNVEVSPEHE

SEQ ID NO: 60820 - protein, 131 aa, Listeria monocytogenes
MLMDLKDRKYKRSKNYAESFHHAFTGLKTAFLEERNMRFHTFAALAVIICGFFFHVTKSEWILLILSIFGVLTLEMVNTAIERAVDVATEQYIDEAKKAKDVAAGAVLLAAIVASFIGLIIFIPYFCQMFL

SEQ ID NO: 60821 - protein, 488 aa, Listeria monocytogenes
MTDRKNLTTNQGVPVGDNQNSMTAGRKGPTLIEDYVLIEKLAHFDRERVPERVVHARGAGAHGKFVTKKSMKKYTMAKFLQEEGTETEVFARFSTVIHGQHSPETLRDPRGFSVKFYTEEGNYDFVGNNLPVFFIRDAIKFPDVIHSLKPDPRTNIQDGNRYWDFFSLTPEATTMIMYLFSDEGTPASYREVRGSSVHAFKWINEEGKTVYVKLRWVPKAGIVNLSTEQASQIQAKEFNHASRDLYEAIENGDYPEWDLYVQVLDPKDLDSFDFNPLDATKDWFEDVFPYEHVGTMTLDRNPDNIFAETESVGFNPGVLVRGMLPSEDRLLQGRLFSYSDTQRHRVGPNYLQLPINSPKAPVANNQRDGHMPFKQQTSSINYEPNSYDTEPKENPAFIEPEQEIRGDISGRLIAEKPNNFGHAKEVWDRYSNAERAALVKNIVDDWSQVREDIKIRNLRNFYQVDPEFASRVAAGTGINLEEHVTDLK

SEQ ID NO: 60822 - protein, 244 aa, Listeria monocytogenes
MVRKLNKMNDASPLYAQIADDLREKIQSGIWKTGDKIPPELDLCELYNVSRITVRKAIDELVRENLLYRERAKGTFVRDWEEAEDEHFTLVRSFTNEMKELGKKAATLHAEVEVINADKKIALQLGLAVGDKVLQVKRLRGTKDLAFALFISAIPYRQAYSLQAEDYYGSFYEYLKGFGIVVNQEKEYIEAMLPNREVQEALAIDKQEPILKRVRMTKQKESDFREYSECFYVGKHYRYYIDFE

SEQ ID NO: 60823 - protein, 332 aa, Listeria monocytogenes
MANEATQELFQVLDNTAIILQNELEISYLEAVYETGENLFQKEVLQKEELSSEKQLKLQESYESIELENFSNEEIRKGLQLALLKGMKHGIQVNHQMTPDSIGFIVAYLLEKVIQKKKNISILDPACGTANLLTTVINQLELKGDVDVHASGVDVDDLLISLALVGADLQRQKMTLLHQDGLANLLVDPVDVVISDLPVGYYPDDENAKTFELCREEGHSFAHFLFIEQGMRYTKPGGYLFFLVPDAMFGTSDFAKVDKFIKKNGHIEGIIKLPETLFKSEQARKSILILRKADVNVKPPKEVLLANLSSLTDPSVTAPILAEIENWFKSKQ

SEQ ID NO: 60824 - protein, 347 aa, Listeria monocytogenes
MTKSYHVAVVGATGAVGTQMIELLEEAATFKIKQVSFLSSIRSAGKKLSFRGEEVTIQEATPESFEGVDIALFSAGGSVSKALAKEAVKRGAIVIDNTSAYRMDPTVPLVVPEVNEKALFSHNGIIANPNCSTIQMVAALEPIREAFGLNRIIVSTYQAVSGSGVSAIQELKDGSKAVLDNKEFTPQIMPVKGDKKHYPIAFNALPQIDVFTENDYTYEEMKMINETKKIMEDNTIKVSATCVRIPVVSGHSESVYIEVDKEGITAKEIQNALKNAPGIVLEDDPANQVYPQAVQAAGKKEVFVGRIRADIDDPKGFHMWIVSDNLLKGAAWNSIQIAESLVKLAII

SEQ ID NO: 60825 - protein, 298 aa, Listeria monocytogenes
MNNLQTKFPHIAIKLNEPLSKYTYTKTGGAADVFVMPKTIEEAQEVVAYCHQNKIPLTILGNGSNLIIKDGGIRGVILHLDLLQTIERNNTQIVAMSGAKLIDTAKFALNESLSGLEFACGIPGSIGGALHMNAGAYGGEISDVLEAATVLTQTGELKKLKRSELKAAYRFSTIAEKNYIVLDATFSLALEEKNLIQAKMDELTAAREAKQPLEYPSCGSVFKRPPGHFAGKLIQDSGLQGHIIGGAQVSLKHAGFIVNIGGATATDYMNLIAYVQQTVREKFDVELETEVKIIGEDK

SEQ ID NO: 60826 - protein, 374 aa, Listeria monocytogenes
MKFLHTADLHLGKIVSGVSMLAEQEYILTQITQIAEEEQVDALILAGDLYDRAVPPADAVKVLNDILVKWNVELGIPIFAISGNHDSAERLAFGSQWYESSKLYMKGKCTSQFDGIPFMDAEVWLVPYHEPAIIRQAFADNSIRSFEDAMQAVTKQIRSKWDTSKAQILVGHAFVSGGIPSDSERQLAIGNVDRVSTDCFDGFTYTALGHLHHPHAIRHPSIFYSGSPLKYSFSEANDHKSVRIVELEGKELISVTERFLTPKHDMRIISGTLAELTENLVENPDDFFQVNLMDEGALIDPMGKLRQFYPNILHLERKKQTLKETQDSFEEIMKKDDLELFGQFFEHVNGTELTETQKQKLADVFEQARKEDAE

SEQ ID NO: 60827 - protein, 622 aa, Listeria monocytogenes
MKRTTRYSRKYVPSIDGLRALAVIAVIAYHLNFSWAKGGFIGVDIFFVLSGYLITNILLTQWEKNQSLQLKQFWIRRFRRLIPAVYVMIVVVVIYSVFFHPEILKNLRGDAIASFFYVSNWWFIFHNVSYFDSFGLPSPLKNLWSLAIEEQFYLIWPAFLLVFLKWVKNPKLLLKIVIGLGLLSAVWMTILYVPGTDPSRVYYGTDTRAFDLLSGCALAFVWPFNRLSPVVPRKSKAVLNIAGTISILCFILFTAFVSEYQPFLYRGGLLFVAILGVIMIATISHPASYLSKIFSFKPLRWIGTRSYGIYLWHYPIITLTTPVLEITQPNIWRAILQVAATFIIAELSFRFIETPIRKNGFINYFKGFKDKNYFIWKNKPVGKWLSIAGVVAVLAIFTLGMSNVLSVNTNAEKQQTSVKTTTSTPDEKKDDKKEDKATKDKEADSNKASEQKETQKPDNKNKSAATPKTIITQTVAIGDSVMLDIEPYLKEAVPNITIDGLVGRQLRDAITTATGYKKFNSENSSVILELGTNGPFTEDQLNDLLDQFDKATIYLVNTRVPRGWQSDVNKSIANAASRPNVTVVDWYSRSSGQSQYFAPDGVHLTKAGAQAYVAMLTSVMNK

SEQ ID NO: 60828 - protein, 432 aa, Listeria monocytogenes
MDHSMSKKLHDEALLHIVGGVNSPSRSNKGVGGGIPVTMERASGAYFYDVDGNKYIDYLAAFGPIITGHAHPHITEAITKAAQNGVLYGTPTKHEITFAKMLKEAIPSLEKVRFTNSGTEAVMTTIRVARAYTGRDKIIKFAGCYHGHFDLVLVEAGSGPSTLGIPDSAGVTKSTAEEVITVPFNDLDSFKEALAIWGDQVAAVLVEPIVGNFGMVAPEDGFLEAVNELAHVNGSLVIYDEVITAFRFMYGGAQNYLGVIPDLTAMGKIIGGGLPIGAYGGRIDIMEKVAPLGPAYQAGTHAGNPASILSGIACLEVLQEEGLYERFEKYGSMLKDGIEKAAAKHNIAVTVNQIVGALTVYFTEDPVTNYAEAGATNGELFGRFFKGMLEEGINLAPSKYEAWFITSAHSEADILETIQAVDTVFGKMVQDN

SEQ ID NO: 60829 - protein, 358 aa, Listeria monocytogenes
MEKLLEVKDLNISFHTYAGEVKAIRGVNFDLYKGETLAIVGESGSGKSVTTKSIMRLLPEGNSEIKSGQILFNGMDIAKAHEKQMQKIRGKDIAMIFQDPMTSLNPTMTIGKQISEPLIKHQKISKHEAHKTALRLLQLVGIANAEERIKQYPHQFSGGMRQRVVIAISLACNPQILIADEPTTALDVTIQAQILDLMKDLQKKIDTSIIFITHDLGVVANVADRVAVMYGGKIVEIGTVDEIFYNPQHPYTWGLISSMPTLDTDDEELFVIPGTPPDLLHPPKGDAFAARNKYAMQIDLEEEPPLFKVSDTHYAATWLLHPDAPEVTPPDAVLRRQEQFAELHPGMQAVHAKGVEVE

SEQ ID NO: 60830 - protein, 267 aa, Listeria monocytogenes
MKILFIGDVVGSIGRDAITEYLPQLKKKYKPTITVINGENAASGRGITEKIYKDFLELGANAVTLGNHTWDNRDIFEFIDEAKYLVRPANFPDDTTPGTGMVFVKSNQHEIAVINMQGRTFLADLDDPFRKMDYLIEEAKKRTNIIFVDFHAETTSEKEAMGWYLDGRVTAVVGTHTHVQTSDNRILPEGTAYLTDTGMTGPYDAILGMEKEAVIRRFKTALPTRFEVPKTGRAVLSGCLITLDESTGKAQKIDRILINEDHPFSFD

SEQ ID NO: 60831 - protein, 168 aa, Listeria monocytogenes
MIKLCTISDSQALLEVSYKTFDETFRAQNKPENMDAYLKTNFTAKKLSDELKNPHSYFYFVFHQEAIAGYLKLNIGDAQTEEIAGNTIEIERIYVLKSFQKKGLGKELFNQAIEIAKEVDAKKIWLGVWEKNKNAIQFYAKLGFIKNGQHDFFMGDDCQTDIIMIKDL

SEQ ID NO: 60832 - protein, 496 aa, Listeria monocytogenes
MTNLFQDDSLTLHTDLYQLNMMKAYFDDGLHERRSVFEVFFRDMPFDSGFVVFAGLERIIHYMQNLRFTETDIAYLHDELGFDGPFLEYLRNFKFKGNILAAKEGEFVFKTEPILQVEASLAEAQLIETALLNIVNFQTLIATKAARIRSVIDDETFAEFGTRRAQEMDAAIWGTRAAYIGGCDSTSNVRAGKIFGIPVSGTMAHAMVQAYRDELEAFRSYAKTHFDSIFLVDTYDTLKSGVPNAIKVAKEMGDKINFIGIRLDSGDMAFLSKKARQMLDEAGFTEAKIFASSDLDEHTILSLKAQKAKIDSWGVGTKLITAYDQPALGAVYKMAAIADENDILQDSIKLSSNTEKVSTPGKKKVYRIITNEDGLKAEGDYIALADESLENVDKLTMFHPVHTYIMKTVENFTARELLVPIFQNGELVYDMPSLDEIKAYKEENLALLWDEYKRTVRPEQYPVDLSVKCWKNKMRNIEKVRKSVQLHSPVELDMPF

SEQ ID NO: 60833 - protein, 178 aa, Listeria monocytogenes
MSRIGKKTIVIPAGVTVTLNGSTATVKGPKGELVKEFNPEITIKIEGNEINVSRPTDNKNHRALHGTTRAILNNMVVGVSEGYEKKLELIGVGYRAQKQGDKLVLNVGYSHPVEFVAPKGVDIEVPANTQVIVKGYNKEHVGELAANIRAVRPPEPYKGKGIRYEGEHVRRKEGKTGK

SEQ ID NO: 60834 - protein, 386 aa, Listeria monocytogenes
MKHVFPTYKRFPIDLVNGTGTVVTDKNGKTYLDFTSGIAVCNLGHCPTNVAEAVQQQLGNIWHTSNLYECALQDSVAELIADGKERLVFFCNSGTESNEAALKLARKYTGKEKIITFEKSFHGRTFGSMSATGQAKIHQGFGELVPGFTYVPYNDIEAFRAEIDENTAAVMLEVIQAEGGVIPANAAFLLEVQLLCKKMGALLIIDEVQTGLGRTGTLYGFEQIGLDPDIFTLAKGLGNGLPIGAMVGKSDLISAFGPGSHGSTFGGNKLALAAAKEILLTMKQTGFLEEVNAKADYFRNLLEANLEVLDNVSDIRGGGFLIGIELENAAEPVITELRDKGLLILTAGTNVLRILPPLTVSYAEIDQAIYLLKSVLENQLIGSEEG

SEQ ID NO: 60835 - protein, 312 aa, Listeria monocytogenes
MNAGILGVGKYVPEKIVTNFDLEKIMDTSDEWIRTRTGIEERRIARDDEYTHDLAYEAAKVAIKNAGLTPDDIDLFIVATVTQEATFPSVANIIQDRLGAKNAAGMDVEAACAGFTFGVVTAAQFIKTGAYKNIVVVGADKLSKITNWDDRTTAVLFGDGAGAVVMGPVSDDHGLLSFDLGSDGSGGKYLNLDENKKIYMNGREVFRFAVRQMGEASLRVLERAGLEKEDLDLLIPHQANIRIMEASRERLNLPEEKLMKTVHKYGNTSSSSIALALVDAVEEGRIKDNDNVLLVGFGGGLTWGALIIRWGK

SEQ ID NO: 60836 - protein, 343 aa, Listeria monocytogenes
MTQSALKRESYFDNAKFILIFLVVFGHFLQTFIADYAGVRVLYIYIYTFHMPAFVLISGFFAKSFGKPGYLKKTMKKLILPYVFFQLIYSIFYYFLLSKDNLSIQLLDPEWSLWFLLSLFFWNIMLFIFAKIKPWKSICIALFVGLVAGYFDIIGGYLSLSRTLVFFPFFLVGYFLKKEHFYYLKTHFVMILGGIFIVLLLSFITLHPNLNDKWFLGSKPYANFVEVKSLGLFIRALVYLISFGSIAAFFSFIPRKRLFFTKWGKNTLYVYLLHGFFIKFFREGSQTDFQYSPSTFLLLFVVTFVLTVLLSSRLVKIFVQPVIELRVSMLRDVFSRLTKRESY

SEQ ID NO: 60837 - protein, 244 aa, Listeria monocytogenes
MERLQKVIANAGITSRRKAEKLIQEGKVTVNGKVVTELGVKVSGTERIEVEGIQLTKEEHRYFLFYKPRGTVSAVTDDKGRTTVADYFADIPERLYPVGRLDYDTSGLLLMTNDGDFANLLMHPKNEVSKTYIARIKGIPEREVIRQLERGVVIDGRKTAPAKVKVRSSDKTKDKAIVEITIHEGRNRQVRKMFEAVGFEVQKLSREEYSFLNLRGLNAGERRELSHHEVKQLKTEARFGKNKK

SEQ ID NO: 60838 - protein, 488 aa, Listeria monocytogenes
MSIKETALPKVQTKLFINGKWTDGDNKETKDIVNPANGDVIAKIAQAGPSETKKAIKAAKDAFPDWAKMELADRVKLLHKIADLMEEKADTLAKIMTLEQGKPLKESKGEVLTGVENFRFAAEEARRLYGETIPAPNNHAFIVKKQPIGVVAAITPWNFPGGMVTRKLAPALATGNTIVLKPSGDTPLSALAIFEIFEEAGLPKGVANIVMGSSKEIGETLTDSDDVRKLTFTGSTKVGQTLFKQSADTLKKISLELGGHAPFIVFDDANLDAAVNDLVAAKFRNNGQVCVSPNRIFVAKEIKEKFTKALVAKVEQLKVGNGLDDVNVGPLIREDAIDKIDKQLKNATEKGAKVLTGGGRLTGSDYDKGNFYKPTVLDNVTRKMDIFYEETFGPVIPLITFETEDEAIEMANDSEFGLASYFYTKDLARVEKVGAALEYGMVGANEIAISNPETPFGGVKHSGFGRENGHYGMEEYIQVKFINLKYRD

SEQ ID NO: 60839 - protein, 303 aa, Listeria monocytogenes
MKNYLSLSEEVKQAKAEGKAIVALESTIISHGMPYPQNVEMARDVEQIIRDNGAVPATIALIDGKIKIGLSDEELELFAKSSNVAKVSRRDIGYLIATKQLGATTVAATMICAELAEIGIFVTGGIGGVHRGAETTMDVSADLEELAKTNVAVVCAGAKSILDLNLTMEYLETKGVPVIGYQTDVLPAFYTRSSDVELTLRADTPEVIAESLKAKWDLQIEGGAVITNPIPEEFAMDEKVINDVIQTALKEAEENHIHGKDVTPFLLGKVKELTDGKSLEANIELVKHNALIGTQIAVAYQNI

SEQ ID NO: 60840 - protein, 304 aa, Listeria monocytogenes
MNGIIPLWKERGMTSHDCVYKLRKILHTKKVGHTGTLDPEVEGVLPICIGRATKLAEYVTDEGKVYVAEITLGKSTTTEDATGETVNTKELAEISAAELQAALTKLTGKITQIPPMFSAVKVNGKKLYEYARAGIEVERPSRQVDIYSLIRLDGDTALNQSNPTFQLEIACGKGTYIRTLAVMIGELLGYPAHMSKLERTRSGFFKKEDCLTLTEIDEMMQASDSSFLYPLEKGIESMAKLVIEEEVYAKVLNGGLLPTSLFAEVENEPRAALIFKDKLTAIYKPHPEKKDLWKPEKVIELNQA

SEQ ID NO: 60841 - protein, 159 aa, Listeria monocytogenes
MAKAFLSIGTNIGERLENLNDALRGLAASNQINITNVSSVYETDAVGYEDQAAFLNIAVEIETDFPPIDLLDFCLALELELGRVRLFKWGPRLIDIDVLLYDDVKTDTEKLKIPHPYMKERAFVMIPLIEISPEKSNLVENPALLEEQGVRKIKNQVNW

SEQ ID NO: 60842 - protein, 274 aa, Listeria monocytogenes
MKDLHTDNLQISYDKRIIVDGLDIAIPANKITALVGANGSGKSTILKTMSRLMKPSKGAVYLDGKTIHSQPTRDVAKQLAILPQNPSAPDGLTVFELISYGRSPHQSSFKSITAKDREIIFWSLRVTNLTEFADRPIDSLSGGQRQRAWIAMALAQETDVLFLDEPTTFLDMTHQLDVLNLLKQLNQSENRTIVMVVHDLNHASRYAHHMIAIKEGKVIAEGTPTSVMTEQTLEDVFNIKADILIDPRSGVPLCLPYETCNGCEIVKELDSIAK

SEQ ID NO: 60843 - protein, 426 aa, Listeria monocytogenes
MYVLKNGQVLNASGKLESKDVLIQNGKVNLIADSIEVTSGEEFDATGKLITPGFIDVHVHLREPGGEHKETILTGTKAAARGGYTTICSMPNTKPVPDSKEVMESIQAKIKETAKVRVLPYASITTSLGTDELVDFEALKEAGAFAFTDDGVGVQLAGTMYEAMKRAAALDMAIVAHCEDNSLIYGGVVHDGIFAEKEGLKGIPNIAESVQIARDVLLAEAAGCHYHVCHISTKESVRVVRDAKRAGIRVTAEVSPHHLILDEEAIPGNDGNWKMNPPLRSKEDRAALLEGLLDGTIDFIATDHAPHAAEEKNVPMEQAAFGIVGLETAFPLLYTHFVKTNEWTLKQLIDWMTVKPAECFKLPYGKLEEGSVADIVVLDLEKEANIDPDTFYSKGKNTPFVGETCIGWPVATFAEGTLVYNEGEIK

SEQ ID NO: 60844 - protein, 170 aa, Listeria monocytogenes
MLQPHLVIGSAFTFGDAFFTLFAFAILLVLIRIYAWKPLMGIMKEREEHIGSEIDAAEENRAQSEKLLAEQKSVLQQARVESQTMIENAKQLGEKEREEIVKTARRESERIKEEAKSDIAREKEDAISALREQVGSLSVLIASKVIEKNLDEKEQSNLIQDYIERLGDDK

SEQ ID NO: 60845 - protein, 100 aa, Listeria monocytogenes
MDLEQTIMSLIVFGGNAKSDAMLAIDSAKKGDFAQADEQIAQAEQALLEAHHSQTKLIQGEARGEKTEVSLLLVHAQDHLMNAITFKDLAKEIVDLYKNK

SEQ ID NO: 60846 - protein, 335 aa, Listeria monocytogenes
MDTVILITVIIVIVGLAFDFINGFHDIANAVATSISTRALKPRVAIGIAAVMNFLGAISFTGVAESLTKSIVDPFSLNNGEFVVLCGLIAAVIWNLMTWLVGMPSSSSHALIGAIAGASIASASSFSVLNWSGFTTIIIALIISPIIGFTVGYLIYSLFKHLFHDKKLGKMNRRFRFIQIGTAAAQAYSHGTNDAQKTMGIITLALVASGLLKESAGIPFWVQVSCAASMAIGSSVGGYRIIKTVGTKIMKITPVTGVASDLSSLSVIMTATLIHLPVSTTQVIDSSIMGVGTANHKKEVNWRTGKNMVVTWFITLPLAGLLAAVVYWISAAIFL

SEQ ID NO: 60847 - protein, 903 aa, Listeria monocytogenes
MKKQRVDYKRRLDQKRAQKAKLIAALITTTTMMVAPVTVNYDSFNHQFALSGIQADAATIDLLGNSNLNTQYSNGKLVITLSGNQLVSASAVSTYYPYFELPSELSSILSNPNIRANMKIDYKIAYLGIGGIGLFNQGTVNGSSSSNFFIDSSRNAIGAKVNHLLGVGVGSVSTFTLTIDLLALGVTALPSANDGKLDFAARTGDGLLDVDLLNSNAARGFITTDVGDADADADADADADADADADADADADADADADADADADADADADADADADADADADADADADADADADADADADADADADADADADADADADADADADADADADADADADADADADADADADADADADADADADADADADADADADADADADADADADADADADADADADADADADADADADADADADADADADADADADADADADADADADADADADADADADADADADADADADADADADADADADADADADADADADADADADADADADADADADADADADADADADADADADADADADADADADADADADADADADADADADADADADADADADADADADADADADADADADADADADADADADADADADADADADADADADADADADADADADADADADADADADADADADADADADADADADADADADADADADADADADADADADADVDIDWRDFLVEKPTVNPIYEGTKTISGSSIYKNMNINALLKSLQSDAPVGTTFYINLTLPDGTVIGNVLIHADGTYTINIPNYNLKAGDVIHLQVTAKYGDEVKTSDDVSVTVLPLVDSDADADADADADADADADADADGGPNPSTNGGTTGTSNGGTGVTVTNMSSNGSGTMLSSGYSADGTTSISASDLPSTGDTNSSLPWVGLGLFSLAGAFLLRLFRK

SEQ ID NO: 60848 - protein, 252 aa, Listeria monocytogenes
MTFLEEILAQKEVEVAKMPLEQVAEKRKTYSFYEFLKANTNTMQLIAEVKRASPSKGEINMGVNPVLQAKSYQAAGAGMISVLTDPVFFKGSIEDLREVAKNVGIPVLCKDFIISEKQLIRARNAGATVVLLIISALTEEKLITLFEQALALDLEVLVEVHDQEELAVAQKIGAQLIGVNNRNLHTFEVDIAVSERLASDFSSDACFISESGFRTAEDVARVSQKYDAVLVGEALMREATPEVAAKSLKVTR

SEQ ID NO: 60849 - protein, 410 aa, Listeria monocytogenes
MKEELLKRFTKYVKVDTQSNEESTVCPTTPGQMELANILVTELKEIGMQEVTVDEFGYVMATLPSNSTKEVPVIGFLAHLDTATDLTGKNVQPQVHENYDGKDIILNKDLNVVLSPKQFPELAGYKGKTLITTDGTTLLGADDKAGITEIMVAMNHLINHPEIKHGKIRIAFTPDEEIGRGPERFDVEAFGAKYAYTMDGGPLGELEYESFNAASAKITFKGNSVHPGTAKNKMVNAVKMAMEFDARIPKDEAPEYTEGYEGFYHLISLNGDVEQARSYYIIRDFDHLKFVERKTHIASIAKELEEKYGEGSVELKLNDQYYNMREKIEPVKEIVDIVSAAMRNLDIEPKISPIRGGTDGAQLSYKGLPTPNIFGGGENFHGKFEYVALESMVKATEVIIEVARLFEEKE

SEQ ID NO: 60850 - protein, 621 aa, Listeria monocytogenes
MCGFVGCVHDRITEITGADKETFRQMNSMITHRGPDDEGYFTDDHVQFGFRRLSIIDVENGHQPLTYENERYWIIFNGEVYNYVELREQLVAEGMTFETESDTEVIIATYAKYKEKTAERLRGMFGFVIWDKQEELVYGARDPFGIKPFFYAEEDDKLFMGSEKKSILHALKEKELDEVSLQNYMTYQFVPEPDSLTKNVKRLEPGHQFTKKIGQPMEITTYWKASFAPVTKSEDAWIKEVRDVMYDSVKMHMRSDVPVGSFLSGGIDSSIIAAIAKEYHPAIKTFSVGFERDGFSEIDVAKETADKLGVENISYVISPEEYMKELPKIVWHMDDPLADPAAIPLYFLSREARKQVTVALSGEGADELFGGYNIYNEPNSLAMFNKMPGVFKSMLNNLARIMPEGMRGKSFLERGTTPMEERYIGNAKMFTEKEKQILLPKYQAGHDYTNITDPFYAETTNYHPVERMQYIDIHTWLRGDILLKADRMTMANSLEVRVPFLDKEVYNVARNIPDTMKTTNGTTKYILRKAAATFVPEHVLNRRKLGFPVPIRHWLKDEMNAWVKNIIKESPTDHLINKQYVLDLLDDHCAGKFDYSRKIWTVVIFMIWYDVYVADKYDFGK

SEQ ID NO: 60851 - protein, 408 aa, Listeria monocytogenes
MKKVTLIFSVYTFILGILVGVIAALFLAMVHFATTFLWDYLPNQFDFSWYYPLLIGLIGSFFVGMVQLKLGDYPRSMHDNVAEAKKTGRMEYRKVLLPTILSAWIILTFGASVGPEAALIGIVGGATTWIIDHLKLSMAHKEELVSLSVGAIISSIFHAPFSGLAEEIDESSQAKKIPKNSKLVLSLLISFSALGSFLWLKSFLKMPASIFAIRLPDMGWSWWFILLFIPTIILGWLFSVYFQQLQVYIAKAASVIKNKMVAAIIGGLSIGLFGIISSFMLFSGEHQLIELTTTVQNYSIPFLLIIALLKPVLVAICLATGWNGGAIFPAIFTSTVMGYIATYWIDGSTGFLITVFVTACCTKIVGKPVLTASILLFIFPLQFFPFILLTAFIVNKNWWVSIRKIIRA

SEQ ID NO: 60852 - protein, 332 aa, Listeria monocytogenes
MPNEVYDVTIIGGGPIGLFSAFYSGLRSMKTKIIDAEPAVGGKVRYFFPEKIIRDIGGIPAITGENLVANLKQQAETFHPTIVCSERVVDVTKLADGTFQLTSHNGSIHFSKTIVIATGSGTFEVNKLEALHAEDFPFAIHYDVKNIEQFRDKVVVVSGGGNSAIDWAQTLEPIAKKVHLIYRGEDFKAHEESVRELKNSRVEIHIHHEISELIGTNNQLTEITVCCNQTQTTKTIETEALFINHGVKVDLGTMAEWGFKQADFGIVVDDEMKTTVPGIFACGDSATYPRKIRIIAAGLHEGPIAINSAKKYLEPTAADEAMISTHHESFIG

SEQ ID NO: 60853 - protein, 215 aa, Listeria monocytogenes
MKLVLMGLPGAGKGTQAEQIVEKYNIPHISTGDMFRAAMKNNTELGRKAKSFMDNGDLVPDEVTNGIVRERLSEDDAKDGFLLDGFPRTVEQAQELENILSDLGTELDAVINIDVEKDVLMKRLTGRWICRTCGKTYHEIYNPPKVPGKCDLDGGELYQRDDDKKETVEKRLNVNMKQTKPLLDFYSEKGKLHNINGEQEIKDVFVDVEKILASF

SEQ ID NO: 60854 - protein, 429 aa, Listeria monocytogenes
MFVDQVKIYVKAGNGGDGMVAFRREKFVPNGGPAGGDGGKGADVVFVVDEGLRTLVDFRFKRIFKAEHGEHGMSKSMHGRGAEDLVVKVPQGTIVKDIDTGEIIADLVAHGQRAVIAKAGRGGRGNKRFATPANPAPELSENGEPGQERNVQLELKVLADVGLVGFPSVGKSTLLSVVSAARPKIAAYHFTTIVPNLGMVDAGDGRSFVMADLPGLIEGASQGVGLGHQFLRHIERTRVIVHVIDMSGSEGRVPYEDYMAINNELEQYNLRLMERPQIIVANKMDMPDAEENLNEFKTKIAEDIPVFPISAVTKTGLRELLLAIADKLETTPEFPLNEILEQEDEDTVLYKYVAEEPDFEISREPDGTFVLSGAKIERLFTMTNFERDASISRFARQLRAMGVDEALRKRGAKDGDIVRLLDYEFEFMD

SEQ ID NO: 60855 - protein, 427 aa, Listeria monocytogenes
MLDVKLLRNNFDEVKQKLQNRGEDLGEFEKFGELDKRRRTLIVETEALKSQRNEVSQEIAKLKREKQDADAKIEEMRVVGDRIKTLDIELREIDEKLDMILMSIPNIPHESTPVGESEDDNVEIRKWGEVRAFDFEPKAHWDLGTDLDILDFENAAKVTGSRFVFYKKLGARLERALINFMMDLHSNEHGYEEMLPPYMVNRASMTGTGQLPKFEEDAFLIEAEDYFLIPTAEVPVTNYHREDILKAEDLPRKYTAFSACFRSEAGSAGRDTRGLIRQHQFNKVELVQFVKPEDSYVALEKLTGNAEEVLRRLELPYRVLSMCTADLGFTAAKKYDLEVWIPSYNSYREISSCSNFESFQARRANIRFRREPGSKPEYVHTLNGSGLALGRTVAAILENYQDADGSVRIPKVLQGYMGGIEKIELPK

SEQ ID NO: 60856 - protein, 233 aa, Listeria monocytogenes
MTIGIIGAMEEEVELLKNSMSSVEEIVIGGAKFYIGEIASKEVVLLESGIGKVNAALGTTLMADRFKPEVIINTGSAGGMAEGLAVGDVIISDRLAYGDVDVTEFGYTYGQVPRMPAFYQGDAVLLKKAETIYREYFATSENKAVYGLVVTNDSFIMRPDQHEIIRTFFPDVKAVEMEAAAIAQVAYQFDIPFLIIRAISDLANQEATISFDEFIHLAAKQSATCIIELLKTI

SEQ ID NO: 60857 - protein, 783 aa, Listeria monocytogenes
MGWFKDFFFGDMDEEIDTYEDTSSRKVEKKAKQRASEVLPKSNVTAIKTKERTIRNERPVAYKTAPKQKHMQPVKRQMKTQMVYQYPKGEFRFPLIPDKQKSQPIQPKKQPITERQVAETQPVKEETRKRPFTATDVPSPVYAFNKRPSKFEFAVTEAEELSTIQEDLTITPVDLLDSAEAETIAFDAGLNRQIEEEVVSVPVMEEVVTEQPEVEVNPEPVEQQEPARVSLITEEPAQTKTTTRSKQVESNRQEQLLKSRIPFNVMMVKKDKQALQKEDAQEINVQQPVEIEAEQTNIVQQTQVATASYPMNYEFPSFGLLHPPVSKREDDSWLQMQQEMLDETLENFNVQASVVNRTQGPAVTRFEVQPEKGVKVSKITNLTDDIKLNLAAKDIRIEAPIPGKSTVGIEIPNQTSRPVMLSELMNTEAFQTSASPLTAALGLDISGTPIITDLQKMPHGLIAGATGSGKSVCINSLLVSLLYKATPDQLKLLLIDPKMVELAPYNRIPHLVSPVITDAKAATVALKWAVEEMERRYQLFSHTGVRNMEKYNEYASHPDHTGEKLPYILIVIDELADLMMVAPNDVEESISRIAQKARACGIHMIVATQRPSVDVITGLIKANIPTRVSFSVSSQIDSRTILDASGAEKLLGKGDMLFLPSGASKPVRLQGTFVSDEEIDAVVAHVRSQGEADYIFEEQELLVKETAKENTDELFEEACDFVLSQNAASTSLLQRHFRIGYNRAARLMESLENHQIVSGINGSKPRDVIITKDQLAKLRNKES

SEQ ID NO: 60858 - protein, 350 aa, Listeria monocytogenes
MITNQRDIDKYYDMLVEKNSNYEGVFFVGVKTTGILCRPTCPAKKPLKENCEFFSTAKEALLASYRPCKRCEPLSNPTKLSPAVKLLVDAIEKNPEKKWTDKDFDDLSISANTARRQFKKQFGMTFIEYARSRRLGLAFKHIRGGNSIINAQLDSGYESGNGFRDAFSKTMGEVPHKSKDITILYSAWLETKLGSMLAISDDDSLLLLEFVDRKGLETEIKKLRMRLNAAITPEKTIIIQQIEAELAQYFNGELIDFKTPIRYIGSDFQENVWEELRRIPIGETISYKGLAEKLGRSTASRAVARANGANQLSLIVPCHRVINTNGALGGYGGGLARKEWLIKHEKMVPK

SEQ ID NO: 60859 - protein, 105 aa, Listeria monocytogenes
MRGMGNMQGMMKQMQKMQKEMAKAQADLEAQEFTGTAGGGMVTVKATGKRVITDVVINEEVVDPEDIEMLQDLVLAATNDVLKQIEDTTSQTMGKFTQGLNIPGM

SEQ ID NO: 60860 - protein, 339 aa, Listeria monocytogenes
MEILLQKVYDQENLSKEEMNIIATEIFEGRLSKTKMAAFLMALKVKGETAEEMAGIAQAMQQVAIQVAFPAGTAMDNCGTGGDKSNSFNISTTSAFVLAAAGIPVAKHGNRSISSRSGSADVCQELGIDINLRPEDMTYLLEKVGIAFLFAPHVHPNMKYVMDVRKELGTPTIFNLIGPLTNPVHLETQLMGIYRRDLLEQTAEVLGQLGRKRAVVLNGAGFMDEASLAGENHYALYENGEVHLYTLRPEDVGLTSYPLEAITGGDAKENAAILRSVLEGEPGAYLDTVLLNAGFGLFANGKVETVQEGVDLAKDLISSGLAKQKLADLITYQKEVLAK

SEQ ID NO: 60861 - protein, 780 aa, Listeria monocytogenes
MSHLKDYTIGIQHIKQLTSEISLGTKLVFAISGQITIKDSEQKFYLQEGDILVLDRNTFYTIEGNEANLFINLTISDTFFAHYYEDYFQHSFKFFSKESDPGRERVVGSLRKSVSELLIASATKKRANKLEAQSALFQILLLLTRFLKKGVPSSARKEVNDKRISRIIREVEERFDEALSLRVFAQKEFLSEAYLSRYFKKTTGLGFLQYLTEVRLKHAIQDLLHSAESITEIALKNGFSSQKHFSEVFKFHFELTPSEYRAEHHAETNLLIDNKASELGASIEQIVPSPEILVNLSRLYHDVEPGKELNKAPFEKKKIDITEKTARCLSENMNILTIGELKEVLKANVQKQIITTRDEIGINYIGIRHLFRGSTFLPETETDELVPTSSPYANADLALTFLKQQNLELFIRIEYQDIVGDVAAVFERLDHFLKHCMQVFGREFVSKWHFMFFEPKNTYADKEELKKLYLKIYHIIKSRFPAIQVGNFVPFSLSKNEVPERHMWFLDVADKIDFVAYNANQNEAVDFSKEDMKSFMISEDYCLSKTRKLKDFLKHHHINKPLMLVNWNTLTGNTRYTNGTFFRGALVLKTMLDLAPEVDALGFWINTELHEGDDSQLNISLDGIEMFHFFDGKRPAFYAVKFLRRLKGVVVAEGADFIMTKHTDGYQLILMNCANINPRYSVEERFTKEEQKELHIRITGLQAGEYQVCKWQFDRDNGALYSKYWQLNSKYGLDKEILDYIVDASQPTLTVSDETITEDWSFYAYLDINAIHFYEFRSTI

SEQ ID NO: 60862 - protein, 287 aa, Listeria monocytogenes
MKKKKRFKQKLLIASLVIGLMAVLSGCGYSTDPITSESTGFWSHYIVFPLSWTITWFSDLFGGSYAVGIIVVTILIRLLIMPLMIKQLKSQKAMTNLQPKIKELQEKYSSKDNETKQKLQQETMRLYQENSVNPMMGCLPLLIQMPILLGFYQAISRTAEIKTDSFLWMQLGNPDPYYILPVVAALTTFLSSKISMMGQTQQNKSMAMIVYIMPVMILFMGITLPSALALYWIIGNIFTVFQTLLINNPFKNKREQEALAAAQVAEDRLKKKAANMKASKKGGKKRK

SEQ ID NO: 60863 - protein, 202 aa, Listeria monocytogenes
MEHIYIPGKNKDLAPLLLLHGTGGDEKSLVEVAEFIAGDAAVLSLRGDIKEGGANRFFKRFHDGSLDLEDLESKTSELITTTRELAKKYQLDFERIIAVGYSNGANIAANALLQAENSFHKAILFHAMPAGNKQPEFSISHRSVFLSAGLNDPLITAKASEELVEILKQRGANVETVWTAAGHSLTMEELEEAKKWYQNNQK

SEQ ID NO: 60864 - protein, 288 aa, Listeria monocytogenes
MRIRVPATTANLGPGFDSCGLALTLYLTLDIGAEADSWYIEHNIGGGIPHDETNVIIETALNLAPNLTPHHLVMTCDIPPARGLGSSSAAVVAGIELANTLAELNLSKEEKVRIAAEIEGHPDNVAPAVLGNWVVGAKLDGEDFYVRHLFPDCALIAFIPKAELLTSESRGVLPDTLPFKEAVQASSIANVMIAAILRNDMTLAGEMMERDLWHEKYRSQLVPHLAQIRDVAKNQGAYAACLSGAGPTVLVFAPRNLANKLQTSLQTLEIDADVLLLDVEGSGAEVFR

SEQ ID NO: 60865 - protein, 242 aa, Listeria monocytogenes
MDTPDYKRVVLKLSGEALAGNDGFGINPSVVNLISAQIKEVVELGVEVAIVVGGGNIWRGKLGSEMGMDRAAADQMGMLATIMNSLSLQDSLENIGVATRVQTSIDMRQIAEPYIRRKAIRHLEKGRVVIFAGGTGNPYFSTDTAAALRAAEIEADVILMAKNNVDGVYNADPKLDENAKKYEELSYLDVIKEGLEVMDTTASSLSMDNDIPLIVFSFTEQGNNIKRVILGEKIGTTVRGKK

SEQ ID NO: 60866 - protein, 450 aa, Listeria monocytogenes
MDNNFQDRTPPQNIEAEQAVLGAIFLEPNALITASEILMPDDFYRTGHQIIFETMLDLNDHGKAVDVLTVYEALAAKGNLEDAGGLPYLTELSGAVPTAANLEYYAHIIEDKALLRRLIRTATQIATDGYSREDELDMLMDEAEKSILEVSQRKNVGAFKNIKDVLVKTYDDIEILHNRKGDITGIPTGFNELDKMTAGFQRNDLIIVAARPSVGKTAFALNIAQNVATKTDENVAIFSLEMGAEQLVMRMLCAEGNINAQNLRTGALTSDDWQKLTIAMGTLSNSGIYIDDTPGVRVNEIRSKCRRLKQETGLGMIVIDYLQLIAGSGRGGENRQQEVSEISRSLKALARELEVPVIALSQLSRSVEQRQDKRPMMSDIRESGSIEQDADIVAFLYREDYYDREGENDGTIEIIIAKQRNGPVGDVKLAFVKEYNKFVNLEVRYDDAMA

SEQ ID NO: 60867 - protein, 498 aa, Listeria monocytogenes
MSNENHEELNDQLIVRREKVDTLREEGIDPFGEKFIRSISPEEIETKFADKSKEELEEAAIEVSVAGRIMTKRVKGKVGFTHIQDRFHQLQIYIRKDAIGEDAYAVFKLADLGDIIGIKGTIFRTNTGELSVKATEFTLLSKSLRPLPDKYHGLKDVEQRYRQRYLDLITNEESQNRFVMRSKILKYTRDYMDNQGFLEVETPVLHTIAGGAAAKPFITHHNALDMELYLRIALELHLKRLIVGGMDKVYEIGRVFRNEGTSTRHNPEFTMLESYAAYEDYEDVMDLVEGLVSTVCKQVNGTTEITYGEYKVDLTPNWRRIHMADAVKEYVGVDFWNVTSDEEARELAKKHDVPVTEHMTYGHILNEFFETYVEEKLIQPTFVYGHPVEISPLAKKNKEDERFTDRFELFIVGREHANAFSELNDPIDQRERFEAQMKEREQGNDEAHGMDADFLEALEYGLPPTGGLGIGIDRLVMLLTDAPSIRDILLFPTMKHRD

SEQ ID NO: 60868 - protein, 629 aa, Listeria monocytogenes
MQTYDAGTFDVIVVGAGHAGVEAGLASGRMGAKTLMLTINLDMVAFMPCNPSVGGPAKGVVVREIDALGGEMGRNTDKTYIQMRMLNTGKGPAVRALRAQADKWDYQHEMKHTIEKEENITLRQGLVDRLVIEDGVCKGVITNSGAIYYAKTVVITTGTFSRGEIIVGELRYSSGPNNQQPSVKLSEHLEELGFELRRFKTGTPPRVKSSTIDYSKTEEQPGDDHPRAFSFDTVEMLLDQLPCWLTYTNETTHEIIQANLHRSPMFTATKKGTGARYCPSIEDKIVRFSDKPRHQIFLEPEGKNTEEVYVQGLSTSLPEEVQREMLRTIPGLENVEMMRVGYAIEYDAVMPDQLWPSLETKLVEGLFTAGQINGTSGYEEAAGQGLMAGINAARKVFEKEPVILGRDQAYIGVLIDDLVTKGTEEPYRLLTSRAEYRLLLRHDNADLRLTEIGHEIGLISDERYERFLAKQSAIEAEKERLQKTRIKPTAEVQAMLKEIGSGELKDGILAADLLRRPEITYDKIAQIVSRETFVTDEIAEQVEIQIKYEGYIQKSNLQVEKMKRMEDKKIPENIDYDAISGLATEALEKLKKIEPLSIAQASRISGVNPADISILLVYIEQGKIAKISK

SEQ ID NO: 60869 - protein, 783 aa, Listeria monocytogenes
MIHSKYLWNIEEAAEDKASQLAEQLKISLPLAKLLWKRKITTQGQFDKFFHPEKYESYDPFLFAEMDLAVARIKQAIERNEQILVYGDYDADGVTSIAVLMKTLRHLGADADFYIPNRFTEGYGPNIAAFDMAKNQGTDLIITVDNGIAALEVMAHAKEIGLDVIVTDHHEPREIMPEAVAVIHPKHPKSAYPFDELAGVGVAYKLSHALLGEEPKELLDLVAVGTVADLVSLTDENRLLVQLGLRQLRESANLGLAVLAKKASLKLEEATEETIGFGLAPRLNAVGRLGPADPAADLLLTEDPEEALFLAEEIDDANKERKQIVVDTTKLAMEAIEAKDTLGNVLVVYGEGWNTGILGIVASKLVGTYSRPAIVLGIDPVTGIAKGSGRSVDAFHLYQALDKHRDLMMAFGGHPMAAGLTLPAENLTELEAKLQEEASYLSEEDFRPALKIEEKIKLADVSVAFIAQLEKLAPFGMDNPKPIFLLENMHLKGTKRIGADKTHLKTMLATEKNDATLDSIGFGVGDLVDKISPTAAVDVVGELSINEWNNVKKPQLRMMDIHISHWQLFDVRNKSEWARILQEQTESRVFVCFEERTIGTLGEQNYILVNEKADFVADFQTEELVFADMPTNIELVETIVRETKPERIFVHFDAAEGNQIPAIPDRLAFAELYSLIKKFQPFPIEKYTPRLMQKFGWNKEQIDFMSKVFFDLEFAKMDSGQIIINEVVEKRNLDESLVYQQKVEEITTRKKLLYSNYTELHSWMKSMMETSIYPNAEELENGN

SEQ ID NO: 60870 - protein, 270 aa, Listeria monocytogenes
MLTTRKALYYLDKGKTKEAIRLLETCWKQEVTTKNKRDIFTATVLLSDVLYQSGEHFPEIYQQLMSILEEMQDLEAVEFEREKAKQIFAELDEYFSEVGTFFQGDSLAELWLEFDYENDYKDVYPTPQRVAAIEAELGYKLPKSYIYLMRHTQNGGIVSTGSVPTTEPSSWSENCVAITGIMGIGNQGISALNGMHNTNFWIEEWGYPDVGLAIADCPSAGHDMVFLDYRNCGKTGEPAVVHIDQEADYKIMKLADNFEAFILSLYREEY

SEQ ID NO: 60871 - protein, 463 aa, Listeria monocytogenes
MNNNFLWGGATASYQCEGAWDVDGKAESMWDYYLHEAGLENGDVASDHYHRYEEDIRMMKEGGQNSYRFSLSWPRIIKNRQGDINLKGIEFYQNLLDTCKKYDIEPFVTLYHWDLPQYWEETGGWLDHDVCAAFEHYAKVCYDHFGDKITNWTTFNEPKWFVANGYKIGNYPPGYQDTQKTMIAAYNVMYASALGVKAFKEGGYPGQIGIVHSYTPVNGIDESIETKIAMRYADNYCNNWILDTAALGEFPVDLIAELAKSHDISFMKTDELQTIKQNTVDFIGLNYYSRTLVKPYTGGETQLQFNHSGKKGESKVLIKNWFEQVKDPANETTEWDTEIYPKGLQDGLIEAYERYQLPLYVTENGIGVREDVSVPQVDDAYRIAFMNDHINAIFNAIDAGCDVRGYYAWSPFDLYSWKNGVEKRYGLVAVDFENNQIRKPKASYYWFKEMIESQGKLIKRREF

SEQ ID NO: 60872 - protein, 596 aa, Listeria monocytogenes
MKIWNSIVGKIWSTIILLLIGILVISGFLVAMIYEKNNITRITNELEDKTASIITVMQENNEVISAENNNDSALILLDDTMGVIIEQNGKSVYQSQSPDTISSASANKLIQDKTLDKALEKDNSVTMKYNFKTEKSSLPVEISAQKFKLANGETGVVYVYQSYHDILKVNEKTMSTLIISGIIAIVITSILSFVFSSRMAFPLREMKKIAIAVSKGNFDNRVPTYTHDEIGELGVAFNDMAKQLKYNVSALRQEKEQLSNILVGMADGVIKFSVDKTIILSNPPAEEFLHNWFFSPENTEKVLIPVALNELLNDTLEKKESQVGEITFADHTYVAILTLLYTGEHVRSIVAVIRDMTEEKQLEKMKSDFVNNVSHELRTPISMLQGYSEAIIDGVAQSDEEVREFAQIIYDESLRIGRLVNDMLDLARMEAGFNQMDNQKLPLAPLLRKVISNFDVLAKENFVELGLELETPDLEYSYDPDRMEQVLINLIMNAIRHTGKEGYDGKVILKQTIDVARSNLVITVSDNGSGIAEEDIPYLFERFYKVDKARKRGKAVGTGIGLAIVKNIVEAHNGKISVESELGKGSDFIITLPLYK

SEQ ID NO: 60873 - protein, 66 aa, Listeria monocytogenes
MEQGTVKWFNAEKGFGFIERENGDDVFVHFSAIQGDGFKSLDEGQAVTFDVEEGQRGPQAANVQKA

SEQ ID NO: 60874 - protein, 956 aa, Listeria monocytogenes
MDKEKIVIQGARAHNLKNIDVEIPRDKLVVMTGLSGSGKSSLAFDTIYAEGQRRYVESLSAYARQFLGQMDKPDVDLIEGLSPAISIDQKTTSRNPRSTVGTVTEIHDYLRLLYARVGHPVCPNHGIEITSQTIEQMVDRVLEYPEKTRIQIMAPIVSGKKGTHKKTIEEIKKEGYVRIRVDGEIYDINDEIEIEKNKKHSIEIIIDRIVIKEGINTRLYDSIEAALRLADGYAVVDIMGDKELLFSEHYACPYCGFSVGELEPRMFSFNSPFGACPTCDGLGTKLEVDVDTVIPDRSMSLNEGAIIPWRPISSQYYPQMLASACKEFGIDMDTPLEKLSKEELDIILNGSKDKEFYFEYKNDFGMTRETWIPFEGILPNIERRYRETNSDFTRDQMAQYMTDLPCPSCKGYRLKEETLSVKVNDHHIGQISEFSINEALAFFDGLELSEKETQIAAPIFKEVRARLGFLKNVGLDYLTMSRAAGTLSGGEAQRIRLATQIGSRLTGVLYILDEPSIGLHQRDNDRLISTLQSMRDIGNTLIVVEHDEDTMMAADYLIDIGPGAGEHGGRIVAAGTPEEVANNKNSITGDYLSGKKFIPVPAKRRKGNGLELEIIGAKANNLKNVNAKIPLATFSCVTGVSGSGKSSLVNEVLRKALARKLNRNHAKPGEHKEIKGIENLEKIINIDQSPIGRTPRSNPATYTGAFDDIRDLFASTNEAKVRGYKKGRFSFNVKGGRCEACKGDGIIKIEMHFLPDVYVPCEVCHGKRYNGETLDIRYKGKNIAEVLEMTVEEGLEYFTNQPRIARKLQTIVDVGLGYIRLGQPATTLSGGEAQRVKLASELHKRSNGKSFYILDEPTTGLHADDIGRLLKVLQRLVEENGDTVLVIEHNLDVIKQADYLIDLGPEGGDGGGQIIATGTPEKIARSKKSYTGKYLKPILERDKERTEERIATAKKK

SEQ ID NO: 60875 - protein, 617 aa, Listeria monocytogenes
MDYQKLAKEILANVGGEENVRSVVHCATRLRFKLVNKEKADKKQIESISGVISVVENAGQLQVIIGNTVGDVYKALGSFTKLTDDGDSEIAKGTKDSDGNFLSKAIDVISGIFTPILGALAGGGMLKGLLMILTTFGWLTESSGTYQILYAAADSVFYFLPLILAYTAARKFGANPPVAIAAAGALVYPTMINLFNEGAHITFLQIPVVLMSYSFSVIPIILAVWFLSILERFLNSKIHEAAKTFLTPMICLMLIVPLTFLAFGPLGTFISQGLASGYTFIYNLSPIVAGAFMGAFWQVLVIFGIHWGFVPIMINNLSRYGRDTMIAMVGPSNFAQAGASLGVFLKTKKPEVKAIAGSAALTGFFGITEPSIYGVTLKYKKPFVIASIAGAIGGAIVGAAGSSGAANAIPGILTLPIFIGKGFVGFILGIAVAYILSAIGTYFFGYKDEMADGIAPTTKEAKETGVEAEVIVSPIRGNIVPLNEVKDEAFSAGLLGKGVAIVPQEGKLISPVNGTIETAFPTGHAIGIRSDKGVEILLHVGFDTVQLNGKYFKLLVAQGDRVLVGQALLEFDLEAIKADGYDITTPIVVTNTDAYLDVLISDQKTVNYEDTLLTPVL

SEQ ID NO: 60876 - protein, 213 aa, Listeria monocytogenes
MKALKIALTKGRLEKDAVALLEKAGIDCSSMTDKKRKLIFHSSTQPISFILVKAVDVMTYVKHGVADIGIVGKDVLMEASKSHYEMLDLEIGKCQFCLASTPDFDPSSYRRKIIATKYPTVASKFFREKGEDVEIIKIEGSVEIAPVLDLADAIIDIVETGSTLKENGLIIYEKMYPISARLIVNKASLKQNKTQIFHLIDQLEQAIKEELAE

SEQ ID NO: 60877 - protein, 218 aa, Listeria monocytogenes
MKFFLDTASVSEIKRISELGLVDGVTTNPTIIAKEGRPFEEVIKEICSIVDGPVSAEVIGLEADKMVEEARILAKWAPNVVVKIPMTEEGLKAVHTLTAEGIKTNVTLIFTVSQGLMAAKAGATYISPFLGRLDDIGTDGMILIKNLKKVLDNYGLKAEIISASIRHIGHLEEAAEAGAHIATIPGSLFPKLWSHPLTDKGIEGFLKDWEAFSQKEGN

SEQ ID NO: 60878 - protein, 100 aa, Listeria monocytogenes
MAEEHNHNHEEENIIWITNEEGKEEAYEILFDFDSEDFDKSYVLYFPAGKGEDEEIEILASSYIQDEEGKQGQLKPVETDEEWDMIEEILATFLADEDEE

SEQ ID NO: 60879 - protein, 256 aa, Listeria monocytogenes
MKKIVLIICCGLLLLLGACEDTPEKVQTTTIHISAAASLKDSIDDVKPLFEKANPTIKLSFDFGGSGQIRERVESGAPIDGVLLASKKDADTLIKQNLAEKTKEFAGNELVLIEPKNVDQKTEANLEQLLNDASKIAIGDPESVPAGAYAKQTLENLNLYNAEKAKLVLATDVRQVLSYVEAGNADAGFVYQTDALLSKKVQVKAKIDEKLHDPIAYYSAQVSDSDKKEETATFLDFMNKSEAQKILEKYGFKAAN

SEQ ID NO: 60880 - protein, 617 aa, Listeria monocytogenes
MNLRKDLSEKVLIADGAMGTLLYSYGVDRSFEELNLSHPEDIVAIHKAYIGAGADIIQTNTYGANYIKLARYGLEDEVKRINQAAIRLAKEAARGTGTYIFGTIGGINGAVDARLPAAPLEEIKRSFREQLYCFLLDGVDAILLETYYDLDELKTVLKILRETTDLPVVANVSMHEPGILQNGKKLPDALEELIALGADVVGINCRLGPYHMARALETVPLYDNAYLAVYPNASLPEMQEGKVIYQSDTDYFEHYGEVFRQEGARIIGGCCGTTPDHIRALRKGLETTKPILEKEVRPILELVPEEVEDVDSGERLLDKVKERLTILVELDPPRTFDTTKFFEGAQALDEAGVDAITISDNSLATPRISNMALASILKHEYGIKPLIHLTTRDHNLVGMHSHVMGFHKLGLHDVLAITGDPTKVGDFPGASSVFDLRSVELVQLIKKFNDGISYTGKSLKEKARFHVGAAFNPNVLNLEKAVRLIERKVEYGADYIITQPIYDVNKAILLKEALQKANIDVPLFIGVMPLLSSRNAEFLHNEVPGIRLTDDVRERMREAEEHGHANEEGMAIARELVDAICEHFQGIYIITPFLRYDLSIELAKYAQNKQQVQIGSK

SEQ ID NO: 60881 - protein, 278 aa, Listeria monocytogenes
MNIENTLLKQDVWRFIDNTTINPAFDAIQSFATDDTLCRSVGARMAPSTVRGWVHEKTVSLGIQDSKLPDIDKGIAFLQKQGYRVVVRNSGGLAVVLDSGVLNLSMVLPDAERGIAIERGYETMFTLIKDMFVDCNEVIEAKEIEDSYCPGSYDLSIQGKKFAGISQRRMAKGVAVQIYLAIDGDQTTRSELIRDFYTISGKAKQTKYTFPDVNPNVMGSLSDLMKNDISLNGTLVRLFNSLRHYAGDLVSGTLTSEELDLFPAYYERLIARNDKVLT

SEQ ID NO: 60882 - protein, 77 aa, Listeria monocytogenes
MAEVLEKVTKIIVDRLGVEESKVTLEASFKEDLGADSLDVVELVMELEDEFGVEISDGDAENINTVGDAVKYIEANA

SEQ ID NO: 60883 - protein, 366 aa, Listeria monocytogenes
MTEEVRCIGCGAVIQTEDPDKIGYAPKSSLNNEQVICKRCFRLKHYNEIQDVALTDDDFLRILNQISSKQALIVYVVDIFDFDGSWLPGLPRFAGSNPVLLVGNKEDVLPKSLKRDKLTRWMRTRAKEQGLAATDVVLVSAEKGHGFDTLLEKIDELRNGQDVYVVGCTNVGKSTLINRIIKQASGENNVITTSQFPGTTLDKIEIPLADGNVLVDTPGIINHHQMAHFIDTTTLKAITPKKEVKPAVFQLNEEQTLFLGALARLDYVSGGRKSLVVYVSNNLPIHRTKLEKAEALYEKQAGLVLQPPTEEDMKTLPKLVPYSFTVKEKADIVFSGLGWVTIPEGGAKVTAWVPEGVSATIRTSLV

SEQ ID NO: 60884 - protein, 49 aa, Listeria monocytogenes
MRVNITLECTECGDRNYITTKNKRENPERIELKKYCPRLRRVTLHRETK

SEQ ID NO: 60885 - protein, 237 aa, Listeria monocytogenes
MNKKNKFFDIYLELEQDITSGVYPAGTLLPSENVLAKRFSVSRETIRKALVLLLENGCIQKLQGKGSIVIDRERYSFPVSGLTSFKELQKSEQMNATTEVIRNEETTLPDRIADFAGLPHGSNCLAILRVRYLEGEATILDYDYLLDKTEPIANEILEDSLYQYLENEKGYEISYAQKEITVEPLNAEDKKYLALHGDTHVVVVKSTVFLKDTTLFQYTESRHRLDKFRFIDFARRR

SEQ ID NO: 60886 - protein, 159 aa, Listeria monocytogenes
MNIQIVTVGKLKEKYLVQGIAEYLKRLSAYAKVTIVEVPDEKAPEVLSDAEMKQVKDKEGARILAKIPDDAYVIALAIDGKMKSSEEFAADLDKLATYGKSKVTFVIGGSLGLSEAVLKRSNERISFGRLTLPHQLMRLVLVEQVYRAFRIVRGEPYHK

SEQ ID NO: 60887 - protein, 191 aa, Listeria monocytogenes
MSGKPVIHEFIVVEGRDDTTAINRSVIADTIETNGSALSQETIEKIRHAQELRGVIIFTDPDFPGEKIRKQIDSAVPGCKHAFINRQDALPKAGRGLGVEHASSANIREALENFHTSGAPTEKQFISKDILVHLGLLGGVGAKERREKIGNILKIGYTNGKQLQTRLESFAISEEQLVAACQKIMQEEENE

SEQ ID NO: 60888 - protein, 370 aa, Listeria monocytogenes
MKTKLILLYGGKSAEHEVSLQTAFSVINALDLEKFEAAPIYITNEGEWIQGPLLSGKLDFVEQLRFSATDTIKLATTESEKSEGEAISPAVLEADGQETVVFPLLHGPNGEDGTVQGLFEVLNIPYVGNGVLASSAAMDKIVMKKIFADAGIPQVPAVAVRLIDWKNYQEEMVAEMEEVLTYPVFVKPANLGSSVGISKATNKKELVDAMTEAFLYDRRVVVEQGVVAREIEMGVLGNDTPVCSVPGEILPEGAVATFYDYKAKYQDNNTALIIPTEVDPEILEQMKEYAIQAFLGLDASGLVRADFFLTEDNQLFLNEVNTMPGFTPYSMYPLLWQETGLPYGALIERLVDLAKERHAAKNALKYKLED

SEQ ID NO: 60889 - protein, 827 aa, Listeria monocytogenes
MADKPQTRSQYRNKQSGGSKKKSQKRGKRVAANIFKTIFFVGLFLAFFGIAAGATVFYDYAKDAPKLTDSKLRDPLSSKLLDKDGKVFAEVGTERREYIEYKDIPETLKNAILTTEDARFYEHDGIDPIRLGGAVIANLTDGFGAEGASTLSQQIIKMSYLDYTNKTLARKAQEAWLALQLEEKYSKNDILEIYVNKVYMSDRVHGMQTASEHYFGKNVKDLTLAQTALLAGMPQSPNNYNPYEHPEAAKKRRDQVLTNMYTHDKITKEEMTEAQKTPITTGLRSKKDREDKIYKYDSYVTQVLSEIPKEYDVYRDGLTIHTALDRDAQEYTEKMLNTNEIVNFTDDEMQAGIVLQDTKTGRVQAIGGGRKQKVTRGYNYATQVKRSVGSTMKPIADYGPAFEYLDWSTAHILEDEPYTYSGGTPINNWDFGYKGPISVRQALYQSRNIPALKTLQAVGLDKSEEFVNKLGITYDEGQNVESNAIGANSSNPMQMAGAYAAFGNKGIYNKPHTVTKIVLSDGQTEIDTEPQSTVAMKESTAYMVSDVLKDVLSIGTGTSAAVPGVPAAGKTGTTNIPPEFTSKYYYPSGAARDSWFAGYTTNYSIAVWTGYDDKKKYVSASEQKIAQRMFSKLMAHASAGKTTADFKMPSNVVSVPILKGSNPIARAAQGTSSDKVSYELFLSGTAPTKTASTPEDEKKKAEEAAKKKKAEEDKKKTDEEKKKEEEAKKKAEEEAKKKAEEEAKNLTAPAGLRASYNAGSKQINVSWSAVEGATYEVTVNGSTTTVSSTSVSVSGGNPGDTVSINVVAVKDGKRSPASSTTVKIPDS

SEQ ID NO: 60890 - protein, 511 aa, Listeria monocytogenes
MVKQIMIQGTASDAGKSVLVAGLCRLFKNKGKRVVPFKSQNMSLNSFITATGDEMGRAQVFQAEAAGVFPDVRMNPVLLKPTNDRQSQVIFMGAILDNMDAVTYHDFKQTLIPKIQAVYQSLADENDIIVLEGAGSPAEINLNDRDIVNMGMAKMVDAPVVLVADIDKGGVFASIYGTIMLLNEEERARIKGVIINKFRGDVALLQPGIDMIEELTNVPVIGVIPYANLQLEEEDSVSLNGKNYAPDSNALLDIAIICLPRISNFTDFHSLEIQPEISLRYIRNLADFGKPDLVIIPGSKNTLEDMAFLEESGLKKAIQNFAENAGKVIGICGGYQMLGQKMLDPDQVESKQLEIAGLGLLDTETIFLDQKRTTQITGVTHSGEAVEGYEIHMGETKRGESTSPFCKIKAVNGNEETHQDGAISANKNIIGTYIHGIFDNDVFLGNLFDELLTRKNQSIYPHEIINLKEHKEQEYDKLAALLEANIQMDQLEKIMKGEKICVSTQKPAIKE

SEQ ID NO: 60891 - protein, 262 aa, Listeria monocytogenes
MNLSLEGKTYVVMGVANKRSIAWAIARSLNEAGAKLVFTYADDRAKKSITELVPSLSEVNQNPLILACDVTSEEAITETFETIKDKAGKLSGLAHCIAFANKDFLTGDYLEVDRKSFLQAHEISAYSFTAVARALKHLEMLTEDASLLTLTYLGGERVVENYNIMGVAKASLDASVRYLAMDLGAIGVRVNAISAGPIRTVSARGVSGFSDSISLVEERAPLKRATQAEEVGDTAYYLFSNLSRGVTGEVIHVDSGYHIIGF

SEQ ID NO: 60892 - protein, 504 aa, Listeria monocytogenes
MSIKAEEISSIIKQQIENYHSELKVSDVGTVTYIGDGIARAHGLDNAMAGELLEFSNGVMGMAQNLETNDVGIIILGPYTEIREGDEVRRTGKIMEVPVGEALIGRVVNSLGQPVDGLGPIETTGTRPIEAVAPGVMQRQSVNEPLQTGIKAIDALVPIGRGQRELIIGDRQTGKTSVAIDTILNQADQDMICIYVAIGQKESTVRNAVETLRHHGALDYTIVVTAAASQPAPLLYLAPYAGVAMAEEFMYNGKHVLVVYDDLSKQAAAYRELSLLLRRPPGREAYPGDVFYLHSRLLERAAKLNDSLGGGSITALPFVETQAGDISAYIPTNVISITDGQIFLQSDLFFSGVRPAINAGLSVSRVGGSAQIKAMKTVAGTLRLDLAAYRELESFSQFGSDLDAATRAKLERGKRTVEVLKQDLHKPLKVEKQVLILYALVHKYLDDVPVHDVLRFESEMNTWFDHNHPELLEEIRTTKKLPDEAKLEAALKEFKNTFVPSEEK

SEQ ID NO: 60893 - protein, 435 aa, Listeria monocytogenes
MFILTMGLNHHTAPIDIREKLVFKETEEEMALVTLQQEKSILENVIISTCNRTEIVAVVDQIHTGRYYLKRFMANWFQMDMEKIEPYLFFHEETEAVNHLYKVTAGLDSLVLGETQILGQVKHAFEIAKQTETTGTLLNKLFREVVTFAKKVHHHTKINENAVSVSYAAVEVAKKLYGSLDNKKIVLVGAGEMSELALQNLAGSGIADITIINRTKSNAELLANQFQAKVGAYENMNEHLMLADIVLVSTSATEPIIKQAAMQDLMEQKASSMLVIDIGLPRNVEHDCSYIPNFHLYDIDDLAGVVSANSLERQRIVLELENTIEVEVRNFFEWEKQLGVVPVIRALREKALDMQEVAMTSLENKLPGLTEREYIQIGKHMKSIINQMLKQPISELKEMSVEEDATTSIEHFKRIFGLSETDVTVIEKEQAETRS

SEQ ID NO: 60894 - protein, 419 aa, Listeria monocytogenes
MFKFNDEKGQLKCSFCGKTQDQVRKLVAGPGVYICDECIELCNEIIEEELGISEFVDFGEVPKPQEIRHILSDYVIGQERAKKALAVAVYNHYKRINSNETKEDEVELSKSNICLIGPTGSGKTLLAQTLARILNVPFAIADATSLTEAGYVGEDVENILLKLIQSADYDVEKAEKGIIYIDEIDKVARKSENPSITRDVSGEGVQQALLKILEGTVASVPPQGGRKHPHQELIQIDTGNILFIVGGAFDGIEQIVKNRMGEKVIGFGTDNAKLKDDETYLSRVVPEDLLKFGLIPEFIGRLPVIATLEQLDEAALVSILTEPKNALVKQYKRMLELDDVELEFEPTALIEIAKEAIERKTGARGLRSIIEQIMLEVMFEIPSRDDITKCIITEKAARGEEEPQLQLEDGSIIPIKTSA

SEQ ID NO: 60895 - protein, 140 aa, Listeria monocytogenes
MKITTKGRYGLTITLELAKRIGDGPISLRSIAQDKNLSEHYLEQLIGPLRNAGIVKSIRGAHGGYVLNGDPEKITAGDIIRTLEGPIVLVESMEDEEAAQRELWTRMRNAVRDVLDQTTLADLLKHSTDSELTDGYMFYI

SEQ ID NO: 60896 - protein, 544 aa, Listeria monocytogenes
MAYSFKLPDIGEGIHEGEIVKWFVQPGDKIEEDESLFEVQNDKSVEEITSPVSGTIKEIKVAEGTVATVGQVLVTFDGVEGHEDDAEEESAAPKAESTESTPAPAQASGKGIFEFKLPDIGEGIHEGEIVKWFIQPGDKVEEDQSIFEVQNDKSVEEITSPVDGTVKDILVSEGTVATVGQVLVTFEGDFEGEASHESTPESPAEDAALANNDATSAPATGGNGTPSSKKDPNGLVIAMPSVRKYAREKGVNIAEVAGSGKNNRVVKADIDAFLNGEQPAAATTTAQTEEKAAAPKAEKAAGKQPVASSDAYPETREKLTPTRRAIAKAMVNSKHTAPHVTLMDEIEVTALMAHRKRFKEVAAEKGIKLTFLPYMVKALVATLRDFPVLNTTLDDATEELVYKHYFNVGIAADTDHGLYVPVIKNADKKSVFQISDEINELAGKARDGKLTADEMRHGSATISNIGSAGGQWFTPVINYPEVAILGVGRIAQKPIVKDGEIVAAPVLALSLSFDHRVIDGATAQKAMNNIKRLLNDPELLLMEV

SEQ ID NO: 60897 - protein, 321 aa, Listeria monocytogenes
MVGIILATHGEFAEGILQSGTMIFGEQENVKAITLMPSEGPEDIKAKMEAAIASFDSQDEVLFLVDLWGGTPFNQANGLYELHKDKWAIVAGLNLPMLIEAFSSRFTMESAHEIAANILAPAQEGVRVKPEELQPQVTATEQPQAEIAAVGDGKIEFVLTRVDSRLLHGQVATAWTKATHPTRIIVVSDAVAKDDLRKKLIEQAAPPGVKANVIPVQKMIEISKDPRFGNTKALLLFENPQDVLRAIEGGVEIEQVNVGSMAHSVGKVVVSKVLSMGKDDVETFEKLKEKGVKFDVRKVPNDSSANMEDIIKKAKHELKTQ

SEQ ID NO: 60898 - protein, 434 aa, Listeria monocytogenes
MEKSVNVIGAGLAGSEAVWQLVNRGVKVDLYEMRPVKQTPAHHTDKFAELVCTNSLRANGLTNAVGVIKEEMRMLDSIIIEAADKASVPAGGALAVDRHEFSGYITDKVKNHPLVTVHTEEVTTIPEGPTIIATGPLTSPALADEIKQLTGEEYLYFYDAAAPIIEKDSIDMDKVYLKSRYDKGEAAYLNCPMSEEEFNAFYEALVTAETAALKEFEKEVFFEGCMPIEVMAKRGIKTMLFGPLKPVGLEDPKTGKRPYAVLQLRQDDAAGTLYNMVGFQTHLKWGEQKRVFGMIPGLENAEIVRYGVMHRNTFINSPTVLEPTYQLKTRNDLFFAGQMTGVEGYVESAASGLAAGINAANFIQEKELVVFPTETAIGSLAHYITSASKKSFQPMNVNFGLFPELETKIRAKQERNEKLAERALNAIKKVAEEL

SEQ ID NO: 60899 - protein, 378 aa, Listeria monocytogenes
MPNILDSLWNSMALFLSALFFHGMALRSIREKKPAWFQIKFANEFINYALGIYYGLLGVYFIIRGLPGTDSGIYTDMLLNILIVLHLFSSAGPATIALLLIVSGKLFLGDALFANLIYVFLIIGFHFVCMEVAKLRLSSVQKVVLVKLSAIPLMLFYLHQKIHLAYTMNDLPVWILYFLVSFFITFIIVSAAYYIDTSNKLIYDLQQSTILDPLTGLTNFRHFENAFDAAFNHATLKKSNLSVIIIDIDYFKRVNDTYGHLVGNGVLSTFSQMLLKISFPPNTVISRIGGEEFAIILPNINVSETEHLAEKIRRKVEKIDVPIVASGSVITISAGIANYDGRNYPSANELLNAADQALYNAKRNGRNQVHIRETEPVI

SEQ ID NO: 60900 - protein, 421 aa, Listeria monocytogenes
MTDKKSENQTEKTETKENKGMTRREMLKLSAVAGTGIAVGATGLGTILNVVDQVDKALTPKEKAETGVPFYASNQAGIITAQQTYCYIASFDIQTESRQILQDLFVKWTKFADLTTSGGVLRDVDNDMLPPNDTGEADGLGISNFTVTLGYGPTFFEKDGKDRFGVKAKKPKYLEKIPHMAHDSLDEAYSDGDLCIQVCADDQQVAFHGIRNFIRLASGVAVVRWIEEGFLSAPKNETPRNLFGFKDGTANVDHDSNKGYKDVVWAEKDEPEWMRNGSYLGYRKIQMLIEIWDRSSLLDQEDTFGRKKASGAPYHKKHEHDKVDPSKLPADSHVRLAKDTKQQMHRRAYSYTNGIDKSTGTIDAGLLFICFTQNPAKQFLPMLSIMGKMDKLNEYTVPIGSAMFACQGGLAPGEIFGEKLL

SEQ ID NO: 60901 - protein, 271 aa, Listeria monocytogenes
MKKWKRDHLGMVMGILNVTPDSFSDGGKYMQVEEAVARALQMAEDGAAIIDVGGISTRPGFSEVTPDEELARIIPVIKAVRTKLPDIWISVDSWRAEVAEQAILAGADMINDQWGAKKEPKIAEVAAKYDVPICLMHNRENAQYDNFLEDVKKDLLESIAIAKAASVPDEHIILDPGFGFVKTPAQNLEVLRRIDEIVALGYEVLLGTSRKSTIGLVLGTTPGDRMEGTGATTVYGFSKGCTITRVHDVLPIARMVRMTDAITGKLDITNL

SEQ ID NO: 60902 - protein, 430 aa, Listeria monocytogenes
MKITINQASEFVGKEVTIGAWLANKRSSGKIAFLQLRDGTGFMQGVVVKAEVGDDIFATAKALTQETSLYVTGTINEDTRSPFGYEMAVSSVEVISESHDYPITPKEHGTEFLMDHRHLWLRSNRQHAIMKIRNEIIRASYEFFNKEGFLKIDPPILTGSAPEGTTELFHTKYFEEDAFLSQSGQLYMEAAAMAFGKVFSFGPTFRAEKSKTRRHLIEFWMIEPEMAFYKLEDSLQVQENYVAFLVKAVLDNCRLELDRLGRDVSHLEKMVAPFPRITYTEAIERLHELGFDDIVWGDDFGAPHETAIADSFEKPVFITHYPKAIKPFYMPEDPENDQVVLCADMIAPEGYGEIIGGSERIHDLETLQARMEDFDLDQEAYSWYLDLARYGSVPHSGFGLGLERTVAWISGTEHVRETIPFPRLLNRLYP

SEQ ID NO: 60903 - protein, 119 aa, Listeria monocytogenes
MITKIDKNKVRKKRHARVRSKISGTESRPRLNVFRSNKNIYAQIIDDVNGVTLASASNLDKDFGSAESKVDAASKVGELVAKRASEKGITSVTFDRGGYLYHGRVKALAEAARENGLEF

SEQ ID NO: 60904 - protein, 289 aa, Listeria monocytogenes
MKVLVNNHLVEREDATVDIEDRGYQFGDGVYEVVRLYNGKFFTYNEHIDRLYASAAKIDLVIPYSKEELRELLEKLVAENNINTGNVYLQVTRGVQNPRNHVIPDDFPLEGVLTAAAREVPRNERQFVEGGTAITEEDVRWLRCDIKSLNLLGNILAKNKAHQQNALEAILHRGEQVTECSASNVSIIKDGVLWTHAADNLILNGITRQVIIDVAKKNGIPVKEADFTLTDLREADEVFISSTTIEITPITHIDGVQVADGKRGPITAQLHQYFVEEITRACGELVFAK

SEQ ID NO: 60905 - protein, 430 aa, Listeria monocytogenes
MLERYTRKEMGNIWTEQNRYQAWLEVEILACEAWAELGDIPKEDVAKIRANAKFDVDRIHEIELETRHDVVAFTRSVSESLGAERKWVHYGLTSTDVVDTANSYLLKQANEILRKDLENFIAIIGEKAKEHKYTVTMGRTHGVHAEPTTFGLKLALWYEEMKRNLERFNFAADGVEFGKISGAVGTYANIDPFVETYVCEKLGTTPAPISTQTLQRDRHAEYLATLALIATSVEKFAVEVRALQKSEVREVEEFFAKGQKGSSAMPHKRNPIGSENVTGLARVIRGHMVTAYENVPLWHERDISHSSAERIILPDSTILLDYILNRFGNIVKNLTVFPENMKRNMDRTLGLIYSQRVLLALIDKGLAREAAYDVVQPRAMEAWEKQVPFRELVEQDATITENLSAEEIADCFDYNYHLKNVDLIFDRLGL

SEQ ID NO: 60906 - protein, 120 aa, Listeria monocytogenes
MSNVAYKSNLEPNRVHREAEQPKKQILKRGQMTLGEKVIITIALAIVLVVAFRIISVQAQIYTVNQEIQTKETKILEQQKSNEDLKVEVKDLGRYERILKIAKEKGLKLDGDNVKVVDGQ

SEQ ID NO: 60907 - protein, 866 aa, Listeria monocytogenes
MAIKENAAQEVLEVQKVIDRLADNGQKALKAFESYNQEQVDNIVHAMALAGLDQHMPLAKLAVEETGRGLYEDKCIKNIFATEYIWNNIKNNKTVGVINEDLQTGVIEIAEPVGVVAGVTPVTNPTSTTLFKAIIAIKTRNPIIFAFHPSAQRCSSAAAKVVYDAAIAAGAPEHCIQWVEKPSLEATKQLMNHDKVALVLATGGAGMVKSAYSTGKPALGVGPGNVPAYIDKTAKIKRSVNDIILSKSFDQGMICASEQAVIVDKEVAKEVKAEMEANNCYFVKGAEFKKLESYVINPEKGTLNPDVVGKSPAWIANQAGFKVPEDTKILVAEIKGVGDKYPLSHEKLSPVLAFIEAANQAEAFDRCEEMLVYGGLGHSAVIHSTDKEVQKAFGIRMKACRIIVNAPSAQGGIGDIYNGFIPSLTLGCGSYGKNSVSQNVSATNLLNVKRIADRRNNMQWFKLPPKIFFEKYSTQYLQKMEGVERVFIVTDPGMVQFKYVDVVIEHLKKRGNDVSYQVFADVEPDPSDVTVYKGAELMKDFKPDTIIALGGGSAMDAAKGMWLFYEHPEASFFGLKQKFLDIRKRTFKYPKLGGKAKFVAIPTTSGTGSEVTPFAVITDKENNIKYPLADYELTPDVAIVDAQYVTTVPAHITADTGMDVLTHAIESYVSVMASDYTRGLSIRAIELVFENLRESVLTGDPDAREKMHNASALAGMAFANAFLGINHSLAHKIGPEFHIPHGRANAILMPHVIRYNALKPKKHALFPRYESFRADEDYARISRIIGFPAATTEEGVKSLVDEIIKLGKDVGIDMSLKGQNVAKKDLDAVVDTLADRAFMDQCTTANPKQPLVSELKEIYLEAYKGV

SEQ ID NO: 60908 - protein, 171 aa, Listeria monocytogenes
MSKDMLVNDGIRAREVRLIDQDGEQLGVKSKIDALQIAEKANLDLVLVAPTAKPPVARIMDYGKFRFEQQKKDKEARKNQKVIVMKEVRLSPTIDEHDFDTKLRNARKFLEKGDKVKCSIRFKGRAITHKEIGQKVLDRFAKACEDLCTIEQRPKMDGRSMFLVLAPLHEK

SEQ ID NO: 60909 - protein, 121 aa, Listeria monocytogenes
MARIAGVDVPREKRIVISLTYIYGIGKQTAKEVLAEAGVSEDTRTRDLTEEELGKIREILDRIKVEGDLRREVNLNIKRLIEIGSYRGMRHRRGLPVRGQNTKNNARTRKGPSKTVAGKKK

SEQ ID NO: 60910 - protein, 457 aa, Listeria monocytogenes
MSKRYAVVLAAGQGTRMKSKLYKVLHPVCGKPMVEHVVDQISTLNVDKVVTIVGHGAEKVQEHLAGKSEFVKQDEQLGTAHAVLQAKAELAGKDGVTLVVCGDTPLIEASTMEALLKYHHEKRAKATILTTVIEDPTGYGRIIRDDLGIVEKIVEHKDATEKEQRISEINTGTYCFDNKALFEALENVSNDNVQGEYYLPDVIKILKDSDEVVAAYRMESFEESLGVNDRIALAEASKLMQRRINENHMRNGVTLVNPESTYIDIDVKIGQDTVIEPGVMLRGKTVIGDDCVVTSGSEIVNSVIGERVHVRTSSIFESKVGDDVQIGPYAHLRPESDIHDHVKIGNYVETKKAVVGEGTKLPHFIYMGDAEIGKNVNVGCGSIAVNYDGKNKAKTIIGDNVFVGCNSNLIAPVKVGDRAFIAAGSTITKDVPEDALGIARAKQDNKLGYAKHLNHSK

SEQ ID NO: 60911 - protein, 147 aa, Listeria monocytogenes
MTSRKLDQLYRQVIMDHYKNPRNNGELPDSDVTIDLNNPTCGDQIHLHLKMDGDKIVAAKFTGSGCSISMASASMMTQSIIGKTEKEALKMSREFSEMVQGHDHETIDEYGDVEALAGVAKFPARIKCATLSWKAMERAIFEKEGTK

SEQ ID NO: 60912 - protein, 97 aa, Listeria monocytogenes
MKKLNELSKSDLLLIFQALSDPIRLDIFLCLLKSKEKRFSGTTYNISKSTMSHHIKLLKEAKLINLRKEGTTHIYSVNQELVSLISHFFEECGEKDE

SEQ ID NO: 60913 - protein, 88 aa, Listeria monocytogenes
MANVVVWSKEGCHYCKDVKDFLIEQKIVFQDIDVTDHDYLREVLQAKYGICHVPVVEIGNIENGTYQAVTEIGLEHLEKALFEKGEVK

SEQ ID NO: 60914 - protein, 170 aa, Listeria monocytogenes
MEQILLVDGYNVIGAWPELSYLKDRDLEAARDKLVEWMAEYQSYTGYRVVVVFDAQFVRGVKRKSKKYQVEVVFTHEDETADEYIEQKAIEWKNVRTQIMVATSDYTEQWAIFGQGALRISSRELLFEIQEMSKQIGKKIKRIQEEMPKSNLNLDSDVISQLEKWRRGEE

SEQ ID NO: 60915 - protein, 423 aa, Listeria monocytogenes
MDTLLSGVQYVLNLGPTVILPIMIFFIALIFRVPAKKALRSAITIGIGFVGINLVISLLSSNLGPAAQQMVERFGLNLTIIDAGWPAAAAASWASPVAAILIPICLVVNLALIFFKVTKTLDIDIWNYWHFIAAGATGYIVTGGNWWFAILCAIIYEVAVLWMADRTQPMVEEFYGLKGISLPTGSTAAFGFIGIPVGWLIAKIPGIKNIHVDPETIQKRFGIFGEPMMMGLILGIAIGILAGYDVGAVAQLGMSMGAVMFLMPRMVKILMEGLIPISESAREFMKSRFKGRELYIGLDAALSIGHPANISTGLILVPITLFLAVIIPGNKVLPFGDLATIPFYVSFVVASRKGNILHSVLAGTVVIALALLMATDFGLVHTEMMKGVYEFPKGATQVSTLDMGGNFFNWVILKFSQAWAAIF

SEQ ID NO: 60916 - protein, 209 aa, Listeria monocytogenes
MANVHVINHPLVQHKLTIIRDKNTGTKAFRELVDEVATLMAYEITRDMELEDIQVETPLQTTTAKTLTGKKLGIVPILRAGLGMQDGILKLIPAAKVGHVGLYRDHDTLEPVEYFVKLPSDVEERLFIVVDPMLATGGSAIMAIDCLKKRGARNMKFMCLVAAPEGVKALQDAHPDVEIYVAGLDEKLDENGYIRPGLGDAGDRLFGTK

SEQ ID NO: 60917 - protein, 266 aa, Listeria monocytogenes
MIEKLILGRFVPGESLIHGLDARTKLLAGFYYIGILFLANNWWTYALMVLFTLMVVQMTGIKLKVFIKGVKPLIWLILFTVVMQILFASGGTIYFDWGPFTISSFGLLNGVFVFLRFVLIIIMSTVITLTTTPMNLTDAIAYILRPFAVLKVPVNDIALMISVALRFIPTLMGETDKIMKAQRARGVDFGEGNLFEQMKVVVPIFIPLFVSSFNRAEELADAMEARGYQGGEGRTRFRILHWHLGDLIAACVMILLTAGLVILRTS

SEQ ID NO: 60918 - protein, 692 aa, Listeria monocytogenes
MADYLVIVESPAKAKTIEKYLGKKFKVKASMGHVRDLPKSQMGVDTENDYEPRYITIRGKGPVLKELKQAAKKAKKVYLAADPDREGEAIAWHLANSLELDQSDKLRVVFNEITKEAVKESFKTPRKIDMDLVNAQQARRILDRLVGYNISPILWKKVKKGLSAGRVQSIALRIIIDREKEINNFKPEEYWTIDGNFLKGKKKFQANFYGVNGKKKKLSTADDVKEVMSAIKGKSFDVTDVTKKERLRNPAAPFTTSSLQQEAARKLNYRTRKTMMLAQQLYEGITLGKQGTVGLITYMRTDSTRIADSAILEASNYIKETYGPEFSRNHKRSDKNAKGAQDAHEAIRPTSAMRSPQEVKEYLTRDQLRLYRLIWERFIASQMTPAVLDTMRVDLDNNGVNFRANGSKIKFHGFMKVYVESNDDNTEEKENILPDLKKGDKVQSESLEQRQHFTQPPPRYTEARLVKTLEEIGIGRPSTYSPTLDTIQRRNYVSLTNKRFIPTELGEIVNEMIEEYFPEILDVKFTANMESELDEVEHGEVEWVKVIDEFYKRFEPNVIKADAEMEKIEIKDEPAGIDCDLCGAPMVYKMGKYGKFLACSRFPDCRNTKAIVKEIGVTCPKCEKGHVIERKSKKKRIFYGCDRYPDCDYVSWDKPVERACPKCEKRALVEKKLKKGVQVQCTNCDYKESTQQ

SEQ ID NO: 60919 - protein, 393 aa, Listeria monocytogenes
MNDVFLKALPVLQKLTTAGFEAYFVGGSVRDYLLNRTISDVDIATSAFPEEVKEIFQSTYDTGIAHGTVTVRENNEFYEVTTFRTEGTYEDFRRPSEVKFIRSLEEDLQRRDFTMNAIAMDEHFALHDPFSGQEAIKNKAIKAVGKASERFHEDALRMMRGVRFLSQLDFQLDSETEKALESQIGLLQHTSVERITVEWLKMIKGPAIRRAMDLLLKVEMETYLPGLKGEKKALTEFGSWDWGKRTTDDAIWLGLVVTVQPNNVNAFLKAWKLPNKTIQLVSKAYQYALKMKETWLAEELYHAGKAVFSLVNELNIIRGKENNQHKLSQAYEALPIHSKKDLAITGADLLKWSGESAGPWVKETLDKLECGVLCNEINNEKNQIKRWLGYHEE

SEQ ID NO: 60920 - protein, 860 aa, Listeria monocytogenes
MTEYTPMIKQYLEIKDKYQDAFLFFRLGDFYEMFFEDALNASQILEITLTGREGGTKEKIPMCGVPYHSASGYIDTLIEKGYKVAICEQVEDPKTTKGMVKREVVQLISPGTVMDERGLKAKENNYIASLYCYEGKEYGFAYSDLSTGELKSTVIEASEDRLINELTTLSTRELIVSSSEKEVLSDVMKEQLGLTFSVHEEDTIPAENEKLVTRHMSLSEKRAIGKLLHYLKETQKRDLGHLQQAVHYETSNYMKMDYYSKRNLELAESIRGKGRQGTLLWLLDNTQTAMGGRMLKQWIDRPLIDRKKIIERQNDVSELMAHFFERLELVENLKNVYDLERLAGRVAYGNVNARDLIQLRNSLYQIPRIRATLLSMSSESLTELAEQLDPCEELTEKLEEAIMDSAPISIREGGIIKDGYNSQLDTYRDASRNGKTWIAELERKERELTGIKTLKVGFNRVFGYYIEVTRANTHLLPEGRYERKQTLTNAERYITPELKEKEKLILDAEEKSMELEYQLFSEVREMVKDYIERLQKLAKSVSEIDCLQSFADISEKNHFIRPTLSEDGSLHVKQGRHPVVEKVMGAQSYVANDCDLDENREILLITGPNMSGKSTYMRQVALTAICAQVGCFVPAEEAILPIFDQIFTRIGAADDLIAGQSTFMVEMLEARNAIVHATKDSLILFDEIGRGTATYDGMALAQAIIEYIHENVHAKTLFSTHYHELTDLEKELRGLQNIHVSAVEENGKVVFLHKIKEGPADKSYGIHVAELAELPKSLIERASRILEQLENDDKKIIIASVKQPEEVHEEVQLSMFPLEPEKKASSKETKLLKEIASMNIMQMTPMDAMNKLYELQSKIH

SEQ ID NO: 60921 - protein, 610 aa, Listeria monocytogenes
MHKMRFFQSVQFKLVIMYLLLIIVAMQVIGAYFVRELEGQLEKNFQDSITNSITLLDYNAREEIIKNSDNSVKLQNDIRELLVDYSRASSNLIEVRIVDDKGKILGTSNLNNQGIVGQKSNDPLVKRTLSLGTTSEDKIYKDESNKNNRVWVNVSSIKNKGQVIGAIYLVADIESVYKQVDDITNIFITGTLIAMIITAVLGILLSRTITKPIVEMKRQAYAMARGNYSRKVKVYGVDEIGELADSFNTLTKRVQEAQAMTEGERRKLSSVLAYMTDGVIATDRRGKVILINTPAEKMLRVKHESANGRSIIDVLDIGDTYQFEDLMEVDGSLTMDRSTLDKPYVLRANFSVIQRETGFNNGVIAVLHDITDQEKVDQERRDFVSNVSHELRTPLTSMHSYLEALSDGAWEDKEIAPRFLEVTQNETERMIRLVNDLLKLSRMDGGREQLEKSFVNFTDFFNHIIDRFEMMKKETIMFKRHIPREPVIIEIDEDKVMQVLDNIISNANKYSPDGGRISFYLKKFEDEIEVSIADEGLGVPDEDLANVFDRFFRVDKARSREMGGTGLGLAIAREVIEAHGGRIWAERNKNKGTIIKFTLPYSDLPEDDWE

SEQ ID NO: 60922 - protein, 245 aa, Listeria monocytogenes
MKIDILSIFPDMFSGVTGNSIIKKAIENERVAVEVTDFREYAEGKHHIVDDYPYGGGAGMLLKAQPIFDAVQAVKEKQPETKPRVILMDPAGKRFNQKMAEEFAEEEHLVFICGHYEGYDERIREHLVTDEVSIGDYILTGGEIGAMIVMDSVIRLLPGVLGNKDSAVTDSFSTGLLEHPHYTRPADFRGMKVPDILLSGNHAWIEEWRDKESLKRTYERRPDLLKNYPLTDKQKTWLKEWSDSK

SEQ ID NO: 60923 - protein, 276 aa, Listeria monocytogenes
MKKVLGLIFTLSLVLVLTACGGSSDKASSSKDDKQLVVGASNTPHAQILEQAKPILKDKGIDLKIVKYTDYVMPNKALEEGDLDANYFQHKPYLELEEKEKGYKFADVGAIHIEPMGIYSKKVKDIKDLKDGAQVLLSNSKSDWPRVIGIFVDNGLLTLKDGVKPQDATFDDIKDNPKNLKFKYDFDPAYLMTAYNNEEGDVVAINSNFVVDQGLNPSKDAIAIESKDSPYANIVVTTEKKKDDKNITELVKVLHSKEIQDYITKEWDGAVVPVDK

SEQ ID NO: 60924 - protein, 366 aa, Listeria monocytogenes
MALTAGIVGLPNVGKSTLFNAITKAGAEAANYPFATIDPNVGIVEVPDHRLNKLTELVKPKKTVPTTFEFTDIAGIVKGASKGEGLGNKFLSHIRQVDAICHVTRCFDDENITHVEGRVDPLDDISTINLELILADLETVEKRIGRVEKLSKQKDKDAVAEYNVLVKLREAFENDKPARAIEFNEEEEKIVRNLFLLTRKPVLYVANVSEEDVSSPDDNKYVQQVREFAASENSEVIVVCARAEEEIAELEDEDKLEFLEALGIEESGLDQLIRSAYTLLGLATYFTAGVQEVRAWTFIKGMKAPQCAGIIHTDFERGFIRAEVVAYDALLEYGSEQAAKEAGKVRLEGKEYEMKDGDVVHFRFNV

SEQ ID NO: 60925 - protein, 394 aa, Listeria monocytogenes
MKNLVKVKVFPKFTKGYKEGYPLILKERMEKWPKELQEGDVLELTDTNGQFIARGYHGEQNKGSGWLFTWDKKQQLDEDFLTNLITTAIEKRQFLFADDSTTAFRIFNGEGDGLGGFTVDFYDGYLVIQWYSLGIYAFQKMIIDIFLSFPEIKGIYEKRRFQEDTKDDFVAGQKATFPLIIKENGINYATYLDDGWMTGIFLDQRDVRRRISEDYSVSKNVLNTFSYTGAFSVAALFGGASKTTSVDVAGRSLSKTKEQLEVNGLDPNEQAIIVEDVFHYFKYAARKQLTFDLVVVDPPSFARTKKVTFRAAKDYPAMLREIIDITAPNGTIIASTNYAGFGMKAFKKLIAEAFQTSDRTYKIVETHSLPTDFTVNKNFPEGNYLKVLFLTLDI

SEQ ID NO: 60926 - protein, 413 aa, Listeria monocytogenes
MVYLQKQDKEVFDAIKLELGRQRANIELIASENFVSEQVMEAMGSVLTNKYAEGYPGKRYYGGCEFVDIVEDLARDRAKKLFGAEYANVQPHSGAQANMAVYHTVLEPGDTVLGMNLSHGGHLTHGSPVNFSGVLYNFVEYGVREDTKEIDYDIVREAALKHKPKMIVAGASAYPRKIDFAKFREIADEVGAYLMVDMAHIAGLVAAGLHQNPVPYADFTTTTTHKTLRGPRGGMILAKAEWEQKLNKSIFPGIQGGPLMHVIAAKAVAFGEALQPEFTTYCEQIIRNSKKLAETLQANDVAVLTGGSDNHLLLIDLKPLGLTGKAAEKVLDEVGITVNKNTIPFETESPFVTSGIRVGVAAVTTRGFDEVAIEKVGVLISEVLHNLENEEVLADVKARVATLTNEYPLYPSL

SEQ ID NO: 60927 - protein, 395 aa, Listeria monocytogenes
MAKEKFDRSKPHVNIGTIGHVDHGKTTLTAAITTVLAKKGYADAQAYDQIDGAPEERERGITISTAHVEYQTDSRHYAHVDCPGHADYVKNMITGAAQMDGAILVVSAADGPMPQTREHILLSRQVGVPYIVVFMNKCDMVDDEELLELVEMEIRDLLTEYEFPGDDIPVIKGSALKALQGEADWEAKIDELMEAVDSYIPTPERDTDKPFMMPVEDVFSITGRGTVATGRVERGQVKVGDEVEVIGIEEESKKVVVTGVEMFRKLLDYAEAGDNIGALLRGVAREDIQRGQVLAKPGSITPHTNFKAETYVLTKEEGGRHTPFFNNYRPQFYFRTTDVTGIVTLPEGTEMVMPGDNIELAVELIAPIAIEDGTKFSIREGGRTVGAGVVSNISK

SEQ ID NO: 60928 - protein, 294 aa, Listeria monocytogenes
MSDYLVKALAYDGMARVYAAVTTETIKEAQRRHDTWSVSSAALGRTMTGTLFLGAMQKEDQKITVKIEGDGPIGPIVADSNAQGQIRGYVTNPHVHFSELNEAGKLDVRRGVGTSGMLSVVKDLGFGENFTGQTPIVSGEIGEDFTYYLATSEQINSSVGVGVLVNPDDTIEAAGGFMLQLLPGATDEIIDEIEKNLMALPTVSRMIEAGETPESILAKLAGGEDKLQILEKIPVSFECNCSKERFGSAIISLGKEEIRSMIEEDHGAEAECHFCRNTYDFSEEELKTLYEEAK

SEQ ID NO: 60929 - protein, 436 aa, Listeria monocytogenes
MAKPVVAIVGRPNVGKSTIFNRIVGERVSIVEDVPGVTRDRIYNSAEWLGKEFNIIDTGGIDLSDEPFLEQIRAQAEIAIDEADVIIFITNGREGVTDADEQVAKILYRSNKPIVLAINKVDNPEMRDQIYDFYSLGFGEPYPISGSHGLGLGDMLDAVRAHFPKEEEEEYPDDTVKFSLIGRPNVGKSSILNALLGEDRVIVSDIAGTTRDAIDTTYTFDGQDYVMIDTAGMRKRGKVYESTEKYSVLRAMRAIERSDVVLVVINAEEGIREQDKRIAGYAHDAGRAIIIVVNKWDAINKDEKTINVWTEDIREQFQFLSYAPIVFVSAKTKQRLNNLFPLINQVSDNHSLRVQSSMLNDVISDAVAMNPSPMDKGKRLKIFYTTQVAVKPPTFVVFVNDPELMHFSYERFLENRIREAFPFEGTPIRVIARKRK

SEQ ID NO: 60930 - protein, 68 aa, Listeria monocytogenes
MEKLTLNVEGMTCSHCEARVTKALSEVNGVKSAVVSLDEGTATVEFEKGQVMEDALIDAVEEAGYEVA

SEQ ID NO: 60931 - protein, 160 aa, Listeria monocytogenes
MIIFVWAQDRAGNIGKDNKMPWHLPGDLQFFKKTTTGKTLVMGRKTYESLGKALPNRKTIVLTRDQGLKLDDAEILHSKEAVLALAETGEPIYIVGGAEIYRLFMDVADQLIVTKIDAEFEADTAFPEVDWENFSEVAKEFHEKDEKNKYNYTFYTYERN

SEQ ID NO: 60932 - protein, 271 aa, Listeria monocytogenes
MLTKKPEINTILQVTPDPHSLPAAMATEDLHVYYGDNHAIKGVDLTFPENKVTALIGPSGCGKSTYLRALNRMNDEIDGCRMEGQILYDGININRKEVDLYNVRKEIGMVFQKPNPFTKSIYENVAFGLKRHGMKNKKEIMERVEKSLRRAALWDEVKDDLGKSALSLSGGQQQRLCIARAVAMQPKVLLLDEPASALDPISTSKIEDLINELKNKYTIIIVTHNMQQAARVSDYTSFFYLGEVVEFSGTSELFTNPQEKQTEDYISGNFG

SEQ ID NO: 60933 - protein, 321 aa, Listeria monocytogenes
MTETRTEKKKKTTSTFTKVMKIASVALLGIIFFSITGLAAKYYITVQNTFSKINVPLESSNKTLSDLEKKKPFSVLLMGSDARAGEKNGRADTIILATANKQQNAVEMVSIPRDTKVDYGNGDIGKINASYSNGGPSGTVSAVEKLMPGVPVDYFISINMEGFKDLVDAVGGITVYNDIDLTEVNSKFVKGNITLNGTEALQYVRIRHEDPRGDFGRQDRQRDVIIGIANKVISSSGVSNFESIMKAVGDNFQTNMTLTDITSMAANYSSVLKNVDSQELKGEGEMIYSESYGFDLYYFAPDKTDLERIITMFKKSLDITE

SEQ ID NO: 60934 - protein, 274 aa, Listeria monocytogenes
MNLKDTVKLANGVEMPRLGFGVWKVQDGDEAVNSVKWAIEAGYISIDTAAAYKNEEGVGQAIKESGIKREDLFVTTKLWNAEQGYESTLAAFDESLRKLELDYVDLYLIHWPVKGKFKDTWRAFEKLYKDKRVRAIGVCNFHEHHLKELMEDAEIAPMVNQIELHPQLTQEPLRKFCAENNIVVEAWSPLGNGKLLSNPEIKAIADAHGKSVAQVILRWDLQIGVVTIPKSVHQERIIQNADIFDFELTEEEVAKISGLNKDERTGPDPDNFNF

SEQ ID NO: 60935 - protein, 798 aa, Listeria monocytogenes
MAEQESLALFDDTTEELFMKGTMLSTIFYNAENLFSVVRILVKETNADWDEKDIIVTGFFPALHEQEVYTFYGKMQEHAKFGQQFKADRFRKEMPQSRAGLINYLSGELFKGIGKVTAENIVDTIGDDAITKILSDPSLLNTVPKLPSGAAESLLASLRENQGLEHVMVGLNEYGFGPQLSMKIFQAYKQNAIEVLENNPYKLIEDVKGIGFQRADELGRKLGLGGNHPERLRAGILFMLDSVCMQQGHVYMEQEVLLGEVTYLLEESEGIRIDQSILVAQVEKLAEEQKIITENTRVYMPSLYYSESGFAYHVKRMLKQTEYQEQFPQSEFLLALGELEERIGVHYGDSQRQALEQALMSPMLVLTGGPGTGKTTVIKGIVELYAELNGVSLDPHAYKDGATFPVLLAAPTGRAAKRMSESTGLPAMTIHRLLGMNGQEQMDDDAERLIDGRLLIVDEMSMVDIWLANQLFRALPAHMQVVLVGDQDQLPSVGPGQVLKDILQSEQIPTVALSDIYRQKDGSSIIEMAHYIKEGMLPADFTKNSADRSFFHCTVNQIGDVVEQVVKNAKNKGFRAKDIQVLAPMYRGPAGIDILNKKLQEIFNPNDTGRRKEVQFGDIKYRVHDKVLQLINQPEKNVFNGDIGEIVSIIYAKENTEKQDLIVVQFDQTEVSYYRQEFNQLTHAYCCSIHKAQGSEFPIVIMPIVRSYYRMLRRDLLYTGVTRSKQFLILCGEEEAFRMGIERIDENKRNTTLSERLMSEDVLLEQMTNKRILTAENITEIDPMIGMEGITPEQFMVG

SEQ ID NO: 60936 - protein, 483 aa, Listeria monocytogenes
MTTSPFSLKSRSLKFKWTFGASAAIFLTFFLFSYAIYQGIGQMLLNEEEPEVKELLLATTSTLTNQDLTDNEEIKYLFNNDKTVNRKLQDQVINLYDKDGHFINKYYFSRSQDITSIDFSQYFVSGTDKFIMNKPTIDGQKMMTAQMPIVADDNTTVIGYAQVVNPLTSYNRMMDRLLVTMILLGAVALFISGMLGYLLAQNFLNPLTRLARTMNDIRKNGFQKRIETKTNSRDEIGELTVVFNDMMTRIETSFEQQKQFVEDASHELRTPVQIMEGHLKLLTRWGKDDPAVLDESLNASLTELERMKKLVQEMLDLSRAEQISQTKELQITDVNATVEQVRRNFEVMYENFTFTLKEDDTDLRALIQHNHLEQILIIIMDNAVKYSGDGTEVDMHVYKEQKQIHIDVRDYGEGISQEEIDKIFNRFYRVDKARSREKGGNGLGLAIAKQLVEGYLGTINAVSEPDKGTTIKITLPYIEPKSK

SEQ ID NO: 60937 - protein, 671 aa, Listeria monocytogenes
MADKKRYEELINILDQYSYDYYVIDNPTVEDAEYDQKMQELLKIEEAHPEWVTPESPSKRVGGEVLEGFKKVAHDTPMLSLANAFNHEDLADFDRRIRDKVGDDIAYMCELKIDGLAVSLQYENGKYKQGATRGDGTIGEDITANLRTIRSIPMKLQKDYSIEVRGEAFMPKRSFQKLNEIREEEGQMLFANPRNAAAGSLRQLDTKIAASRNLDIFLYAVADFGEMGVETHSAGLDMLETLGLKVNKERRLCSSLEEVYAYIDEWTEKRADLAYDIDGIVLKLNNLEQQRQMGTTVKSPRWSIAYKFPAEEVPTKLLDIELNVGRTGVITPTAVLEPVRVAGTTVSRASLHNEDLITEKDIRIGDTVLIKKAGDIIPEVIKSITEERSGSEEPFHMPKKCPTCDSELVRLEEEVALRCINPKCPAQIKEGLIHFVSRNAMNIDGLGEKVIIQLFSQHLIKDVADLFFLSKEKLLELERMGEKSVTNLLASIEASKQNSLEKLLFGLGIRHVGAKAAKSLAVHFETMDNLKVADKETLTSINDIGEKMADSIVTYFANEEVHDLLEELKRAGVNMTYTGPKLEDMSEEELVFAGKTVVLTGKLEKLTRNDAKALIESLGGNVSGSVSKKTDVVVAGSDAGSKLAKAEELAIPIWSEEDLIEYLPDEGGLNE

SEQ ID NO: 60938 - protein, 601 aa, Listeria monocytogenes
MENYSHRFQVNLAGMIDILSNHLYDEKDVYIRELLQNATDAIRARKKIDSTLEGKIHASLTGDNNEKTLIIEDNGIGLTEDEVHAFLATIANSSKGEKNFDGESSNDFIGRFGIGLLSCFIVSDEIVMISTSQKDGGTTEWRGKADGTYSVRKIETDTREPGTQVYLRLRAGLEDHPECEDVEYLINTLKKYGASLESNIIVEMNGLEEEINSWTKQFSDKETLSTLSREQIIQYGEYILGTHFQDYFLIENESGRTFGIAYMIPHAVQMNAIRKNTVFLNKMFVTSEANNILPDWSFFAKCVIWTDELQPVASREAFYKNERLTSVASELGVALKKGIETLPEEALMKLLATHYLGFKALASEDAPFLKLIYPYLPVRTLNGEEKLGDIIAKNDVIYYTYSVDDFRQIKDIARSSGMTLINGGYSYDSPILAQLSYFVEGTEFVLIQPEEMTDKLRPMTADEKQAYQPILTEMNSMMAEFDTDVLIKHFEPKDLPIIFIHSTATQELRELERAVEETTSVFSDILESIQKEQEPAPLAHLYLNLDNELIKRLFTSEKTVKELSVIVNVLYIQALLLGHYPLKRKEMVLMNQNMLRILEML

SEQ ID NO: 60939 - protein, 329 aa, Listeria monocytogenes
MCTSFVLETLDGKHLLSRTMDFAFILEANPTISPRNYGWKSSTDGANYINRYAFVGAGRELDKYIFADGLNEEGLSCASLYLPGEAVYAPAPVEGKINLAPQEFLLWLLGTCATIKDVEAKLSVINLVDQPVPLLGITTPLHWIFTDKSGRCVVIEPTETSLRIKENPVGVMTNTPRIEWHIENLRNYTGLQATQLAPVKFGEYMAKPFSQGTGTSKLPGGYTPPERFVRAAYLKENIIKAKNEEEAITNVWYVLNSVRIPNGAVIKESGDPDFTQYVASMCSESKTYYFTSYENNQINSVTLSKEVIENMKEPTTYQVDKVQNVNKLV

SEQ ID NO: 60940 - protein, 293 aa, Listeria monocytogenes
MQDLTLFLEQYKKVIDESLFKEINERNIEPRLKESMLYSIQAGGKRIRPMLVFATLQALKVNPLLGVKTATALEMIHTYSLIHDDLPAMDNDDYRRGKWTNHKVFGDATAILAGDALLTLAFSILAEDDNLSFETRIALINQISFSSGAEGMVGGQLADLEAENKQVTLEELSSIHARKTGELLIYAVTSAAKIAEADPEQTKRLRIFAENIGIGFQISDDILDVIGDETKMGKKTGADAFLNKSTYPGLLTLDGAKRALNEHVTIAKSALSGHDFDDEILLKLADLIALREN

SEQ ID NO: 60941 - protein, 179 aa, Listeria monocytogenes
MELHATTIFAVQHDGKAAMAGDGQVTLGESVVMKHTAKKVRRLFHDKVIAGFAGSVADAFTLFEKFEAKLNEYNGNLERASVELAQQWRSDSVLRKLEAMLIVMDKDTLLLVSGTGEVIEPDDGILAIGSGGNYALAAGRALKRHNGGQMEAKDIARHALEIASEICVFTNDHITVEEL

SEQ ID NO: 60942 - protein, 896 aa, Listeria monocytogenes
METNRPSPDALLVNLQEETDSSVGKLKIYFGFAAGVGKTYAMLSDAKDQLAAGVDVVAGYIEPHARVETLRMLEGIPIISPKAINHKNIALKEFDLDEALKRKPELILVDELAHTNAAGVRNKKRFQDVEELLQAGIDVYTTVNVQHIESLNDIVEGITKVAVRETIPDYVFDEADRVKLIDIEPDELLKRLEQGKIYQPERAQTAMQNFFTRENLKLLREIAMRKAADRISHEYDQTGVYPEKRASSKWLVCIGTSPSSAKLIRWTARTAEAFRAPWTALYIENEENDYMTKAEKKCLRETMELAERLGAEIVTLAGHDIAETVAEYARLTGVTNIVVGKSRRRMGLRSLFEEDFEDRLITHLDNVDMHIIPSSHPKAKKRRMKMRFKSFLTWHDMAKMVLLLALATAICVGLSEFGIGDQNVIMVYILSVLIISRVTSGYVYGVLGSIIGVMLFNFFFTSPLYTFNTIQAGYPVTFGIMLLVALITSALTVRIKTQASLAVERERRTEVLYEINKQLLVTRNLKGIINLTNEYILHLFSRSVIFYSADPAKSNEGIFVQAEGKEDASALLSADEEAVAHWVFKNKKRAGAGTDTLMGAFGYYMPVMSQGKVLGVIGVSCSPEEGPLTQDNRIFLRMISSQVALALERQYLSEEQRQIVIESAKEKMRSNLLRAISHDLRTPLTGIIGASSALLEKEDELDKETERNLIRGIKDDSGWLIRMVENLLSVTRISEGLVSLERAPEAVEEIVGEAVGRIKKRFRDRTIHVKVPRDLLMVPMDGTLIEQVLINLMENALRHGGTGAEVWVDVTKTKQSAIFSVRDNGKGIPENRLADLFDTFAVEARERSDMSRGLGLGLSICMSIIRAHDGTLEAKNNKHGGATFWFTLPLDGGDGK

SEQ ID NO: 60943 - protein, 58 aa, Listeria monocytogenes
MPWTKNDYPDSWKNLKKTEREKAIEIGNALLKDGYSESRAIPIATSKAEEWYKNHKES

SEQ ID NO: 60944 - protein, 278 aa, Listeria monocytogenes
MNPAYFVLLVEELKTKYLVKDICQILQVPLSTYYRWKKKDFSQSSLEKKIGQLCKAYQFTYGYRKIAALMKQEEQVGINKVQRIMQKYQWQCQVKVKKKNRPGSAYYQTENHLNRNFQASQPLEKLTTDITYLYFGDCRLYLSSIMDLYNGEIVAYSIGEKQDTELVLDTLNQLSLPEGSLLHSDQGSVYTSYEYYQCCKKKNVIRSMSRKGTPADNAPIECFHSSLKCETFYHKTAYKYAKSIVIQIVKDYIKYYNEKRIQQKLGYQSPINFRKQAA

SEQ ID NO: 60945 - protein, 177 aa, Listeria monocytogenes
MEKNWYVVHTYSGYENKVKANLEKRVESMGMSDKIFRVIVPEEEETEVKNGKTKTIKRKVFPGYVLVEIVMTDDSWYVVRNTPGVTGFVGSAGSGSKPTPLLPEEADRILKSMGMVEKRAEADFEIGETVMVKEGPFADFSGKVDEMDNDKGKAKVMVNMFGRETPVEVDFNQIEKL

SEQ ID NO: 60946 - protein, 309 aa, Listeria monocytogenes
MSITNLLNIKYPIIQGAMAQIAKAPLVAAVSNAGGLGIIASGGMTADMLREEIQKTKALTDKAFGVNLMLMMTNIAELTEVIIEEKVGIVTTGAGTPKTFMPIWKEAGIIVIPVVPSVMIAKRMEKMGADAVIAEGTEAGGHVGETTTMALLPQIVDAVTIPVIGAGGIADGRGIVAALALGAKGVQIGTRFLATDECPVHPDFKAAVIKASDRDTMVTGRKAGAPVRSIKNKMIKEYIRLEEENADRDTLEELTLGSLRKAVQEGDTDNGSVMAGQIAGLITEIKPCKDVIEEMMTDAKKVIAGLELK

SEQ ID NO: 60947 - protein, 282 aa, Listeria monocytogenes
MKWLSYLYEGDLAYGILTPENKIIPAGTIFSNPPATLLDFIKEKPLVPELTGIDGHIDLAEVEIQVPFVPPNNIIAIGKNYYNHVLEMGSKEDVPEHILVFTKSANSLLPHNGNIELHQNITGQLDYEGELAVIIGEKVRDISEQEALSAIFGFTILNDITARDLQKKHKQFYLGKSLDASCPIGPFVLENNANKEPVFHIETKVNGEVRQSDSTDKFIFGLARIISDLSKGHTLLPGDIIATGTPSGVGNGMTPPTFLQDGDIIEITIDKIGTLTNKVRKS

SEQ ID NO: 60948 - protein, 198 aa, Listeria monocytogenes
MTINLILLSLLAYVIGSIPSGLWIGKIFYKKDIREFGSGNLGATNSFRVLGIKAGSIVTVMDILKGTVATLLPFFFQLNVDHHFWLLTGAFAIIGHSFPLFAGFRGGKAVATSAGVILAYAPLLFVAALVVFLVTLKLSKYVSLSSMIGALAALIISLFMGDWILIVLVACIALFVIWRHRANITRIRNGEEPKIKWM

SEQ ID NO: 60949 - protein, 288 aa, Listeria monocytogenes
MIKVIASDMDGTLLNSDIEIAQENVEAIEKARAKGIHFVLCTGRMYDDAMGLINKANLYAPAICMNGAEIRDEHGKIILQHPIDRNLARNTYNTLTELGMYTEFFTDMGPITTDKARGKEFMIEMHKRIHPDVPAETIMDKVEERFESKDVHEIPDVERILGNKDLTILKFISFSSDKDILAKAKQKLEKDSELSVTSSFSDNIEITHREAQKGISLQYYVEKLGVTLDETFAIGDNMNDISMLKMAGYSVAMGNGEEEVKDLAEHVTLSNDEHGVAAAIYKMLETND

SEQ ID NO: 60950 - protein, 128 aa, Listeria monocytogenes
MKRREAREKALQALFQIELNEMSLDQAIKNIMEDEQDDYMEKLVEGVMANKAEIDAIIEPNLDNWRMDRLSKVDLSLLRLSVYEIKYLDDVPNRVSLNESIEIAKIYSDEKSSKFINGVLANIAPEDK

SEQ ID NO: 60951 - protein, 313 aa, Listeria monocytogenes
MNQKIVVALGGNAILSSDASAEAQRSALEETAEYLVQFIENGDDLIISHGNGPQVGNLMLQQHAGASEKNPAMPLDTCVAMTQGSIGYWMQNALDKAFLKHGLDKVAVSLITQVVVDKDDPAFEKPTKPIGPFLNKEEAEKEMAETGAIFLEDAGRGYRKVVPSPRPLSIKEHQIIKQLVDSGVVTISAGGGGVSVVENGLDLSGVETVIDKDFASEKLAELIDADLLVILTGVENVYINYNQPNQKKLEQVTVSELEKYIDEKQFAAGSMLPKIEAATAFVKERPHAKAIITSLENIGAMLERGAGTVIVAG

SEQ ID NO: 60952 - protein, 114 aa, Listeria monocytogenes
MNKLIDEITKSQLNPDVPNFRPGDTVRVHAKVVEGTRERIQLFEGVVIKRRGAGISETFTVRKISNSVGVERTFPVHTPRIAKLEVIRRGKVRRAKLYYLRNLRGKAARIKEIR

SEQ ID NO: 60953 - protein, 565 aa, Listeria monocytogenes
MAKLEKDQEKVITQGKSGADLVVDSLINQGVTHVFGIPGAKIDKVFDVMEERGPELIVSRHEQNAAFMAAAIGRLTGKPGVVLVTSGPGASNLATGLVTATAEGDPVVAIAGNVTRQDRLKRTHQSMDNAALFRPITKYSEEVVHAESIPEAITNAFRSATEPNQGAAFVSLPQDIVNEPNVPVKAIRPLAKPENGPASKEQVAKLVTRLKKAKLPVLLLGMRASSPEVTGAIRRLLQKTSIPVVETFQAAGVISRDLEDNFFGRVGLFRNQPGDILLNKADLVITVGYDPIEYDPKAWNASGDRTIVHLDDIRADIDHYYQPVTELVGNIALTLDRVNAKFSGLELAEKELETLKELHAQLEERDVPPESDETNRVHPLSVIQTLRSAIDDNVTVTVDVGSHYIWMARHFRSYEPRRLLFSNGMQTLGVALPWGIAATLVHPGEKVVSISGDGGFLFSAMELETAVRLRAPLVHLVWNDGSYDMVAFQQKMKYGKEAAVRFGDVDIVKFAESFGAKGLRVTNPAELSDVLKEALETEGPVVVDIPIDYRDNIKLGETLLPDQFY

SEQ ID NO: 60954 - protein, 430 aa, Listeria monocytogenes [sequence omitted]

SEQ ID NO: 60955 - protein, 207 aa, Listeria monocytogenes
MPKLSLLKQDGTNAGEITLNDTVFGIEPNEKVVVDVILSQRASLRQGTHKVKNRSEVRGGGRKPWRQKGTGRARQGSIRSPQWRGGGVVFGPTPRSYAYKLPKKVRRLAIKSILSSKVNEEKLVVLEGLTFDAPKTKEFAAFLKNISVDTKALIVVAGESENVELSARNLQGITVIPAESISVLEVAKHDKLIITKAAVEKVEEVLA

SEQ ID NO: 60956 - protein, 261 aa, Listeria monocytogenes
MSDSISVIKEKLSEVTSENDPFFQKCIQDERKGVEKLVQSVRRKWEKEAKLLVKLKEMTQYETDLFQQGYKYIAGVDEVGRGPLAGPVVAAAVILPADFSVVGINDSKQLSEAKRDALFEKIKKEAIAIGVGIIEHDVIDQVNIYEATKLAMCEALNQLTPEPDFVLIDAMPLRYTEAELSLIKGDTKSISIAAASIIAKVTRDRLMQMYDEKYPGYDFANNMGYGTKKHLLGLDTIGICPIHRMSFSPVKESKLHFDSLN

SEQ ID NO: 60957 - protein, 191 aa, Listeria monocytogenes
MIEKTIMERRSIKKANDEPISRETVNTILEQAAYAPFHSKVEPWNVYVLHTLAEKERYIEKIIEFNEREQGVSFSEAEIADLKAGYAKKIITPPYLLIVTTNIIGHGKKDFESIGATSAFIQNIQLLGWEAGIGMIWRSNRFIFDAKFADDLGIPAEQKIVGTLHLTSLAEVPEAKPRRPLNEWVKNLADL

SEQ ID NO: 60958 - protein, 576 aa, Listeria monocytogenes
MNWQEEYQKWVANDKLDSTLRKQLTNMETNEKELEDSFYRNMEFGTAGMRGVLGAGTNRMNIYTIRKASLGLAQFVAENGEEAKKRGIVIAYDPRHMSREFAFESAAVLGHHGVKSYVFDALRPTPELSFAVRHLNAFGGIVITASHNPPEYNGYKIYGEDGGQMPPTGASAVIEYINAVEDIFSVEVANQELLIENGLLEVISEKVDRPYLEKLKEVIVNKELVQERGEDLKIVFTPLHGTGGILGVPALESVGFTNIVKVDEQFVNDPDFGTVKSPNPENREAFLLAIEYGKKFGGDILVGTDPDADRLGVAVRNADGEYEVLSGNQIGAIILHYLLKQKKAQSELPANAAVLKSIVTSNLGTEIAKHYGAEMIEVLTGFKFIAEQIKHFEETGKHTFEFGYEESNGYMVKPFTRDKDAIQAVLAIAEVALVSKVAGRTLLEDLDQIYDEFGYYNEDLVSLTLSGKDGSERIKEITSSFREQLPTSMGGFVVERAEDYLRSETTWIATGKTEAIHLPTADVIKCYFEDGSWFCLRPSGTEPKIKFYFSIRGESKEESTAKLEKVKADLMQHIEA

SEQ ID NO: 60959 - protein, 1235 aa, Listeria monocytogenes
MSLNIPPKPEESLWTDDQWKAIQAKGNNVLVAAAAGSGKTAVLVTRIIEKLIDESANLNVDELLIVTFTNASAAEMKFRIGKGLEEALGQNPDSAHLKRQVALLNYASISTLHSFCLEIIRKYYFEADIDPSFRLIEPIESSMIRDEVLEGLLEQEYGIENNEAFFHLVESFTGDRSDAELHSLISKLYDFSRANPDPNAWLEAMVNFYNTEEITSITELPYFPIIKEDIELRVNQAKNYLLNAINYANENNGPAPYLATLENDLVQIQALSELNWSSWTHLKTSIENIDFKRIPTLKNKSDYDEVYVEEAKKFRDAAKKEMKNIATDWFSREEVNCLSDLEKMKPDIQTLSELVKKFSANFFEEKQQRGVLDFNDLEHLALKILLNDDKASEVAQNYQKQFKEVLIDEYQDTNMVQETILRLVTNPSEAQGNLFMVGDVKQSIYRFRLAEPTLFMTKYQTFQQDGSGNGIRIDLSQNFRSRKEVLDATNFIFRQLMDKHIAEIDYDTAAELTLGANFPETNAMETELLLIDMKTEDTETEDELSPQELQKNQVESRAIAMKIREMIDNKFPIYDKKLKQNRPIQYRDIIILSRAMTSAPDMEEAMKVQDIPFYANNNSGYFETTEVATMIALMKVVDNPYQDIPLAAVLRSPIIGLNEEELGQIRMAKKKGYFYDALLTYKDITVSETANKISDFVQQLNNWRELSIRENLTSLIWQIYQETNFYEFVGGLPGGKQRQANLRALYDRANQYEKTSFRGLFRFVRFVERLEIRGDDLGTAKTLGEKEDVVRMMTIHASKGLEFPVVIVSGLSRKFNMRDIYSKTLLDKDYGFASSYRDVEKMIVYPTIMQQAIKQKKSREMIAEEMRVLYVALTRAEEKLILVATVPDFEKTSKNWLQVAKEKETILPAATRAKAKCYLDWIGNATIRHPAFKELLCEEIIQTLATEMKLQIEIKTKEMFLTNELERAESDNWLENIKEHQPVPIQSPYKDEIQRYMEYEYQNEAATEIRAKQSVTELKRQFSLQDSWSDTTLLKEFQKVSLDRPKFLQKNKLSATEIGTAMHTLMQAVSLDYKPTKEDLEQLLHTMREKDILTDVQIKAINIKQILDFFESPLGETMLQKKDLVKREVPFSYLLPVSELYEKVDLDERVLIQGVVDSMIEEEETITLIDYKTDKIEGRYADWNAAEKVMKERYHIQIKLYAEAIQAISGKKVAAAYLYFFDGQHICQINTKEGL

SEQ ID NO: 60960 - protein, 463 aa, Listeria monocytogenes
MNSLFRRKPIEDLMHNKSGSTHLKQTLGPLDLTLLGVGAIVGTGIFILPGTVAAKNAGPAIIFSFVIAAIVCAIAAMCYSEFASSVPVAGSAYTYGYVVFGELIGWLLGWALILEYGLAVASVASGWSSYLNALLSGFHISIPEAISGPFNPEVGTFINLPAIIIVLVIAFLLTLGIKESTRVNTIMVVIKVGVILLFLVVGVFYVKPDNWQPFMPFGISGVMNGAALVFFAYLGFDAVSSAAEEVKDPQRTMPIGIIGSLLICTVLYVAVSAVLTGMVPYTDLNVTDPVAYALQVINQDWVAGIVSLGAVVGMITVILVMSYGATRLIFAMGRDGLLPKVLAEINQKYQTPVKNTWIFAVIVAIISGLVPLDRLAELVNIGTLLAFMMVSIGIIFLRKNKDIQARGFKVPLYPVLPIVSFLLCAFLISRLSVHTWILCGIWFVIGLIVYFAYGRKHSELLKK

SEQ ID NO: 60961 - protein, 1778 aa, Listeria monocytogenes
MKKKFSIVIISVLLLGYLAPFDTLLVGADETTVSEDTAVKTAEADSATEGIESETGSDDETAEEPKEAKEAEASKETTEKEEKAKTEEPASNIKTEINTDKSQLKQTSLKAAVPAGSTYNSLFPDDNLAKKLAVIITGNAAATGNESVDSAALLAISQLDLSGETGNDPTDISNIEGLQYLENLTSLNLSENNISDLAPLKDLVNLVSLNLSSNRTLVNLSGVEDLVNLQELNVSANKALEDISQVASLPVLKEISAQGCNIKTLELKNPAGAVLPELETFYLQENDLTNLTSLAKLPKLKNLYIKGNASLKSLETLNGATKLQLIDASNCTDLETLGDISGLSELEMIQLSGCSKLKEITSLKNLPNLVNITADSCAIEDLGTLNNLPKLQTLVLSDNENLTNITAITDLPQLKTLTLDGCGITSIGTLDNLPKLEKLDLKENQITSISEITDLPRLSYLDVSVNNLTTIGDLKKLPLLEWLNVSSNRLSDVSTLTNFPSLNYINISNNVIRTVGKMTELPSLKEFYAQNNSISDISMIHDMPNLRKVDASNNLITNIGTFDNLPKLQSLDVHSNRITSTSVIHDLPSLETFNAQTNLITNIGTMDNLPDLTYVNLSFNRIPSLAPIGDLPNLETLIVSDNNSYLRSLGTMDGVPKLRILDLQNNYLNYTGTEGNLSSLSDLTNLTELNLRNNVYIDDISGLSTLSRLIYLNLDSNKIEDISALSNLTNLQELTLENNKIENISALSDLENLNKLVVSKNKIIDISPVANMVNRGAIVTASNQTYTLPTVLSYQSSFTIDNPVIWYDGTLLAPSSIGNSGNYKDGKITWTNMTATSSSTLFNFNRLKDGLTFSGTVTQPYKSAAKVTADAEQTYTIGDTISEEQFLKDVNAKSSDGAPVTSDFATVVDLNTFGEYEVTLTSEKDGIQGDSCKVIVKVLHGAPVISADQTISYDKHATITEKQFLEDIHASTDLDTAITTNFSTAVNLNKGGDYTVALNSENEDGVKAETVYVTVTVNKDPAPIISAKTEITYDKFSKKTEAAFLDDIDADTNDGSIVTSNFATAVNLDKAGDYTVTLNSINSDGVAGTPTAIIVHVEKEKIATISTNTAQQYEKYAKINETQFLKDVHASINASPTTAVLESDFETVVKLDVPGTYTVTITATNEDGGVSAPKEVSVIVRKIPAPEITADKEITYPKFDEVSEAEFLNDIHATISDKNVAITSNFSTDVNLNKAGDYTVTLNATNEDGVKATPVEVIVHVQQGERPVITADATISYDKFANITEAKFLEDIHATSSDGQSSTVITSNFQTATNFKTAMSYTVTLNAVNEDGISAEPVAVTVTINKEPAAALKADAEVSYAKNEAVTESDFFKDVHLEGTEAPSTAKATSNFDSVVDRSKTGDYTVTINATNEDGAVSTPIEVIVHIEAESAPVITANAEVKYNKHEQTDERRFLYDSEAKIDEANVEIKTDFAEKVDINKVGTYTVTLTATNEDGQAANPVEVSVIVSDAAAEKVNVKYVDENGSEISAAETLTGNLDETFSIDAKSIAGYKCDATLSGVFSTVEQTVVFHYKAIKPGVVTIKYEDTNGKAVDEDKQITGEVGDDFEAEAQTVSGYSCRAIASGKITEEPQTITFTYSTATPSKKSGEITVQYVDESGKKLADSKKVTGNIDDSYSVEAKAIEGYSVVGDDSAKGVFTEKSQTVTFKYKKNTQVSKDDPKVKGKTNQPSSTDTKLKVDNNSLPATGDTENMILAVLIGFNMLIVASIFLFRKPKTNQ

SEQ ID NO: 60962 - protein, 453 aa, Listeria monocytogenes
MKVIKFGGSSLASGIQLNKVFQLVAEDPDRKIIVVSAPGKRFKEDTKVTDLLIDCAAKALLGEDTSELFESVIARYAGIALDTGMSDEIINQIRADLQATISSDKSDPDKFLDRMKASGEDNNAKLIAAYFKFKGLNANYINPKDAGLLVTDEHASAQVLPESYDRLFALREREGIIVFPGFFGYTKDGEISTFSRSGSDITGAIVANGAQAELYENFTDVDAVYAVNPTIVKNPKKVLELTYREMRELSYAGFSVFHDEALIPAFHAGIPVHIKNTNNPDSCGTRVVHERENNNGPVVGIASDDGFCSIYISKYLMNREIGFGRKVLQILEDAGLNYEHMPSGIDDLTIIIRENQFGEDTERTIMSRLKEELNADQVIMQHGISLIMVVGETMRHNVGITSRASKALSDAKVNIEMINQGSSEVSIMFGVKEEQENTAVRALYNEFFSEVFV

SEQ ID NO: 60963 - protein, 350 aa, Listeria monocytogenes
MLEQLQTLKSEAETQINEASDLKTLNDLRVKYLGKKGPMTEIMKQMGKLSAEERPKMGSLANEVRTALTEAISSKQQILETEAINEKLKSETIDVTLPGTAPSIGTKHLLTQVIEEMEDMFIGMGYEIAEGPEVELDYYNFEALNLPKDHPARDMQDSFYITENTLLRTQTSPVQARTMEKHDFSKGPIKVICPGKVYRRDNDDATHSHQFTQIEGLVVGENITFADLKGTLTVLAKTMFGEEREIRLRPSFFPFTEPSVEMDISCFKCGGKGCRVCKGTGWIEILGSGMVHPNVLEMSGIDSTRYSGFAFGLGPERVAMLKYAVDDIRHLYTNDLRFTKQFQSTETGEI

SEQ ID NO: 60964 - protein, 307 aa, Listeria monocytogenes
MEAIKEKKLTQTSKKAHLETRGKIITFICISIMVIAAASILFFVISKGLATFTVNKVSFVDFITGTDWNPSQKDASGNPLVGALPMIIGSFAVTLFAACIAGPLAIGAAIFMVEISPKFGKKILQPVMELLVGIPSVVYGFIGLSVVVPFIRDHISGSGFGIAAATVVLTVMILPTVTSLSVDAIKSVPRHYREASLALGATRFQTIWKVVLRSSRSGILTAIVFGMARAFGEALAVQMVIGNSAVIPTSLFEPASTLTSILTMGMGNTVMGTLDNNILWSLAMVLLAMSLFFIIVIRFIGRRRKVK

SEQ ID NO: 60965 - protein, 408 aa, Listeria monocytogenes
MSKILKKPEVLAPAGNLEKLKIAIRYGADAVYIGGQAFGLRSRAGNFSFEEMKEGIAFAHERNAKVYVAANMVAHAGDTEGAGEFFLTLRDIGIDAVIVSDPALISICFQDAPGLPVHLSTQASATNYKTLEFWKKQGLERVVLAREVSMQEIQEIGEKTDVEMEAFIHGAMCISYSGRCTLSNHMANRDANRGGCAQSCRWKYDLFEIDNGVSKNLVDTDEEPFSMSAVDLSMIKYIPDMVDAGVDSLKIEGRMKSIHYVSTVASVYRRAVDAYCADPENYVFDPAWEEELWKVAQRELSTGFFYKEPTEDEQLFGKTRKIPQYAFAAQVLEYDEKTKIATLQQRNNFGVGEEIEFYGPGDTGFKQVVEVLWNEDGVEIDRAPNAMMTIKMPVDKPVKPFYFMRKKK

SEQ ID NO: 60966 - protein, 368 aa, Listeria monocytogenes
MNERIFRENTRPVQVGNLTIGGSEELTIQSMTTTKTHDVEATVAEIHRLEEAGCQIVRVACPDERAANALSAIKKKIHIPLVADIHFDYRLALKAIDAGVDKIRINPGNIGRRDRVEKVVNAAKAKNIPIRIGVNAGSLEKKIIQKYGYPTADGMVESALAHIKILEDLDFYDIIVSLKASDVNLAIEAYDKASRAFNYPLHLGITESGTQFAGGIKSAAGLGAILSLGIGNTLRVSLSADPVEEIKVAREVLKSFGLSSNAAMLISCPTCGRIEIDLIRIANEVENYIAKIEVPIKVAVLGCAVNGPGEAREADIGIAGSNGEGLLFRHGKIIRKVPEAIMIDELKKEIDILAEEFFVKKIDLESLR

SEQ ID NO: 60967 - protein, 357 aa, Listeria monocytogenes
MKQLLKIFVPVIVVALLMMLLATTMNRSEGYAGSNTLTIYNWGDYIDPSLITKFEKETGIKVIYQTFDSNEAMMTKIEQGGTTFDIAVPSDYAISKMKEENLLIPLDHSKLPNEKYLDPRFMDLSFDDDNKYSMPYFWGTLGIIYNKEMFPDKNFDTWNALFDPELKNQILLIDGAREVMGLGLNSLGYSLNDTNKAHLQAARDKLETMTPNVKAIVGDEIKLLMADNEAGVAVTFSGEAAEMLSENEDLEYVIPKDGSNLWFDNMVIPKTAKNVDGAHKFINFMLKPENAAINAEYVGYATPNAKAVELLPKEISSDERFYPDMDELNNLEVYDNLGKRMLSYYNELFLEFKMYRK

SEQ ID NO: 60968 - protein, 97 aa, Listeria monocytogenes
MARKYEIMYIIRPNIEEDEKKAVVERFDGILTENGAEIIESKEWGKRRLAYEINDYRDGFYHIVKLNADKADSINEFDRLAKISDDIIRHMVIKEEA

SEQ ID NO: 60969 - protein, 134 aa, Listeria monocytogenes
MTTLENSVIFDKGELITNDYFIGNTYLKMLVPEDTVYNCPIGNVTFEPGARNNWHKHDGGQILLVTGGTGYYQEEGKSAQLLKEGDVVTIPKDVKHWHGATKDSWFVHLAISTNVELGGTTWLEPVSDEHYNNL

SEQ ID NO: 60970 - protein, 659 aa, Listeria monocytogenes
MKWNEFIVTGDPMILGAQISIVLVSIGVVALLTYTKKWKWLMKEWISSVDHKKIGIMYLLAAVLMFFRGGVDALMMRTQLALPDMKFLDAQHYNEVFSTHGTIMILFMAMPFIIGLMNIAVPLQIGARDVAFPFLNNLSFWTFFMGAMLFNLSFVIGGSPDAGWTNYAPLATDFSAGYGINFYLLGVQIAGIGTLMTGINFFVTILRMRTKGMTLMKMPMFTWSSLITSLIIIFAFPVLTVALALMSFDRLFGTAFFTLTNGGLPMMWANLFWVWGHPEVYIVILPAFGIFSEIISTFSRKKLFGYPAMVAAMAVISLLSFLVWVHHFFTMGSGALVNSFFSITTMMIAIPTGIKIFNWLFTMYKGRITFTTPMLWSLAFIPNFVVGGVTGVMLAMAAADYQYHNTYFLVSHFHYVLIAGTVFSCFAGLTYWYPKMVGYRLNEKIGKWFFWIFVVGFNVCFFPQYFLGLDGMPRRIYTYVQGDGWTTLNFISTVGGFLMGVAFLVLCYNIYYSYKNSKREVTGDPWDARTLEWATSSAVPPKYNFAVLPEWNDLDDFWNRKQKGDPYVNDKNYKPIHMPSNTMVGFVMSVFFFIAGFGLVFYWYWMGIIGLVGILGCMIYRSFQNNDGYHVEVEEIKATEEHNARELATGVKEGNPWNL

SEQ ID NO: 60971 - protein, 717 aa, Listeria monocytogenes
MTKTLVLAEKPSVGKDIGRVLGAKQGKNGYLEGGKYVVTWALGHLVTLADPERYDSKYKNWNMEDLPMLPEKMKLEPIKQTRKQYETVKKLMNRTDITTIVIATDAGREGELVARWIIDYAKIKKPLKRLWISSVTDKAIREGFEHLKPGKAYENLYHSAVARSEADWVVGINATRALTTKYNAQLSCGRVQTPTLAMIQHREEEIRNFKSREYYGITALTEQESFTWNNGQTFDKALAEKLVKSLQGENAVITDVSMKEKKTFSPGLYDLTELQRDANNRYDFSAKETLNIMQTLYERHKVLTYPRTDSRFISTDIVPTLKERLVACGVGENAKAARQISVKPIKANKSFVDNSKVSDHHAIIPTEQPVSLGDLSDKERKIYDLVVKRFLAVLSDPYIYEETSVKAKIGQEEFTLKGKVVKSLGWKSIYGESREPDQLTKMKKGDTIPVKRINLETGKTKPPARFDEATLLSAMENPSKYMETTNKALAKTLGETGGLGTVATRADIIEKLFNSFSLEKQGKDIQITSKGRQLLELVPEDLKSPELTARWEQKLSKIAKGELDYRKFTAEMRDYAKKAVTEIKQNDKKFRHDNITSQKCPDCGKPMLKVKGKRGTMLVCQDRECGHRESVSRTTNARCPNCHKRMEMRGEGDKQIFVCVCGHREKLSAFQQRRDKQKNKNVSKTDVAKFMKKQNKQEDEPFNNPMAEALAKLKLDK

SEQ ID NO: 60972 - protein, 129 aa, Listeria monocytogenes
MARKTNTRKRRVKKNIESGIAHIRSTFNNTIVMITDTHGNALAWSSAGSLGFKGSRKSTPFAAQMAAESAAKSAQEHGLKTLEVTVKGPGSGREAAIRALQAAGLEVTAIKDVTPVPHNGCRPPKRRRV

SEQ ID NO: 60973 - protein, 324 aa, Listeria monocytogenes
MSLYMLVSTFAVAFIITVIGVPLFIPFLVKLKFGQSIRDEGPKMHEKKSGTPTMGAVVFITAMLISFLVFSFISGEVSAATWLLFIALALFGALGFLDDYIKVVQKRNLGLTSKQKFLGQVVISILFYLVYHFNDFAETLNIPFTNIEVDLGWFFVIFILFWLVGFSNAVNLTDGLDGLVSGLSVIAFSAFGVIAFYQEQMDVAIFCFAIVGGMLGFLLFNKNPAKIFMGDTGSLALGGSIAAISILVHQEWLLLLIGIIFVIETASVILQVFYFKATGGKRIFRMTPIHHHFELGGWSEWRVVLTFWGIGLVGAIISVCVVIF

SEQ ID NO: 60974 - protein, 416 aa, Listeria monocytogenes
MAVEKITMPKLGESVTEGTISSWLVKPGDTVEKYDAIAEVLTDKVTAEIPSSFSGTIKEILAEEDETLEVGEVICTIETEEASSSEPVVEAEQTEPKTPEKQETKQVKLAEAPASGRFSPAVLRIAGENNIDLSTVEGTGKGGRITRKDLLQVIENGPVAPKREEVKSAPQEKEATPNPVRSAAGDREIPINGVRKAIAKHMSVSKQEIPHAWMMVEVDATGLVRYRNTVKDSFKKEEGYSLTYFAFFIKAVAQALKEFPQLNSTWAGDKIIEHANINISIAIAAGDLLYVPVIKNADEKSIKGIAREISELAGKARNGKLSQADMEGGTFTVNSTGSFGSVQSMGIINHPQAAILQVESIVKRPVIIDDMIAVRDMVNLCLSIDHRILDGLLAGKFLQAIKAKVEKISKENTALY

SEQ ID NO: 60975 - protein, 312 aa, Listeria monocytogenes
MFKHETVLLHETVDMLEVKPDGIYVDATLGGAGHSEYLLNKLNEKGHLFAFDQDQTAIDNAKIKLADYSDKVTFIKANFRDMKEALNERGIEAVDGILYDLGVSSPQLDERERGFSYHQDAALDMRMDQEQELTAKTVVNEWSYQDLIRIFFQYGEEKFSKQIAREIERRREVKPIETTGELVDIIKTAIPAPARRKGGHPGKRTFQAIRIAVNDELGAVEDSLEKALTLIKPGGRISVITFHSLEDRITKQLFQEATKGPDLPPGLPVIPDEYKPDFKLATRKPIVPSEEELEQNNRARSAKLRVIEKIIK

SEQ ID NO: 60976 - protein, 234 aa, Listeria monocytogenes
MQLITTENKLAGSKKALEIIEKGITSGEVNTLGLATGSTPETLYAELVKSDVDTKNVTTTNLDEYVGLAASDPNSYHYYMNDLLFSKKAFKESFLPNGEATDAEAECARYEEILSEHPIDIQVLGIGTNGHIGFNEPGTSFDSITHKVVLTDSTREANKRFFEREEDVPTHAYSMGIKSIMNAKKIILLAFGENKAQAIKETIKGPVDVNCPASVLQNHPDVTVILDNEAASLL

SEQ ID NO: 60977 - protein, 1444 aa, Listeria monocytogenes
MTAKEEEKQERFQLLMTQIGLQDVTTYEEFTKDAKIEKLVADKKNKTWQFHLHVPQIFPAALFHMMDVGMKRAFSQIAETEMQIVPENQTINETLIQDYWNLIVEPIGKQSPMIGKLLMEQKPTFKEPHFIEVAVHNDMEEATIQQRFQTKIIESYGKAGFPRLAMKMHMLDQSETDEYKAFAQAKQEEDQKKAAEAVQVMQKRQAEGQSGGGGAAPLTGPFQIGYKIKDDEEVKRLGDIYDEERRITVQGLIFATEIRELRSGRSLLQFKITDYTSSMIIKMFSRDNEDAAMFQNLKKGMWVKVRGSVQNDTFVRDLIMMAQDVNEIAGVKRLDTAEEKRAELHLHSPMSQMDATSSVDSLFKQAADWGHKAIAITDHSVAQSFPEAYGAGQKYGLKVIFGIEANLIDDGVPIAYNDQHIALEDATYCVFDVETTGLSAVYDTIIELAGVKMKNGEIIDKFEAFIDPGHPLSATTINLTGITDDMVKGSDPIDVVLKRFKEWSGDDILVAHNASFDMGFINTAYEKVGLEKAENAVVDTLELARFLYPHFKNHRLNTLTKKFNIILEQHHRAVFDAEATAYLAWKLIKDAKEMHNIDFHDSLNDYMGEGDAYKRARPFHATIYAQTAVGLKNLFKLITMSNINYFYRVPRIPRSQLKKLREGLIIGTACSQGELFEAMMQKGMQAAEKVAEFYDFIEVQPKPVYAPLIERELVRDEKALEEILKNIVRVGEKTGKPVVATGNVHYKDPVDKIYRKILIHSQGGANPLNRAELPDVHFRTTDEMLKEFAFLGEEKAKEIVVTNANLVVDWMENLKPIKDELYTPKIDGAEDEVRNMSYAMAHQLYGEKLPEIVEARLEKELKSIIGHGFAVIYLISHKLVKKSLVDGYLVGSRGSVGSSFVATMTEITEVNPLPPHYLCPNCKDSEFFDDGSVGSGFDLPDKDCPHCGTAYQKEGQDIPFETFLGFKGDKVPDIDLNFSGDYQPVAHAYTKEIFGEDYVFRAGTIGTVAEKTAFGYVRNYERDMNMTIRGAEIDRLVAGCTGVKRTTGQHPGGIIVIPDYMDVYDFTPVQFPADATDSEWKTTHFDFHSIHDNVLKLDILGHDDPTAIRMLQDLSGIDPKTIPTDDPDVMKLFGSTESLGVKPADIDSKTGTLGIPEFGTRFVRQMLEQTKPTTFSELVQISGLSHGTDVWLGNAEELIKNKTCELPDVIGCRDDIMVFLIYQGLESSLAFKIMESVRKGKGLTDEMEEAMMANKVPLWYIESCKKIKYMFPKAHAAAYVLMAVRIAYFKVHYPLYFYATYFTVRADDFDLTSMVNGKEAVKATMKEVNDKGMEASTKEKNLLTVLEIANEMLARGFHFQKVDLYKSSADEFIIDGESLIPPFNAIPSLGTNVAKQIVAARENGEFLSKEDLQQRGKVSKTIIQYMDDQGCLEGLPDQNQLSLF

SEQ ID NO: 60978 - protein, 295 aa, Listeria monocytogenes
MEKKVGTDRVKRGMAQMQKGGVIMDVVNAEQAKIAEEAGAVAVMALERVPSDIRAAGGVARMADPRIVEEVMKAVSIPVMAKARIGHITEARVLEAMGVDYIDESEVLTPADDEFHLLKSDFTVPFVCGCRDIGEALRRIGEGAAMLRTKGEPGTGNIVEAVRHMRQVNGQIRQIAGMTDDELMVAAKNFGAPYELIKEIKTLGKLPVVNFAAGGVATPADAALMMELGADGVFVGSGIFKSDNPAKFASAIVQATTYYTDYELIGKLSKELGSPMKGIEMSRLNPEDRMQDRSF

SEQ ID NO: 60979 - protein, 423 aa, Listeria monocytogenes
MTDRLIIQGGKKLSGTLQVDGAKNSAVALIPAAILAESEVVLEGLPDISDVYTLYDILEELGGSVRYDNKTAIIDPTDMLSMPLPSGNVKKLRASYYLMGAMLGRFKKAVIGLPGGCYLGPRPIDQHIKGFEALGAKVTNEQGAIYLRADELKGARIYLDVVSVGATINIMLAAVRAKGKTVIENAAKEPEIIDVATLLTNMGAIIKGAGTDTIRITGVDHLHGCHHTIIPDRIEAGTFMVLAAASGKGIRIENVIPTHLEGIIAKLTEMGVPMDIEEDSIFIGEVENIKKVDIKTYAYPGFPTDLQQPLTALLTRAEGSSVITDTIYPSRFKHIAELERMGGKFKLEGRSAVISGPAKLQGSKVTATDLRAGAALVIAGLLAEGRTEIHGVEHIERGYSKIIEKLSAIGADITRSSTAETNI

SEQ ID NO: 60980 - protein, 89 aa, Listeria monocytogenes
MAKKSKVAKHERQQALVEQYAELRRTLKAEGRYDELRKLPRDSSPSRLHNRCELTGRPHGYMRKFGMSRIRFRELAHQGQLPGVKKASW

SEQ ID NO: 60981 - protein, 268 aa, Listeria monocytogenes
MTILNEIQQNYNRLPNKEKQIAKYILEKSDELKNINIKELAEETGTSISTITRFCRHVRCDSFVDLKMRVNTAATMVPSLGYDDLFEEVYSFYHKVIDNTVKLIEPAKIREVVQYIQEAKRVYICGVGSSGLTAVEMSQRLIRMGLNVISVNDPHMMIITSSITTKEDFVIGISNSGNTPELVTALKNAKKNKSKVATFTSFENSEMTEISDVTIPVYNTLFVSKRYFANSQFSIMYVMDIISMMLLQNESYRDNMEKTINTVTDEFH

SEQ ID NO: 60982 - protein, 79 aa, Listeria monocytogenes
MAGGRRGGRRRKKVCYFTSNGITHIDYKDVELLKKFVSERGKILPRRVTGTSAKYQRKLTVAIKRSRQMALLPFVAEEK

SEQ ID NO: 60983 - protein, 348 aa, Listeria monocytogenes
MSDLINIQKKLLPDVLMIMQKRYQILRSIYFSEPVGRRTLAGMLGMSERVLRGEVEFLKAQGLVEIASSGMTVTKEGLVVFRDLESVMNQLSGLHSMEEQLAKKLQIKKCLVVQGDSDDTPWVREEMGRVAVEQLDMALTEKRNIVAVMGGSTMATVAEMMTTDFAKGRELLFVPGRGGIGEDLDNQANTICDKMATKTNTKHRVLYVPEQLGEEAYRSLLKEPAIQEGLRLVQSANAIILGIGDALAMAKRRHTGEDVLEKIIHRKAVGEAFGYYFDEQGEVVHKVPTFGLQFEDLAQIPHIIAVAGGTSKAKAIKSYMKSAPKNTILITDEGAAKSLLKGSNTLLK

SEQ ID NO: 60984 - protein, 437 aa, Listeria monocytogenes
MRFNTISEKMDQYISPLANKLSQQRHLKATRDAFMSMLPITLFGSIPIILKAAPVTDDTKNGFLLAWANFAEKYDLILNWISGITLGAMSLYICVGITYYLCKHYHEDFLRPLMFSIAGFFMLVLNPIKMGWDGKEVDISFLDGRGILLSIFVAIVTVEGYHWMRKKNVGRITMPDSVPASLSETFAALVPGIILMTFFSIIFIIFNLLDTTAIQFLYEKMAPSFKAADSLPFTILSIFLVHLFWFFGVHDAALAGILGPIRDGNLSINAAEKMAGQDLTNIFTTPFWTYFVIIGGSGSVLALAFLMMRSKSKQLSTVGKVGFLPSIFGISEPLIFGTPLMLNPIFFFPFIFTSVFNGVITYLCMYFGIVGKTFAVFSWQMPAPIGAFLSTMDWRAIVLVFILIFLNGLMYYPFLKVYEKNLVALEKEAEEENIAAN

SEQ ID NO: 60985 - protein, 169 aa, Listeria monocytogenes
MPNHIVLYQPEIPANTGNISRTCAGTDTYLHLIRPLGFSTDDKMLKRAGLDYWDNVKLSYYDSLDEFFEKNEGGEFYYITKFGRHVYSDIDYSDTNKDYFFVFGKETTGLPDALLQENEENCLRIPMTDHIRSLNLSNTAAILAYEALRQQNFGALLQEPNYDRKIFQD

SEQ ID NO: 60986 - protein, 242 aa, Listeria monocytogenes
MTEEFVNKEDALKNYNVKEFRTPDGYTSDMILTTVKEVNGKPTLHILLIKRSSTNAEGRPNIEGGKWAVPGGFVDENESADQAAERELEEETSLTGIPLIPFGVFDKPGRDPRGWIISRAFYAIVPPEALEKRAAGDDAADIGLFSMTEALELPLAFDHLDMLKKAYSAITEEFLLTTAICDFLPETFSAELLYQTLDGCTKPGILPDEVEFMENIEYLPYLEKVGELYRFNADAEAGSIYF

SEQ ID NO: 60987 - protein, 819 aa, Listeria monocytogenes
MSNPEQHIQDLALEEVMGDRFGRYSKYIIQERALPDVRDGLKPVQRRILFAMNVEGNTAEKGFRKSAKTVGNVIGNYHPHGDSSVYEAMVRMSQDWKVRNMLIEMHGNNGSVDGDPPAAMRYTEARLSPISAELLRDIEKETVDFIPNFDDTSSEPTVLPARFPNLLVNGSTGISAGYATDIPPHNLTEIIEAVIKRLDNPLCTTDDIMKIVKGPDFPTGGIIQGIDGIRKAYQTGKGRVVVRSKTEIEDIRGGRKQITIHEIPYEVNKANLVKRMDELRIEKKIEGISEVRDETDRTGLRIAVELKKDANAEGVLNYLFKNTDLQVSYNFNMVAINKKRPELMGIIPMLDAYIEHQKEIITKRSEYDIRKARARQHILEGLIKALSILDEVIKLIRGSKDKRDAKLNLQTKYDFSEKQAEAIVSLQLYRLTNTDIHELQSEAKSLAEQISVLEKILGDEAELIAVLKEELAEIKKKYKTARRTEVQAEIAEIKIDTEVLVANEDVIVSVTKEGYVKRTSQRSYAASNGAELAMKEADHAIFIQKMNSLDSLLLFTSKGNFIYRPVHELPDIRWKNLGDHVSHLASDLSAGEEIRSAIAIQAFTEEKRFLFVTKNGMTKQSAITNYKPQRYSKSMMAIKLKGDDELLSVHLIDGTEDIFLATKNGYGLRYSITEIPESGARTAGVKAINLKQDDIVIGGIVLMPNEQKHILLATQRGSLKQMKASEFEPISRAKRGLLMLRELKSNPHRFIGITLADNNDHLFIETNTDQIVEIDVANLRITDRYSNGSFVLDETMEGEPTSIWLAIPEIKDTSDAKEE

SEQ ID NO: 60988 - protein, 447 aa, Listeria monocytogenes
MTIYHFVGIKGSGMSALAQILHDKGFQVQGSDVDKYFFTQKALEEKQIPIMTFSADNIQEGLTIIAGNAFPDTHEEIERALELGLSVIRYHKFLGQLIDGYTSIAITGSHGKTSTTGLLSHVVGAIRPTSYLIGDGTGSGTKDAEYFALEACEYQRHFLAYKPTYAIMTNIDWDHPDYFKSVDDVFNAFETLGKQVKKAVFALGDDAELRKLTLDIPIIYFGFGEENEFQAKNVIKETTGTKFDVYHREEFLSSFEIPAYGDHNVLNALSVIALCDYEGLPVEDVKNELKTFEGVKRRFSITEKGNQVLVDDYAHHPSEIRATVNAARQKYPDKKVVAVFQPHTFTRTRTFLQGFADSLNLADEVYLCDIFGSAREKTGNLTIADLAHKTKGNHIIKEEHTEELLKYPEAVILFMGAGDVQKFQAAYEKVLDHEFLTEADLKKSAIN

SEQ ID NO: 60989 - protein, 301 aa, Listeria monocytogenes
MENYLCVDIGGTSIKYAKFNQEGKRVGELKSCVTPITGGANQIMPALIRIVEQEKTDVAGVCVASAGVVDSVKGKIIYAGYTIPKYTGTEIKAELEHRFNLPCAVENDVNAACLGEFWLGGARGCGSVLCLTIGTGIGGAMLLNDKLINGSSFTACEVGYMHLSQGRFQDVASTKALIKQVASRKNIEENALNGRQVMEWAYSGDADVLAEIEQWIENLVEGVVNLIYIFNPEVIVLGGGLMEEESFFKPRLKAAISTKLISPMFDTADITFAKLGNEAGMIGALYHFLNQKEAEKDDDFK

SEQ ID NO: 60990 - protein, 544 aa, Listeria monocytogenes
MGDINIQQMIFQFIGGLGIFLFGIKYMGDGLQMAAGDRLRDILDKYTTNPFMGVLAGILVTVLIQSSSGTTVLTVGLVSAGFMTLKQAIGVIMGANIGTTVTAFIIGIKLSEYSLPIIAVGAVLLFFFKNHKVKNIGQVFFGFGALFYGLDLMGQGMKPLAGMESFHELTAQMSTNPFLGLLIGTIFTAVVQSSSATIGILQELYGQGAIDLQAALPVLFGDNIGTTITAVLAAIGASVAAKRAAATHVIFNLIGAIIFMLILPLFTSLVAYLQGMFGLNPEMTIAVAHGTFNITNTFIQFWFIGAFAWLVTKLIPGDDSRIDYKTKHLDTNLIDQSPGIALEMAREETLRMADYAKFGLQEARQYLVNRDSKHAESTVQVEEAVNNLDRKITEYLTKISSVALTNNETEEHALMLDTVRDIERVGDHMENIVENIDQLIKNKAKMSEEASEQLIEMFELTTANFERAVKSMHKKDRALAEETILVEKDIDKAERRLRKNHIRRLNEGKCQVVSGILYIDIVSDLERIGDHANNIAESVLELNE

SEQ ID NO: 60991 - protein, 120 aa, Listeria monocytogenes
MALNIEEIIASVKEASVLELNDLVKAIEEEFGVTAAAPVAVAAAGGAAAEQTEFTVELASAGDSKIKVIKVVREITGLGLKEAKELVDNAPKALKEGIAKDEAEEIKAKLEEVGANVEVK

SEQ ID NO: 60992 - protein, 308 aa, Listeria monocytogenes
MTKTLVFGHKNPDTDTICSAISYAELKKAQGADIEAVRLGELNSETAFVLDYFQVTAPRLVQTVANEVSEVALVDHNERQQSVDDIDDVTVTAVVDHHRIANFETSDPLYYRAEPVGCTTTILLKMFRENEVEVSKTVAGLMLSAIISDTLLFQSPTCTEEDKVAAQKLAQIADVDIQSYGMEMLKAGADVSKKTVAELLLDAKEFNMNDNKVEIAQINVVDVNDVLSRRAEVEALMTQNIVDKGLDLYLFVITNILTNDSVGIAIGSKTAVVEEAYGVKFVENQAPLKGVVSRKKQVVPILTDTFAK

SEQ ID NO: 60993 - protein, 105 aa, Listeria monocytogenes
MIQVDVMREDNQIISFTMSGHADFAEHGSDLVCAGASSIAFGMVNAISEVRDFDPVIEESEGYLYYSVPADYVGDDVVQILLTGMENQLRSLAYSYPDHIKINSK

SEQ ID NO: 60994 - protein, 640 aa, Listeria monocytogenes
MKITFPDGAVKEFEPGVSTADIAASISPGLKKKALAGKLNGELLDLVTPIHEDGAIEIVTPDHEDALGILRHSTAHLMAQALKRLYPDVKFGVGPAIESGFYYDIDTEAVISDESLVEIEKEMQKIVRENVPIEREVVSREEAIKRFKAIGDQYKLELIEAIPEDETVTIYTQGEFFDLCRGVHVPSTGKIQVFKLLSVAGAYWRGDSNNKMLQRIYGTAFFDKNGLKEFIQMQKEAKERDHRKLGKELELFTNSIEVGQGLPLWLPKGATIRRVIERYIVDKEERLGYNHVYTPIMANVELYKTSGHWDHYHEDMFPTMKMDNEELVLRPMNCPHHMMIYKNDIHSYRELPIRIAELGMMHRYEMSGALSGLQRVRGMTLNDAHVFVRPDQIKDEFKRVVELILEVYKDFDITDYSFRLSYRDPKNTEKYFDDDAMWEKAQAMLKSAMDEMEMDYFEAEGEAAFYGPKLDVQVKTAIGKEETLSTVQLDFLLPERFDLTYIGEDGEKHRPVVIHRGVVSTMERFVAYLIEEYKGAFPTWLAPVQMEIIPVNADAHLDYAKGVQDKLQRAGLRAEVDDRNEKLGYKIREAQTKKIPYALVLGDQEVEAGSVNVRRYGSKDSETMDLDAFIAQVVAEVSKY

SEQ ID NO: 60995 - protein, 681 aa, Listeria monocytogenes
MMEKGIWKDALIQSTKKLSPKLQVKNPVMLLVYVGAILATSLYFLGFFGISDEKSGYTLAIALILWFTVLFANFAEAIAEGRGRAQADSLKMARKDVLARKLKNVDDKTDVIEVASNDLKKGDIVYVLANEQIPMDGEVIEGAASVDESAITGESAPVIRESGGDRSAVTGGTTLVSDWLVVRVTAVSGESFLDKMIAMVEGASRKKTPNEIALQILLVTLSIIFLAVSATLLPFTEFASKQAGAGSAISITNVIALLVCLAPTTIGALLSSIGIAGMSRLNQANVLAMSGRAIEAAGDVDVLLLDKTGTITLGNRKASEFLPVDGVTEQELADAAQLSSIADETAEGRSIVVLAKERFDIRGRDFAEMHAEFVPFTATTRMSGIDYQENTIRKGAADAVRAYVTANGGTYPKECDAIVSKVAGAGGTPLVVVRNNQVLGVIYLKDIVKNGVKERFLDLRKMGIKTIMITGDNPMTAAAIAAEAGVDDFLAEATPEAKLELIREYQREGHLVAMTGDGTNDAPALAQADVAVAMNTGTQAAKEAGNMVDLDSSPTKLIDIVRIGKQLLMTRGALTTFSVANDLAKYFAIIPVLFYGIFPQLEALNLMGLTSPTSAILSAIIYNAVIIIVLIPLSLKGVKYREMPAGKLLSRNMLIYGLGGLIAPFIAIKLIDMLLTVLGIV

SEQ ID NO: 60996 - protein, 257 aa, Listeria monocytogenes
MLFDTHVHLNDEAFDDDIEEVIKRAQENDVTRMAVVGFNKETIDRALELAEKYDFISLIVGWHPTDAITFTDEDLEWLRDLALTHPKVVALGEMGLDYHWDTSPKETQFEVFRKQIRLAKEVNLPIVIHNREATEDVVRILQEEHAEEVGGIMHCFGETVEVMEACLAMNFYISFGGTVTFKNAKLPKIAAQAIPIDRLLIETDAPYLAPTPNRGKRNEPGYVKLVAEKIAELKEMKYSEIATHSTENAKRLFRIKD

SEQ ID NO: 60997 - protein, 270 aa, Listeria monocytogenes
MIRAISVDMDGTFLDGNGEYDRARFEKIYAELMKRGIKFIVASGNQYYQLKSFFPGKDEELFYVAENGAVIFHQGELRSVNRFDERLVQKILWTLIQDYHDLQVILCGVKSAYLLKAADPDFKAFAKKYYFELQEVESFDVLPDDTFIKFALDVEVAKTGQIVEDLNQTFVGEIRAVSSGHGSIDIIIPGVTKGNAIQQLLNEWQVAPEDLLAFGDANNDIEMLQLTSNSYAMLESSPEVLAAAKHVAPSNKEAGVLQVIEEYMKKSQRF

SEQ ID NO: 60998 - protein, 172 aa, Listeria monocytogenes
MICQRCGENKAVIALQQLNELGKVESLYLCENCATDEALSSEKDLVKAMDTFSEVALDFLTLLQKEENTQKEVVCENCQLSFEEFLKTNRVGCPECYSAFEAQLVPIIGRVQNGYKKHIGKVPAEVERAEGVQNEISRLQEKLAKLVKNEEFEEAAVVRDEIKALKAGGEDK

SEQ ID NO: 60999 - protein, 198 aa, Listeria monocytogenes
MHYPEPITKLIDSFMKLPGIGPKSAARLAFYVLDMKEDDVLDFAKALVDAKRNLSFCSVCGHITDKDPCYICADTSRDRSVICVVQESKDVIAMEKMRDFHGLYHVLHGTISPMDGIGPEDINIPDLLKRLQDDTIEEVILATNPNVEGEATAMYISRLLKPSGIKVTRIAHGLPVGGDLEYADEVTLSKAMEGRREV

SEQ ID NO: 61000 - protein, 322 aa, Listeria monocytogenes
MKKETKPRVVVIGGGTGLPVILKGLKKKDIHLTAIVTVADDGGSSGKIREQMDVLPPGDIRNVMLALSNVDPRVVDLFQYRFAVDGDLSGHVIGNLILTALSQLNDSYVDAINVLATVLKIRGKVIPATDQPLILNAEMEDGSIVHGESLIPLQGKHINRVYIEPENVKPYPTAVEAVKEADLIVIGPGSLYTSILPNLLLTELADEITASKAPKVYITNILTQIGETDFFSDADHIKVIHEHVGKSFIDKTLINTTTVPKELLFPEDVAQVEHNAKGMEELGVEAIYQDFLSTEDGLVRHAAEKVADALLAMLPNQTNEKE

SEQ ID NO: 61001 - protein, 883 aa, Listeria monocytogenes
MTTEHNEINMPTKYEPSNVEAGKYKWWLEKEFFKAEGNTDKEPYSIVIPPPNVTGKLHLGHAWDTTLQDIITRMKRMQGFDTLYLPGMDHAGIATQAKVEAKLKESNISRYDLGRENFVDKTWEWKEEYAEFIREQWEKLGLGLDYSRERFTLDDGLSDAVKKVFVTLYNKGLIYRGQYIINWDPEAKTALSDIEVIHKDIEGSFYHLKYPLTDGSGYLEVATTRPETIPGDTAVAVHPKDERYQHLIGKTIMLPILNREIPIVADEYVEREFGSGAVKITPAHDPNDFEVGNRHNLPRIIVMHEDGTMNENAGKYDGLDRFVARKEIIQDFKDLGLFIKQEPHLHSVGHSERTGAVVEPYLSLQWFVKMEPLAAEALELQKTENKVNFVPARFEKTYETWMDNIHDWCISRQLWWGHRIPAWYHKETGEIYVGEKEPENLSEWEQDEDVLDTWFSSALWPFSTMGWPDTESPDFQHFFPTNTLVTGYDIIFFWVSRMIFQSVEFTGERPFKDTLIHGLVRDSEGRKMSKSLGNGVDPIEVIDKYGADSLRYTLATGSSPGQDLKFSYEKVESTWNFINKIWNASRFVLMNLDGMKYNEIDLSNVTEVSDKWILTRLNETIQAVTSLGEKYEFGEVGRTLYNFIWDDFCDWYIEIAKIPLYGEDEVAKQTTRSVLAYTLNATMRLLHPFMPFVTEEIWQNLPHEGESITIAEWPKVNEQQIDTKSSTAMATLVEVIRAVRNIRSEVNTPLSKPIVLEIKPKDTTYKEILEQNISYIERFCNPEQVTISFDVEASKTAMTAVVSGAEIFIPLEALIDLNVEIARLEKELEKWNKEVARVQGKLNNERFISKAPESVVAEERLKEKDYLDKKASVLERIETLKEV

SEQ ID NO: 61002 - protein, 191 aa, Listeria monocytogenes
MAQLFFRYGSMNSGKTIEILKVAHNYEEQNKTVAIFTSGIDDRDQVGFISSRIGLKREATPIFSDTNIFEIVVNIKPKPNCVLLDESQFLEKEHVFQLAKIVDELNIPVIAYGLKNDFRNELFEGSKYLLLYADKLEEMKTICWFCAKKATMVLRVDDKGKPVYTGEQIMIGGNDHYYPVCRKCHANPPIK

SEQ ID NO: 61003 - protein, 522 aa, Listeria monocytogenes
MSQDLQKEVASRKTFAIISHPDAGKTTITEQLLLFGGVIRSAGTVKGKKSGKFATSDWMEIEKQRGISVTSSVMQFDYNGSRINILDTPGHSDFSEDTYRTLMAVDSAVMVIDAAKGIEAQTLKLFKVCRMRGIPIFTFINKMDRQGKMPLELLAELEEVLGIESYPMNWPIGMGKELAGLYDRYHRVIEQYRSEEDERFLPLGEDGDLKEAHAIQKSLYYDQALEEIMLLDEAGNDFSRERIIAGEQTPVFFGSALTNFGVETFLRTFVDFAPAPSSHESNEGVIEADNPKFSGFIFKIQANMNPAHRDRIAFIRICSGEFERGMNVTLTRTGKSLKLANSTQFMADDRETVNRAVAGDIIGLYDTGNYQIGDTITNGSKKLEFEKLPQFTPELFMRVYAKNVMKQKHFHKGVEQLVQEGAIQLFKTWRTEEYIIGAVGQLQFEVFEHRMRGEYNSEIRMEPIGKKIARWVKEEDADEKLSTARSMLVKDRFDQPLFLFENEFAINWFNDKNPDIELTSLL

SEQ ID NO: 61004 - protein, 333 aa, Listeria monocytogenes
MQLLKDKFGRVHDYIRISVTDRCNLRCVYCMPEEGLTFLPHEKVLSKDEIVSFMELMVKFGIKKVRITGGEPLLRTDIVEIVRGLGAIPEIEDISITTNAMYLAKKAEALKEAGLTRVNISLDSLHADRFKAITRGGRLQKVLDGIQKAEEVGLFPIKLNVVLIKGQNDDEITDFLRFTKDKDINIRFIEYMPIGHAGTSWKEKYLPLDTIFEACNEAGYEYEPVDSIRGNGPSENFRIKGAKGTFGVIHPVSAHFCDSCNRLRLTADGYIKACLYWDEEMNIRPFIQDPVKLMQLVQKAIDNKPENHEMALKLQDEVQSNKPTWRRMSQIGG

SEQ ID NO: 61005 - protein, 682 aa, Listeria monocytogenes
MEIFLYVLALLVAIFISNLLNRFVPFVSVPLIQIGLGVLIAIMPITFNLQLNPELFLVMFIAPLLFNDGRQTDKAALWGMRMPILVLALGLVFATVVVIGYFVHWMIPTIPLAAAFALAAALAPTDAVAVSSLSGRINLPKRIMNLLEGEALINDASGLVAFQFAIAAMVTGVFSLMDASISFFVIAIGGILVGLILSWLKFRLLKWVRGLGMEDVTFHMLIQILTPFIIYLAAEEIHVSGILAVVAAGIMHSMEQKKMDPQLVKLNVVSQSTWSVIIFVLNGLVFLLLGTQLPAITEVVWNDSGSSNLQVMAYILSITAALILLRFIWVYISWSIGAKQRQKQNKKTQLPKFRPVVLTSLSGVRGAVTLASALAIPFFLDDGSLFPQRSLIIFIASGVILCTLVIATFILPLLAKSEEVTTEDERAEIATRIRILRNVIRELKEQTLPETKAATDEVIEDYRKRIYDLQQNNSSNRGMDERERAKRLEIIQWERENTQKMTDEGRIVATDSYRYQHYLNMMEQAIKQRFRTKVKTAWMFLYRLIMLVIHPKKWGRITHKVKKGISKDSERFQAIRQLREDNEILIISKLKEQLTKENVDIIGPLITEHTIFLERVRKEHSPRGKRAKFEQKKREVQVVAFQLERDIIQNMFEKGGISRELARDLRQNLNMIETYLYDDFLE

SEQ ID NO: 61006 - protein, 238 aa, Listeria monocytogenes
MEEEFPTISLLGIDFNLSNILMITVTCVIVLLIAIICTRNLQRRPTGKQNFIEWVMDFVRGIINSNMDWKTGGRFHVLGITILMFVFVANMLGLPLQIAVNDEVWWRSPTADPIVTLTLAIMVLGLTHYYGIKMRGFKHYFVGTYLSPMKFLFPLKLVEEFANTLTLGLRLYGNIFAGEVLLTIIATQLAHINIFVGVLAIIPAIIWQAFSLFIGAIQAYIFTMLTMVYMSHKVSDEH

SEQ ID NO: 61007 - protein, 337 aa, Listeria monocytogenes
MFGFGNKDIGIDLGTANTLVYMKGKGIVLREPSVVAMKKDTQEIVAVGSDAKNMIGRTPGNIVAIRPMKDGVIADYDTTAAMMKYYIQKAGKSVNASKPRVMICVPSGITGVEKRAVIDATRQAGAKDAFTIEEPFAAAIGAGLPVGEPTGSMVVDIGGGTTEVAVISLGGIVTSRSVRTAGDDLDEVIINYIRKKYNLLIGDRTAEAIKMEIGSASPKGLDLSPFSIRGRDLVTGLPKTIEITPEEISEALADTVAAIIDAVKGTLENTPPELSADIMDKGIVLTGGGALLRNLDTVISEETKMPVIIADEPLDCVAIGTGKALENMDMYKRKKMN

SEQ ID NO: 61008 - protein, 653 aa, Listeria monocytogenes
MKDWKIKIQTFLSKNYGFFVLAVILYWLKTYIAYQLEFKLGIENLMQQILLFINPLSGAIFFMGLALFAKGRRSFIWIIVIDFLMSFILYANIVYYRFFSDFITLPNLNAKQMQNMGDMGSSITALLSWHDIIYFADIIILIALLAFRFVKPNKTARIRARKVVGVLTLGIAMFFGNLGLAEIDRPQLLTRTFDRNYIVKYLGMTNYQIYDAVKSTESSTQRALADSSDVTEVLNYTKSKYAAPNPEYFGKAKGKNVIYIHLESFQQFLVNYKLNGEEVTPFINSFFKDQNTLSFTNFFHQTGQGKTADSEMLLENSLYGLPQGSAFTTKGQNTYESASAILGQQGYTSAVFHGNYKSFWNRDEIYKQFGYDNFFDASYYDMNEADVSNYGLKDKPFFKESEEYLSSLQQPFYTKFITLTNHFPYPIDEKDASIAPATTGDSSVDTYFQTARYLDESVKSFVDYLKKSGLYDNSVIIMYGDHYGISDNHEEAMTKILGKDYNTFENAQAQRVPLMIHVPGVQGGVQEQYGGQVDLLPTLLHLLGVDNKEYLQFGTDLLSKDHKQLVPFRNGDYITPTYSMIGGNMYNQQTGEPIATETKEMKETKEKVAKELELSDSVLQGDLLRFYAPDGFKKVDPSKYNYNKKKSTDSSDK

SEQ ID NO: 61009 - protein, 113 aa, Listeria monocytogenes
MTSEQFEYHLTGKEILEKEFKTGLRGYSPEDVDEFLDMVIKDYSTFTQEIEALQAENIRLVQELDNAPLRTSTQPAPTFQAAAQPAGTTNFDILKRLSNLEKHVFGNKLDDNE

SEQ ID NO: 61010 - protein, 331 aa, Listeria monocytogenes
MTLKEAGLTEDKLIKMYETMLMARRLDERMWLLNRSGKIPFTISGQGQETAQIGAAFAFDLDKDYALPYYRDLAVVLAFGMTAKDIMLSAFAKAEDPNSGGRQMPAHFGQKSNRIVTQSSPVTTQFPHAAGIGLAAKMAGDEIAIYASTGEGSSNQGDFHEGINFASVHKLPVVFVIHNNQYAISVPASKQYAAEKLSDRAIGYGIPGERVDGTNMGEVYAAFKRAADRARNGEGPTLIETVSYRFTPHSSDDDDSSYRSREEVNEAKGKDPLTIFQTELLEEGYLTEEKIAEIEKNIAKEVNEATDYAESAAYAEPESSLLYVYDEEANS

SEQ ID NO: 61011 - protein, 269 aa, Listeria monocytogenes
MFDFMTLEKVREKGPLVHNITNIVVANDSANGLLAIGASPIMASAKEEMDELAKMADVLVINIGTLDGELVTAMKIAGRAANVAGTPVVLDPVGVGATSYRRKVVQELLAEIQFAAIRGNAGELAAIAGEAWEAKGVDAGVGSADVLSIAGKVANEWSTVVIISGEVDVISDGTRFAKVANGSALLPRITGSGCLLSAVCGSFIAVQDDAFRASVEACASYAVASEYAEMELERKLPGSFRPLFLDALASWSVEKTRAKAKIQESGEHK

SEQ ID NO: 61012 - protein, 314 aa, Listeria monocytogenes
MKQYLDLEKYVLENGTQKGDRTGTGTISTFGYQMRFDLQEGFPIMTTKRVPFKLVVSELLWFLHGDTNIRYLLQHNNNIWNEWAFERFVKSDDYKGEDMTDFGLRAERDPAFKEVYQAEMEKFKTRIIEDEAFATKYGELGNIYGKQWREWKTSQGETIDQLADLIEMIKTNPNSRRLIVSAWNPEDIPNMALPPCHSLFQFYVADGKLSCQLYQRSADIFLGVPFNIASYALLTHLIAREVGLDVGEFIHTMGDAHLYNNHIEQVKEQLSRTPHALPKLVLSDKPATIFDFEVADISLDGYNPDPSIKAPISV

SEQ ID NO: 61013 - protein, 312 aa, Listeria monocytogenes
MTKSVTVKDLKERLNLELICSETGLERPISTSDLSRPGLELTGFFSYYPEDRVQLFGMTEISFSEGMEPEERLKRYKQMCTKRTPAFVISRNLEVPKELVAAAKEADIPVLRSRLKTTRLSVYITNYLESRLAPVISMHGVLVDIYGLGVLITGSSGVGKSETALELVKRGHRLVADDNVEIRQEDEMTLIGSSPAIIEHLLEIRGLGIINVMTLFGAGAVRSSKKITIVVHLENWDPDKHYDRVGLDQEKTKIFDMDIPKITVPVRPGRNLSVIIEVAAMNFRLKNMGYNAAEQFTQDLNNLIGHNSSMND

SEQ ID NO: 61014 - protein, 279 aa, Listeria monocytogenes
MTTQAIILDIDGTLLNDDKQISPETKKALITAQENGVKLILASGRPTTGMHVYAEQLEMEKHHGLLVSYNGAKVVDCATNEELFNQALTVEEGKAVLEHMKQFEVKVMIDKEDYMYTNDVYDCYVPYRGEEINIIQYESRGGNFKLCEKDDLAAFLDYRLSKILTAGDPAYMQKNYQAMMAPFKDTLNCVFTADFYFEFTAQGIDKAKALDTVLTPMGIHAENVIAFGDGHNDITMVEYAGTGIAMQNAVPELKAAASSVTLSNNEDGIAHVLNSLIPS

SEQ ID NO: 61015 - protein, 156 aa, Listeria monocytogenes
MKTINSVDTKEFLNHQVANLNVFTVKIHQIHWYMRGHNFFTLHEKMDDLYSEFGEQMDEVAERLLAIGGSPFSTLKEFLENASVEEAPYTKPKTMDQLMEDLVGTLELLRDEYQQGIELTDKEGDNVTNDMLIAFKASIDKHIWMFKAFLGKAPLE

SEQ ID NO: 61016 - protein, 204 aa, Listeria monocytogenes
MPTRLKEDIATIIKNDPATKSFFDAFLTNPGLHALWWHRVANFFYRHKMVLFGKVLSQNARFWTNIEIHPGATIGRRLFIDHGAGIVIGETAEIGDDVTIFHGVTLGGTGKDCGKRHPTVGDGALVSAGAKVLGPVEIGAGARIGAGAVVLKDVPPGATVVGIPAKVVRLNGRTVGHAVPKMDELTLRIAELENIVEKLLKEKE

SEQ ID NO: 61017 - protein, 332 aa, Listeria monocytogenes
MKIITIEEHFESEVITNEINKVTGNLVSGQVNPEMFQYMQKELPSAAEMQDTEKRLGFMDQHGIDMQVLSYGNSSPQNLDPKISVSLCKRANDELAKVIQQNPTRFSGFAVLPVGSPEDAAIELKRAVEELGFKGALVKGQFENKYFDNSFYYPIFEMAEKLDVPISFHPSFIPETITEQYFASDAWSDVVTGVFSSAGFGWHMDVGIQVVRMILSGIFDKLPNLKIITGHLGEMVPMFLERMDDTLGHWTTLEHKISDYYRTNVYITPSGLLYRNEWKFLLNELDENHLIYALDYPFVKPENAGTFLDMLDLTDEVKAKIAHKNAEKLLHL

SEQ ID NO: 61018 - protein, 209 aa, Listeria monocytogenes
MSIEKQVAEQLLEIKAVFLKPNEPFTWASGIKSPIYCDNRLTLGFPKVRQFIAKSLAEKIKQTFGEIDVVAGTATAGIPHAAWVSDLLDLPMVYVRSKAKEHGKGNQIEGPISKGQKVVVIEDLISTGGSSLKAVEALEEAGAEVVGIAAIFTYGLAKGKQLLEESGTKLVTLTNYDELIEVALNENYVTGEDMETLKEWKKNPEKWGK

SEQ ID NO: 61019 - protein, 689 aa, Listeria monocytogenes
MYLDERSNSLLKELLRHPDTSSTNLQAKFGLTRRQVDYSFQKINNWLEEQTYPKIHRAANGRFIVEPDLFQIIGEEDGEKTDWYIPSEKERASLIILMLTTGSEELSLNHFISELEVSKNTVLRDLKLVQKTLDKFNLEVKYSRMRGYLIDGDEWNQRTALIYAAEHIIESFGGEEYLQDFMQVDEARIKELREKLEQVEHHLNLHFIDNKMQILPYILEAVFRRMKKGQTITTSFLIDYNELSDTREYGAAEIFIEEEPNMPEAERMYITLQLLTSNVLPKQYLKSEETHKLRLALEQVLSEFEKKACIQLVDKESLLEKLFAHIKPAYYRIKYHLTTDYSILDKIDQEFQAVHYIVKESLAPLERFIGSKVPENESIFITLFIGGHLIESTEKLQTRLKAVVVCPNGLSISRLMEKTLRSLFPEIFFYQAMSIREFEQTKLGYDIVFSAVPLSTDKKFFLINQLMDGKERLELRRRVMRSVYLVDEVNISVDQLMKTISKFADIKDAARLEKVLADYLMPVPEENTSKHEGKSSLADLLEVTRITRKKSVKDWHEAIYHAALPLLSAGVVEPAYVEEMKRQYPAPIMNIILRNTIAIPHAETEKGVNSLGMSLLYLEEGLPLEGGKELHFIVVIAAIDKNAHFTALLQLMELSENKKELKKLADAANTEEMHQIIKNFTDLETKKTM

SEQ ID NO: 61020 - protein, 695 aa, Listeria monocytogenes
MAREFSLEKTRNIGIMAHIDAGKTTTTERILFYTGRIHKIGETHEGASQMDWMEQEQERGITITSAATTAQWKGYRVNIIDTPGHVDFTVEVERSLRVLDGAVAVLDAQSGVEPQTETVWRQATTYGVPRVVFVNKMDKIGADFLYSVGTLHERLAANAHPIQLPIGAEDTFEGIIDLIEMNALYYEDDLGNDPHIKEIPADLKDLADEYRGKLVEAVAELDEELMMKYLEGEEITKEELKAGIRKGTLNVEFYPVVCGTAFKNKGVQPMLDAVLDYLPAPTDVPAINGVLPDGEEAARHADDSEPFSSLAFKVMTDPYVGRLTFFRVYSGTLNSGSYVQNSTKGKRERVGRILQMHANHREEISIVYAGDIAAAVGLKDTTTGDTLCDEKEQIILESMEFPEPVIQVAIEPKSKADQDKMGQALAKLAEEDPTFRAETDQETGQTLISGMGELHLDILVDRMRREFRVEANVGDPQVSYRETFRKSAQVEGKFVRQSGGRGQYGHVWIEFGPNEEGKGFEFENAIVGGVVPREYIPAVQAGLEGALDNGVLAGYPLIDIKAKLYDGSYHDVDSNEMAFKVAASMALRNAAKKCDPVILEPMMAVEVVIPEEYLGDIMGNITSRRGRVDGMEARGNAQVVRAFVPLANMFGYATHLRSGTQGRGVYTMQFDHYEEVPKSIAEEIIKANGGNNKED

SEQ ID NO: 61021 - protein, 119 aa, Listeria monocytogenes
MKKKYRIKKNDDFQKVFRRGKSFANRQFVVYTLKQEGSNHFRIGLSVSKKIGNAVCRNRIKRYIRQSFHELESQINPENEYIIIARKPAANMDFHEVKKSLIHVLKVGRVLKQKPNNSK

SEQ ID NO: 61022 - protein, 111 aa, Listeria monocytogenes
MNDICEITCFDEEKVQKIQTSLEDKKISDISQIFKALSEETRLTIAYALTLEKELCVCDISIIVKSTVATTSHHLKILSKAGVVQNKKIGKMVYYSLNNSLVETLIKDIVL

SEQ ID NO: 61023 - protein, 502 aa, Listeria monocytogenes
MIKISVIIPIYNAENYIEKAFSSLKNQTLAQNEFEILCIDDKSTDNSLGKLKQLSKIHKNMRIINLHKNSGGPMIPRNKGIKEAKGKYIIFLDNDDYLGEEALERLFIQAEKNQSEVIFGKYVGINGRGVPQSQFKKGNRNEADILADNLVYTLAPHKMFQTAFLKTKKIYFDPNILIGEDQYFVMKAYVNAKVITVLADYDYYYVVSRGDENLSIKESKMDPREICKVVPAVVKEIEASPLHPTYKKTLIRAYIQRYFNDYITGNYNLDYKNMSERQKTFVQVMKDTIVCHLDEKMKNELPTKTRFMIDIIAENNPEKLIDVRMQMENFSKNQVVKVENGYIKGRFRKMRPQLAYDDVYDINHLNSSKVQLHSVTLQNNNYLLDISLEQSLLTRFQTALRLCLKERDGNLEIWISPLKMLSTERGIYAVDSTLFNHTCIWDLFIESEINGFKNRKRVGKDRDFEEIVSSNNTPLLIQNNSYQIKAYFTTPFSNLSFQIISE

SEQ ID NO: 61024 - protein, 344 aa, Listeria monocytogenes
MGGLMKKNTLILGIESSCDETAASVVKNGNEIISSVVASQIESHKRFGGVVPEIASRHHVEQITLVIEEALKQANVTMDDLDGVAVTEGPGLVGALLIGVNAAKTLAFMHNLPLVGVHHIAGHIYANRFETEFKFPLLSLVVSGGHTELVLMKADNEFEIIGETRDDAAGEAYDKVARTLGLAYPGGVQIDKLAKDGEDTFHFPRAMMDEGSFDFSFSGLKSSFINTLHNLRQRGEEPNPNDMAASFQASVVDVLVSKTIRAAKQYDVKQLLLAGGVAANQGLRERLIQEVKLELPETELIIPPLALCGDNAAMIAAAGTVSFLQGKRSGFDMNANPGLLLEDI

SEQ ID NO: 61025 - protein, 255 aa, Listeria monocytogenes
METVLQAKNVRKIYGSKGNVYTALENISIDIKEGEFTGIMGPSGAGKSTLLNVLSTIDKPTSGQIVISGQELENMNEQQMSTFRRDKLGFIFQDYNLLDTLTIRENIILPLALAKRPVKEMEEKLAIISEKFGITEILDKYPSEISGGQKQRTAASRAIITSPSLIFADEPTGALDSKSATNLLESLRDLNEQDKSTIMMVTHDAFAASFCKRILFIKDGELYTEIYRGTKTRKEFFQKILDVLAKLGGDSDDVI

SEQ ID NO: 61026 - protein, 358 aa, Legionella pneumophila
MITIRNKIGQMLIMGFHGSELHDNSPVAQWLSNDGLGGVLLFDKDLSTGIYGKNLRNQAQIKQLIRQLNRYASMISGGNDNLPLFTAIDYEGGVVDRLSKIEGCPPTMKARELAKLSSDDFDEEVTQMAMTLQSLGFNLNFAPVVDLNLNAHAGIIGNLGRSFSSNPEVTIRLAKQFVDVFSRYGIACAYKHFPGHGSATGDTHEGFVDVTETFQTDELIPYRSLLKDLSNPFMVMTAHVINKHLDSKGLPATLSYDVLTLLLRQSIGYDGVIISDDLQMHAISNHYSLEDALCLTINAGADMVIFANQLGTITPPEVIDVIEKLVIDKQIPYQRIDEAYRRIVRLKQQIICSELINT

SEQ ID NO: 61027 - protein, 352 aa, Legionella pneumophila
MSGNTFGALFTVTTFGESHGPAIGCVVDGCPPGMSLTEADIQPFLDKRKPGQSKYTTQRREEDKVQILSGVFDGKTTGAPIALLIQNTDQRSRDYEDIKNLFRPGHADFTYHYKYGHRDYRGGGRSSARETAARVAAGAIARLYLKRYLNLDIIGYLQQMGDLKLQFENENEINKNPFFCPNNKQIQELADYVDRLRRQGDSVGARVKILARGVPTGLGDPVFDKLDATLAYAMMSINAVKGVEIGAGFNAVEQLGSHHRDQMTAKGFLSNHAGGILGGIATGQPIEVSIALKPTSSITTPGQTINTEGEEVTVVTKGRHDPCVGIRAVPIAEAMMALVLMDHYLRHKAQCK

SEQ ID NO: 61028 - protein, 316 aa, Legionella pneumophila
MIYPNILATIGHTPVVKINRLGKDLECELYAKCEFFNPGGSVKDRIGYEMVVKAEKEGRIKPGDTLIEPTSGNTGIGIALAGAVLGYKVIITMPEKMSQEKQSVLERLGAIIYRTPTEAAYNDPDSHISLAKKLQAEIPNSHILDQYANPNNPNAHYFGTAQEIIDDFGKDLHMVVAGVGTGGTITGIAKRLKEFNPAIKIIGADPEGSILGGGTEIKSYHVEGIGYDFFPDVLDNTLIDAYIKTNDADSFRTARRLIKEEGLLIGGSCGAAMWAALQAAKSLSKGQKCLVILPDSIRNYMSKFANDEWMKEMGFL

SEQ ID NO: 61029 - protein, 309 aa, Legionella pneumophila
MEQVRQLLCLYYAHYNRNAKQLWSDAHKKGIKSEVICFVAAITGCSSALDTLCLLLTSDEIVKVIQAENYQAFRLAAENGHLHVLNRLCELAPTEIMAMIQAENYHAFRLAAENGHLHVLNRLCELAPTEATAMIQAENYYAFRWAAVGRGHHNVINFLLDCPVMLAYAEIHEFEYGEKYVNPFIARHVNRLKEMHDAFKLSNPDGVFDLVTKSECLQGFYMLRNLIRRNDEVLLDDIRFLLSIPGIKALAPTATIPGDANELLRLALRLGNQGACALLLSIPSVLALTKANNYYINETGGRLDLRAVA

SEQ ID NO: 61030 - protein, 546 aa, Legionella pneumophila
LQQSFSLLRATIESSSDGILVVDLQGKIVDYNSQFVKLWNIPESIMKKTSESQLIQYMSTQLLNSEQHAQHVKEFSIHIDDSSIQIYHFRNGKVVECCSKPHRVGPQTVGRVWSFRDITEQTRLKEKLEYQATHDALTNLPNRLLLIDRIEHAISSYARHKMKFAILFFDLDRFKMINDSLSHEAGDQLLCAVAKRLRSLVRKEDTLARLGGDEFVMLFQSFNSEEQIAGVAQKILKSFQKPFHIAERDINIHVSIGISVYPTDGKTVNTLLSNADMAMYQAKFRGGNQFSFYTEKLNKKTNQQFQLELDLQKAIIHHEFFLLYQPQFTVNTHEIRSMEALIRWNHPQKGIILPLDFIPTAESSGLIVPIGEWVLRETCKQIGTWRTMGLPEIRVACNVASKQLRQRDFPAMVEDLLKEYSVKPHCLELEITENVIIDKEIQRTIKKLKSLGVLIILDDFGTGNSSLNLLKQVAVDSLKIDQSFIQNISKSPGDEAIIDAIIAIAQSMNFNIIAEGVETQNQLKFLKKRRCNDIQGFLMSKPIPSE

SEQ ID NO: 61031 - protein, 492 aa, Legionella pneumophila
MSKELLLVAEALSNERGVSKDVIILAIQAALESATRKILGLDIGVRIKIDSKTGDYETFRYWDVVNEEELEFPDRQLSLEQAKERKPSAAVGDRIEEIIPSIEFGRIEAQTARQVIMQKVREAERELIIDQFRSKLGQLIYGTVKKVTRDNIIIDLGGKAEAFLPRSEMLPHEMFRPNDRVRAYLYEITPQARGPQLFVSRTRNEMLIELFRIEVPEIGENIIDIKAAARDPGNRAKIAVKTNDGRIDPIGACVGMRGARVQAVSSELGGERVDIILWDDNPAQLVINAMAPADITSIVVDEDTHTMDLAVAKEQLSQAIGRNGQNVRLASQLTGWTLNVMTTEEFESKNQEESSKIVNLFTSALEIDEEIATLLVAHGFSSLEEVAYVPKEELLAIEEFDEEIVEELRNRANDKLLEMALSSGKGLSGTPDDSLINMEGMTEDLANKLASKGITTMEDLAEQSVDELMEIEGISEEKAGALIMKAREPWFQ

SEQ ID NO: 61032 - protein, 412 aa, Legionella pneumophila
MNSRRVVITGMGMLTPVGLNVEETWRSILAGVSGVGLVEDFDTTEYPTKIWAKVKNFNVENHMPIKDARKMDVFTQYGMAAADEAMLDSGLKIDEVLSRRIGVAVGAGIGGIQTITNNQDKLVAGGPRKVSPFFIPAGIINMVAGQISIKHNLKGPNISVVTACTTGTHNIGLAGRIIAYGDADVMICGGAEMTTTPLCLAGFSAVRSLSKRNDEPEKASRPWDKDRDGFVMGEGAGVLVLEEYEHAKARGAKIYAELVGFGMSGDAYHITAPDEDADGASRAMEAAIQDAGIDPRQVDYINAHGTSTYLNDLNETKAIKRVFQNHAYDLAVSSTKSMTGHLLGAAGAVEAIISILAIRDQVAPPTINLDNPDEGCDLNYVAHVPQSRTINYVLSNSLGFGGTNGSLLFKRI

SEQ ID NO: 61033 - protein, 471 aa, Legionella pneumophila
MFKKILVANRGEIALRIVRACKEMGIAAVTIHSEVDRFALHVKRASHSHCLSKKPLDAYLNGRRIIECAKVAGCEAIHPGYGFLSENAEFAEDCNKAGIVFIGPSAPVIATMGSKIAAREAMIKAGVPTIPGSKGNLETIDDALHCAETLGYPVMLKATFGGGGRGIRLCHDASQIKQQFARVQSEAEKSFGDSHIYMEKYIANPRHIEVQILADHHGTVLHLFERDCSIQRRHQKLVEIAPSPQLDEATRQVLLGYAVKAAKEVGYTNAGTVEFILDKNNRPYFMEMNTRLQVEHPITEQITGIDLVQEQIRIAAGERLTISQEQIKYNGFAIEFRINAEDPQNDFLPSFGRITRYYAPGGPGVRTDSAIYTGYQIPPDYDSLCAKLTVWAFDWPSVLRRARRALEEMRMFGVKTTIPYYLEMIKSEEFQKGVFNTGLVEAHPEWLKYSNKSLPQHKAAVIAAAIALHKT

SEQ ID NO: 61034 - protein, 155 aa, Legionella pneumophila
MREIKTIVSDGVTFPIALVVSTFNELITSALKKGALDRLTELGFKSEDITLVEVPGAVEIPFVAQLLAKKQKVEVIVALGAVIRGETSHYDYVCDQVSQGCQRVMLDYNIPVIFGVLTTENDEQALARVGGTHGHKGRDAIDCAVSMRSIKQQLQ

SEQ ID NO: 61035 - protein, 126 aa, Legionella pneumophila
MQTPKGELTIQTLAMPLNTNANGDIFGGWIVSQMDLAAGVLAKRISHGRVATVAINSMTFLKPVHVGDVVSCHVELVKVGNTSMTIRVEVWAYSSIKMEKYQVTEGIFVFVAIDENGKPRQVPKTQ

SEQ ID NO: 61036 - protein, 332 aa, Legionella pneumophila
MKLASLKSTRSRDGELCIVNRLLTAAIRVPHIASTLQYALDHWDVVEPKLQLVYQQLNDNQIEDAFAFAPELCASPLPRAYQWADGSAYVNHVELVRKARGAEMPADFWTNPLMYQGGSDAFLGPRDPILVSSEAYGIDFESEVAVITDDVPMGIDHTNAAHHIKLLMLVNDVSLRNLIPEELAKGFGFFQSKPASSFSPVAITPDELGSYWDGQRVNLPLISHLNEQLFGQPNAGVDMTFSFPELIQHAAKTRFLTAGTIIGSGTVSNLDRSKGSSCIAEKRMLEMIEFGQAKTPFMRFGDRIRIEMLDGQGYSLFGSIDQIVTKYDKDSL

SEQ ID NO: 61037 - protein, 159 aa, Legionella pneumophila
MTLCPCGSQNKYEQCCGIYLESKKTPETPEQLMRSRYTAYSLAKIDYIKQTMQGKPLIAFNESEAKQWAQNVSWLGLKIIQSYMERPDKGFVEFIATFLDGNQLKSIHELSEFQKDNSVWFYVDGEAKQLPNKQDKQKIGRNSPCPCGSGKKFKNCHDK

SEQ ID NO: 61038 - protein, 66 aa, Legionella pneumophila
MSTIQLEAQSRTDMGKGASRRLRRLENKVPAVIYGGSKKPMAIHFSHNKVIKDLETESIYFSVFDI

SEQ ID NO: 61039 - protein, 92 aa, Legionella pneumophila
MAHKKAGGSTRNGRDSNPKYLGVKRFGGQFVNAGEIIVRQRGTRFHPGPGVGCGRDHTLYALVEGLVQFTTKGEKNRKYVTILPEQREEAAS

SEQ ID NO: 61040 - protein, 367 aa, Legionella pneumophila
MFELTIKKEDLLTPLLTVSGAVDKKQSLAILSHFLLKLSDGLLYITATDLEIEMSAQVACDSKNTSGSITVPAKKFIDIIRSLDENASPSIVFDKALVTIKQNRSTFKLATLPAENYPSSEDECNDVELTIPRLVLLQLLQSTHFAMSQQDVRIFLNGLLLEFDSNIISAVATDGHRMAISRYSCNNIAQTKLLIPKKGVQELLRLLNCINDEQVLLAAGKSHIKLITNQFVFLSKLIEARFPPYTKAIPREQDKCIVIDCASLKRALSRIVILAHEKSKAVLLHLQQGQLTLIANNNEQEEAIETLSAETQGDELKIGLNATYLLDVLTHFSEGQIRLSMSNTESSILIESLVNDNYQYIIMPMKI

SEQ ID NO: 61041 - protein, 54 aa, Legionella pneumophila
MAAVTIKVKMESTAGTGYYKTTTKNPRNHPEKMELMMYDPKVRKHVLFKEKKVK

SEQ ID NO: 61042 - protein, 244 aa, Legionella pneumophila
MEQKSKSIIRVWYLILLLSQYSFANVYVLPEAGNTVGEIQVAFSEYGETIDEVGRRFNVGYYEMVRANPGVNARYPLAANTKLIIPSRFILPNVPRKGVVINLAEYRLYYFPPDDNVVMTYPVGIGKKGWETPLGLSRIISKEINPTWRPTVKLQKAAESIGAPIPSEFPPGPHNPLGQHVLRLGWPAILIHGSNRVDGIGAKVSAGCIRMLPEDIEHLYSLVSVGTPVRIINAPLQGQADFKQ

SEQ ID NO: 61043 - protein, 386 aa, Legionella pneumophila
MKNQSLIVNWNYPTRILVGAGRINELAKVCRELGMNAPLLVTDPGLASSLMVSKVIQQAQASGLRTGLFCQIKTNPTGDNVMNGVYAFKAGQHDGVIAFGGGSALDAGKAIALMVGQDRPLWDFEDVGDNWTRVNVSAMAPVLAIPTTAGTGSEVGRASVITDAEKQVKKIIFHPKMLPAMVILDPVLTVGLPKSLTAATGMDALSHCLEAYCSNYYHPMAEGIALEGIRLIKENLIQAYKDGSDLEARTHMLVASAMGATAFQRGLGAMHALAHPLGAIYDVHHGRLNAVLMPYVLLANRSEIENKIEHLANYLSIANGFDGFLDWIEQMRLELGIENTLSQLGIDHSQIDRLAKMATEDAAAASNPVLFTLEQYKELLSKAIGE

SEQ ID NO: 61044 - protein, 329 aa, Legionella pneumophila
MDGIERAAILLLSMGEKNASEVLKHLEPRQVQKVGMAMSTMNSVSKAKMQNVLIDFISAIEDQTSLTVDTEHYLRTVLIEALGEEKAIPFIDRILVSNKDSGLNKLKWLDGRLIAEVIRNEHPQIIATILIHLDSEQSAEVVSYFSAEKRAEVLLRMCNIDTVKPEAISELGHVIEKQLSGQTTGKSSSVGGIKTVADVINFLDGAMEEEVLERIKDWDEELSEKIRDKMFVFENIKDMDDRSVQTLLREVTSDQLKLALKGTTETTKEKIYSNMSKRAADLLRDDIEVQGPVRVSDVERAQRDILAIARNLAEDGKISLGAKGGDELI

SEQ ID NO: 61045 - protein, 440 aa, Legionella pneumophila
MIDSTLITLDYHDFSSESYEKFSRLPGFVLLQSTDKSTGRYDILSAYPYERMVIENNVHDKDLVLTELKNKLKIEESEFDLPFQGGAIGYVSYDFGSLLHNHEQYSQKDLAHIPVLNFGFYDWAIIVDHHLKKATLFARNSHSSTKSVVDKIKNILNDQPMKSVQFSVQAEFLPLISKENYRSSFNAIQQALRAGRSYQVNFTQPFQTKFTGDLWDMYQRVNKNNPVPYAAFIRTEEADILSFSPERFLLYDNGEMLTSPIKGTIHRSKDPVVDKKLKEQLLKCPKNKAENVMIVDLLRNDLGKLAKAGSVKVMNLCHIQSFNAVHHLVSDIRALCKEDIHPIEAFFSCFPGGSITGAPKLETMKIISEQETYKRGVYCGCIAYFSQHGRFDANIAIRTVTAKDNVLYLAAGGGIVIDSDWEDEYRECFTKITAIINGIK

SEQ ID NO: 61046 - protein, 126 aa, Legionella pneumophila
  MISC_FEATURE (18)..(18): X=any amino acid
  MISC_FEATURE (119)..(119): X=any amino acid
STTLFSLALGADSPCSDXRRAGNLGLPACGLFTHIIVTHVSIRTSDTSSTLLNAPSSATERSPTTAPSRTSAASVTSFSPVTSPRRPTRPVSYYAFFKGWLLLSQPPGCLCLPTSFPTXLVLGDLS

SEQ ID NO: 61047 - protein, 300 aa, Legionella pneumophila
  MISC_FEATURE (68)..(68): X=any amino acid
DVLLCRSTLKINGDLLKNHQIKFVATATSGTDHIDFPFLESQNISIIDAKGCNAISVADYVVACLPYXDTQQLIQGKTAGIIGLGQVGTKVYERLNAAEFQLCLYDPPKATRDTSFQSCSLEDLFECDLLCVHAELHSDAPYPSLNLINRDFLKELKPGCIIINASRGGIVNEEALLHLGSAILYCTDVYNNEPHIDSRIVSKATLCTPHIAGHSLEAKFAAVAIVSRKLHQMLGLPYPQFATPEKPYRLNENSDWRELALSIYNPIHETLELKHAGNLSSAFLTLRKNHHHRHDFTTYF

SEQ ID NO: 61048 - protein, 295 aa, Legionella pneumophila
  MISC_FEATURE (272)..(272): X=any amino acid
MKKMAYFWRKGLWALMSLFFLLIVAGSLLYLYLESQLPNVDSLKTVQLQVPLQIFSKEGLLIQEYGEKKRIPVTYDEIPPTLIHALIATEDQRFFEHPGVDVMGLGRAAVSMLKTGTKSQGGSTITMQVARNFFLSRKKTFLRKFNEIMLAIKIDRELSKEKILELYLNRVYLGNRAYGVGAAAMVYFGKSLKDLNLAELAMIAGLPQAPSTQNPIANPLAAKKRRDHVLERLLEEHYINEEQYQNAVNQPNYCKYHGTNIKVKAPYVAEMXRQSLYDNFGPGAYTKGYKVYTTH

SEQ ID NO: 61049 - protein, 348 aa, Legionella pneumophila
MEENKQKALSAALSQIERQFGKGSVMRMGDSTVSRDIEAISTGSLGLDIALGIGGLPKGRIVEIYGPESSGKTTLTLQVIAECQKMGGTAAFIDAEHALDPSYAQKLGVKVDELLVSQPDTGEQALEITDMLVRSAAVDVVIIDSVAALTPKAEIEGEMGDSHVGLQARLMSQALRKLTANIKRSNTLVIFINQIRMKIGVMFGSPETTTGGNALKFYASVRLDIRRIGSIKKGEEILGSETRVKVVKNKVAPPFKMTEFDILYNEGISRESEIINLGVQLNLIEKSGAWYSYKQEKIGQGKENVRLYLKENPQVAAELEQQIRTELLEKKLSVLASSSEDLFETIDD

SEQ ID NO: 61050 - protein, 763 aa, Legionella pneumophila
MILTGALFVLLSLFTYSTNDPGWSHASRSGMSVSNSGGQVGAYIADALYFAFGYFAFLLPVAFVYIAWAILKDFRSFKALDRMVLLLRTVGFILMVSGGCGLLSINHRFEAVDTIHSSGGIIGQTVGNGWYQMLNMEGATLLLLAMFLVGTTWLTGLSWIKAIELIGCYTLNLFTFLDKFIRKGMQIISENFNKEKLKTPLIKTEQLPKPDNEKKKSVPKLFQDKKDKEQEKATPVLIASEEKPEIVKPTNEFKEIRPPKTITPGALPSLSLLDKGQPGKPMGGYTHEELESLSRDVEQHLLDFGIQADVVAVHPGPVVTRFELQLAAGVKVSKLTALAKDLARSLSVISVRVVEVIPGKTVVGLELPNHSRQVVRLSDVLSADVYQQAHSPLSLALGVDIGGHPMVVDLAKMPHLLVAGTTGSGKSVGINAMILSILFKASPEQVRLIMVDPKMLELSVYDGIPHLLTPVVTDMKEAASALRWCVEEMERRYRLMAALGVRNLAGYNTKITEAAANGQPLLNPLWKPVDSMDETAPELQALPYVVVVIDELADMMMVVGKKVEQLIARIAQKARAAGIHMILATQRPSVDVLTGLIKSNIPTRISFQVSSKIDSRTILDQQGAEQLLGHGDMLYLAPGSGAPLRVHGAFVDDKEVHRIADDWRSRGEPDYVDDILKMGNENGDGAFDDDSGGQSVEDDDPLYDQAVEFVIQTRKASISAVQRRLKIGYNRAARMIEEMERTGIVGPLDGGYRDVLVTSVTED

SEQ ID NO: 61051 - protein, 1085 aa, Legionella pneumophila
  MISC_FEATURE (2)..(2): X=any amino acid
  MISC_FEATURE (1074)..(1074): X=any amino acid
  MISC_FEATURE (1079)..(1079): X=any amino acid
HXMFTHLIAWSLHNRPLILALTIILCLLGGYTLKQMPVDVFPEFAPPQVVVQTQAPGMATQDVETLITYPLESAINGTPGVVSVRSKTSVGLSTITVVFDDQTDIYRNRQLVNERIQQVVNRLPPGVESPIMLPVTSAVGWLVKYALVSRTESPETLRTISDWTIRPRILALGGVASVVSLGGEVKQYQVRLIPERMLAYRISVEDVRQALTSANQNVPGAFVHQAGTEFVVSTLGRIKTLKDIKKTLIVVRNGVPITMNNVANVAFGGEIKRGDGAYNTQNAVIGTISKAYGADTVTTTAKVEKALAEIKKSLPHDVTLVTNVFRQASFIESAIHNLTRALLEGAVIVIAVLFVFLMNWRASFITFLSMPVSFVVGILVLHYFGIGINSMTLGGMAIAIGEVVDDGIITVENVVHRLRINRQEAHPLPTIQVVFDAVLEIRSSVVYATIIISLVFLPIFFLSGIAEHIFSPLAIAYIASVLGSLVVSITMVPALCYWLLVRGQEKQQDVEVSLHALSNKERHYAVEREGNHQAESETRFVLWLKKHFLTALQWSIAHCKMVLAFALSAFVFALALLPFFGTSFLPEFHEGNFIVVMSTLPGTSLNESMRLGQQVQKALLRYPQVISIAQRAGRSELDEDALPPNISEFDVLLNFDKDKSMRPDELLRRIRADLANIPGAVFNVGQFIAHRMDEVLSGVRAQVAVKIFGDNLSTLNELGQSMETLLKSVPGVVDVNKEQQIKVPQLVIQLDREKAARYGVNVGQISEDVQVLLNGVSVSSVLEGQRTFDLYLRMDKPGRDSVKNIQNMLIDAHGVGEGSNAQIPLRAVAEIALEPQPFAINRENVQRLLVVSFNVQGRDLGSVIAGVQQEVQEKIKLPTGYFIQYGGQFESQQQASRVILVFGGLVIFVMLILLHKAFGTFREALLVMFNLPLALIGGVISLFVVSGEMSVAAMIGFITLFGIAARNGIILVSHYNQLRLQGKTREQVVIDGTMDRLVPVLMTAATAALGLIPLLWGSPAGKELERPLAQVLLGGLFTSTVLNMFVVPTVYNAIEVWREQRMQFNKTEQGEKTXSTLLXNQKSHF

SEQ ID NO: 61052 - protein, 608 aa, Legionella pneumophila
MIEKIRNIAIIAHVDHGKTTLVDKLLQQTGTLNERAPKVERVMDSNALEKERGITILAKNTCVYWKGYQINIVDTPGHADFGGEVERILSMVDSVLLLVDAVDGPMPQTRFVTQKAFARGLNPIVVINKIDRPGARPDWVMDQVFDLFDNLGANDTQLDFPVVYTSALNGYAKLNLEDNATDMSALLQTIVDKVTPPCVDANGPFQMQISSLDYSSYVGTIGIGRITRGQIKAKSPVKIIDKDGNMRSGRLLQLLGFKGLERVEVEEASAGDIIAITGIESLNISDTICDPNLVEALPALLVDEPTISMTFQVNDSPLAGQEGKYVTSRKIRERLNTELLHNVALRVEDCDDPDKFRVSGRGELHLSILIETMRREGYELAISKPEVIIREVEGEQQEPYEHLTVDVEENHQGTIMEKLGERRGEMQNMVPDGKGRVRLDYIIPTRGLIGFHNEFLSCTSGTGLMYHVFDHYGPLIKGRIGKRLNGVMIANCPGTARAFALFNLQERGRLFLEPQSVCYEGMIVGIHARDNDLVVNVTKEKQLTNIRASGSDENIILTPPVKLSLEQALEFIDDDELVEVTPLSIRLRKKFLKEHDRKKASRTATSEE

SEQ ID NO: 61053 - protein, 159 aa, Legionella pneumophila
MDEQISKSQKKRDAHYLQDIGIKFIDLSASKLDSLPLPDNLRQAIVDARSIKSHGAKRRQAQLIGKLMRAADFEAILAAYEKILEEESSVTASFHEIELWRDRLLQDGKDALTEFIDAYQPEDVQQLRQLIKKALDDQMKEKNTGAAKALFRYLRSLIK

SEQ ID NO: 61054 - protein, 301 aa, Legionella pneumophila
MIGCVFLLLIVLIPGIGKSVNGSRRWLALGPIGVQVSELTKLAMIFYLSGYLVRQQEAVCESIFGFIKPMAILAVVSVLLLLEPDFGATVVISGTVMAMLFLAGVKLRYYFGLMLVVVTALALLAVSSPYRVARLTAFLDPWADQYNSGYQLTQSLIAFGRGGWFGTGLGESIQKLLYLPEAHTDFLFAVIAEELGLFGILVVITLYSILVIRGLNIGYTAYTQERHFASYTAYGLTIWLALQASINMGVNAGLLPTKGLTLPLLSYGGASMVINCIVIALLLRIDHENRWQSLGLRPLTA

SEQ ID NO: 61055 - protein, 343 aa, Legionella pneumophila
MNNMHYSNYQTCAVKPQIELSEWDILSSLPTALVILNAQGKVVWLNPSAEAMLGYGLIGSLWVDVIQKAFVPRADDGHEVSLADGRRVHVALSSLESLPGILITLSDITASRDYEEAKENEKRLVSIGTMTAQLAHQIRTPLSSAILYTEHLNNLPSLDHRIKNWIHRLQECHASIEQQIQDLLLFARGTSIEPKYIDMEFWCSQLMQRAQPYIESYAAVLHVNNHLIARESSIHGESLIGAILNLIINALQSEATQIDLTLASMDDSGIQISVEDNGNGMSEEVRAQAFSPFYTTKAQGTGLGLAVVFAVVKAHGGRVTLESTEGIGTQVTIYLPCLNRNVG

SEQ ID NO: 61056 - protein, 762 aa, Legionella pneumophila
MSSHITLIKTNTSNENQMTQCNYPVDNDVMIIQAMVNNVTKQITPVWPLEKFIACNSLHGFESMSFEEAVIQNQTAKKGTPFNEKLERVNWHMIKWCGSFLDIGQGTIEMPHRDKGLYFGFLKLAPFDSTLHQNNKSTKNWLSNLPEMPEQAIRLCLDKLGVLNQRQEEFLQSTLSHLPGWAGYIKWISEWKNRNGKEENPVSLVDFLAVRLIITCILWPEANLEEKKKEKDSADTKQLIQNIKHKEDDYRQLLLKKLLPELNKVQIKGNRAKAQMVFCIDVRSEPFRRCIEKLGHYETLGFAGFFGLPVSIKDYDGETIKDSCPVLLKPRFNIHEKAIAANEHCLEHHEKGKEFKKILNRVYQQLKYNFSTPFALVESLGIWCGITMFLKSCSPIFARRLTQDLNEMICPSIQTQPVFELDLLEKEVGISLQEQIAYAEMALRLMGLTDNFAKLVIFCGHGSSTQNNPYASALDCGACGGNQGGKNAQLLASILNKITVRRALAENGINIPQDTVFCGAQHDTTTDEVEIYHSNVSQFIDQDILDQLRADLNMAKHNNNLERINYLNSIDCAEKDIVRRSADWSETRPEWGLARNAAFIVAPRQLTKNIDLEGRCFLHSYDWSKDEDGTLLETILTAPMVVAQWINTQYLFSTIDNVAYGSGSKITHNVAGKIGVMQGNASDLMHGLPLQSVMSHDEKSFHEPQRLLTVVYAPREIISELVEKHDVLKTLFFNEWVHLVAIDPRSHLFYKLEKTNTWSVIK

SEQ ID NO: 61057 - protein, 1066 aa, Legionella pneumophila
MFTRLIAWSLHNRLLILALTIILCLLGGYTLKQMPVDVFPEFAPPQVVVQTQAPGMATQDVETLITYPLESAINGTPGVASVRSKTSVGLSTITVVFDDKTDIYLNRQLVNERIQQVINRLPPGVSSPVMLPVTSAVGWLLKYALVSHTASPETLRTISDWTIRPRLLALGGVASVVSLGGEVKQYQVQLDPKRMLAYGITVEEVRQALATGNQNVPGAFVHQGGTEFVVSTIGRIKTLDDIKKTLIVVRKGVPVTVNNVATVAFGGEIKRGDASFNAENAVIGTVSKIYGADTLTTTRKVEQALADIKKSLPAGVELNTEVFRQANFIESAIHNLTRALIEGAVIVIAVLFLFLMNWRASFITFLSMPVSFIAGILVLHYFGFGINSMTLGGMAIAIGEVVDDGIITVENVVHRLRLNRLAEKPLPTIEIVFDAVLEIRSSVVYATIIISLVFLPIFFLSGIPERIFSPLAIAYIASVIGSLVVSITMVPALCYLLLVRKTEKNQDAKVEVHALSEDERYHYAQEETVKQTQTETRFVIWLKKHFLTGLNWSLAHCKTVLVISIAAFIFALSLLPFFGTSFLPEFHEGNFIIVMSTLPGTSLDESMRLGKQVSKTLLKYPQVISIAQRAGRSELDEDALPPNISEFDVHLNFGKDKTMSPDELLQSIRADLANIPGALFNVGQFIAHRMDEVLSGVRAQVAVKLFGDNLATLNELGESVESILKTVPGVVDINKEQQINVPQLVIKIDREKAARYGVNIGQISEDIQILLNGVTVSSILEGQRTFDLYLRIGETERDSVKAIQNMLIDAHGAANNQETKIPLRAVADIQLEPQPFAINRENVQRVLVIGFNVQGKDLGSVIQEVQHQIKEKISLPGGYFVQYGGQFESQQQASRVIVLFGALAIFIMLVLLHKAFGTFWEALLVMFNLPLALIGGVVSLFLASGDMSVAAMIGFITLFGIAARNGIILVSHYNQLRSLGRGREQVVIQGTLDRLVPVLMTAATAALALIPLLWGSPAGKELQRPLAQVLLGGLLTSTVLNMFVVPTVYNAFEIWHEKRKQSKESS

SEQ ID NO: 61058 - protein, 252 aa, Legionella pneumophila
RYDAIIWNDDRIFLGEGLFETIRVNSSKPSFAYMHWERLGNSARQLGIPFEISFDDWFEHLIQKIQKDNLYHGGIKAILSGGPASRGLAERGQVSQLIFQTFNYSIQKHPVRLISINWLRDKANPLYQLKSVNYLEAIIAQRQAIAVGADDALFFNTENHVTETTCANLFLIENNILYTPRVEDGILPGITRARLISHCQQHKMSVQEISLTKKRIEDADAVFLTNSLQGIRRVLSLDNIIFEVNHPIIDKL

SEQ ID NO: 61059 - protein, 144 aa, Legionella pneumophila
MNLNTLSPDPGSRPSRRRVGRGIGSGLGKTCGKGHKGQKSRAGGYHKINFEGGQMPIQRRLPKMGFKSRVGRTIDEVSLGELAKLNDEVIDLVALRKAGLINNSIKDVKVILSGELTAAIKLKGLRVTKGARSAIESLGGSIEE

SEQ ID NO: 61060 - protein, 414 aa, Legionella pneumophila
MSVKNAIYAQSGGVTAVINASACGVIQTAKLFPEQIGKVYAAKNGIIGALNEELIDTSLESEEDIAKLMQTPSGAFGSCRYKLKDNGEEYQRLIAVFKAHNIGYFFYNGGGDSQDTAHKVSQLGKTMGYPITCIGIPKTVDNDLPFTDNCPGFGSVAKYIAISTKEAGFDVASMAASSTKVFILEVMGRHAGWIAAASGLAEQNPGEPPHIILLPEVPFEPTRFLKKVKDCVNSYGYCVIVVSEGIRNKEGKFLSEAGLRDAFGHAQLGGVAPVIAQLIKSELGFKYHWAVADYLQRAARHIASQTDLDQAYALGKAAVEYAVKGYNAIMPVVIREQDEPYQWSIGQVPLAEVANQEKAMPPEYIAEDGMGITDACKRYLSPLIQGEAYPNYKNGLPDYVRLKNQLVAKKINQD

SEQ ID NO: 61061 - protein, 114 aa, Legionella pneumophila
MFAFKKAQRLLKKNDFDFVFESAKKITTDDFIFLFRENKLGYARLGLALSKKMIAKAHDRNRIKRLLRESFRHTNLPAVDIIILARPGLAKKTNLGINTKLNKTWEKLASCYGK

SEQ ID NO: 61062 - protein, 139 aa, Legionella pneumophila
MPRGVYLGFDFGYKRIGVAVGQRLTCSASPLSTIEAKAGIPDWNTIQKVITQWNPQALIVGLPTCIDDRELYTTSAARRFAKQLHKRFSLPVHLVDERLSTVEARGYLFEQGGYRQIKKAEVDSIAACVILEQWLQQSE

SEQ ID NO: 61063 - protein, 297 aa, Legionella pneumophila
MGHFWLKEHKSLIWIGPNLVPESGIMIQAGRHPVIEPLLQERFIANDLELKPNQNMLLITGPNMGGKSTYMRQTALIVLLAHIGSFVPADKVTLGPLDRIFTRIGASDDLSSGRSTFMVEMTETAQILRQATSQSLVLIDEIGRGTSTYDGMALAYASCAFLASTIKAYTLFSTHYLELTELPKEFSCIRNVHLQASIKTGQIVFLYRVEEGCANRSYGLEVAELAGIPKEVLKLAHEHLNQIQDTQSILVQTQIIKPPTSPVLTELKKIDPDRLTAKEALDLIYKLKHLECAESIN

SEQ ID NO: 61064 - protein, 404 aa, Legionella pneumophila
MNKLVQKMMLSGQFLMILALEMTNPFLPLLIAHQSNTPVPSVVIYNTLSLVLPMLANILLTPIWGLAADRYGYKPMLMRASWALVLTQASMIFVNSVFWILIIRLLQGAFAGFLVAMQTYALSITEWQSKSTQLSRLQSSKAIATSTAGFLGGLALSFTNYQGLFGLATLICLGTTVVMHYKLPSPPKQQIKKRSQTLNHSYTSKSVFFFLCVLIMLTQIAKFLPDPGFTLYLNKYCSNNLVLIGFLYSLPAMGMLCSSVWCGKQFDYCRSQPSLVNQYLIRYSVFGAILMIIQANVDNFYLFALIRILWGIVLAALLPALFALCSDRNLLPGYALGLANSFAKLGNLIGLLLGGLFAFYLPYPAIFMIIAGIYSLFAIFVYGYDRLNVRQMTDFSNSYFNVKS

SEQ ID NO: 61065 - protein, 1625 aa, Legionella pneumophila
MSYKFEEGKDAIVKSVVEKIKQTMTGEQTEFCAEFAKQFYGTVALEDLLEWEIDDLYGAAVNFWSLICERAPHETKIRIYNPDYERHGWQTTHTVVEVICEDMPFIVDSLRIVINRMGLTSHLTIHMGGIRVKRDSHNRVTEILPRNGGAARDDVLHEAPIFIEIDRQTDPATLTELHKNFERALEDNRAVFEDWDKMRTKVREIIKELDTVPKTIDISEIEETKAFLNWMEDHHFTFLGLRDYDLVKKGKETILQPIPETGLGVLRQSLSKSNARSITAMGPEAQGLISSPRILVMSKTNTLASVHRDAYTDYIGVKRFNKKGEVIGERRIIGLYTSAAYHTNPKHIPFLRHKVALIMKNSNLNPYSHAGKVLLNILETLPRDDLIQGTEDELLEIAMGIFYMQDRKRIRLFARADVYKRFISCLVYVPKDRFNTELRYAMQKILADSFNAEEITFSTQFSESVLARIHFIVRVNPKNLPDFDLKEIEQKLIEVGRSWIDDLQHHLHEVYGEEQANSLYSRYKNAFPISYSDTFSPRTAVYDIKHIEMLSPENSLGINFYKPLDESEKSFRLKVYQHDTTIPLSDVLPILEKLGLRAISERPYVLKFEDGKVAWINDFAMQYNKESEFNIDEIKELFQNAFARVWFGDAENDGFNLLVLAAGLNWREVAVLRTYAKYFRQIGFTFSQDYMETALNNNVSIAKKLVRLFEIRCNPHDSKKREDRYVALVAEILSDLDNVANLDEDRIIRQYVHAIGATLRTNFYQVDAQGNPKNYISIKLSSKLIPGVPKPYPMFEIFVYSPRFEGVHLRCGKVARGGLRWSDRREDFRTEILGLMKAQQVKNSVIVPSGAKGGFVPKQIPANATREEIMEEGISCYKLFIRGLLDITDNYKEGLIVKPQNVVFYDEDDPYLVVAADKGTATFSDIANSISQEYDFWLGDAFASGGSVGYDHKKMGITAKGAWESVKRHFYELNRDIQNNDFTVVGIGDMAGDVFGNGMLLSRHIKLVGAFNHIHIFIDPNPEAEASFKERERLFNLPRSNWTDYDKKLISKGGGVFSRSAKSIPVSPEMQKVFGIKQTSIEPNDLIKAILKADVDLLWSAGIGTYVKSSTESNTSVGDRTNDATRVNANQLRCKVIGEGGNLGLTQLARVEYSLHGGKVYTDFIDNSGGVNCSDKEVNIKILLNNVVSAGDLTPKQRNELLSNMTDEVAKLVLRDNFLQTRAISLTASQALRAIELHARYINELEKTGKIDRTLEFLPDEKVLMEHKLMGKGLTQPGIAVLMCYSKTILKEQVLASEVPEEDYMNQILIGSFPKPLQERFSKQMQDHPLRREIIATRLSNIIVNEMGFTYVYRLQDETGASVAAIVRAYMIARSVLNLEAIWKQIEELGTKVSAQAQVDMMMLYVRLSRRVTRWFLRTHRRSMSITQAIELYAKGVDELKKSMPAVFGETGRIQYEEHYQERIKEGIPPQLAHELTVTRGLFAATDIIEIAYEENIKISKVAEIYFGIGEFLDIAWLRTQIIVHTTENHWESLSREALRDDLDWQQRQLTAAIMGFEPNNKDLQERLTRWGETHVSLIDRWNYILTALKSSTALNYTMFLVATRELLDLTQTTLQSNLKMEESF

SEQ ID NO: 61066 - protein, 396 aa, Legionella pneumophila
MNLIKMSDIDLSGKRVLIREDLNVPIKDGMITSDQRLQAALPTIKSALDSGAAVIVLSHLGRPEEGKYEKKFSLEPVADYLRENLEYPVRFVKDYLSGVGVNPGELVVCENVRFNPGEKANDEALAKKLASLCDVFVMDAFGTAHRAQASTYGVAQYAPVAVAGPLLIRELEALNQVLKAPKKPIVAIVGGAKVSSKLSLLKQLVGMVDVLIPGGGIANTFLKAQGFEIGISLYEPDLLDEARHILILAKEKGCQIPLPTDVVVGKTFSETCPAFNKSLSNVAADDMILDIGPETIRDYVDLIHDANTIIWNGPVGVFEFPQFAYGTRAIAIAIAESDAFSIAGGGDTLAAVDLYDLNQQISYISTGGGAFLECLEGKTLPAVAILQERAKHVKTN

SEQ ID NO: 61067 - protein, 496 aa, Legionella pneumophila
MSEEHVHLDESEVYHIRKQKLAELRTGGFNFPNTFRREHLADALLKQYSETEKQTLEQKHVKVSVAGRIVLRRIMGKASFFHIQDVSGRIQVYLRSNDLPDIYEQFKHWDLGDIVGVQGELFKTNTGELTINAEHVELLTKSLRPLPDKFHGLADQELKYRKRYVDLIANEDSRKTFLIRSHLIKAFREFMDDNHFLEVETPMMHPIPGGALARPFVTHHNTLDMTMYLRIAPELYLKRLVVGGFERVYEINRNFRNEGISTRHNPEFTMLEFYQAYADYNDLMNFTEQLFHYLCDKVLATRQIEYQGQVIDFNKPFERLSVKEAILKYHPDIKAQQLETVEGCRTLLNDLGLPYKETDGLGKLQIILFEETVEHQLFQPTFITEYPTEISPLARRSDTNPEVTDRFEFFIAGREIANGFSELNDAEDQAERFRKQVEEKDAGDLEAMHFDSDYIEALEYGLPPTAGEGIGIDRLVMLFTNSQSIRDVILFPHLRQ

SEQ ID NO: 61068 - protein, 368 aa, Legionella pneumophila
MKKKLALVMRLLAVILIPVLMSCNSESNKPVVHTLAEVDVALPVKKNIVEWDEYTGRFQAVEEVDVRARVTGYLEAIKFQDGQMVKKGDVLFVIDQRPFKYALARAEAQYALAKAQYERAIKLQKEKFISAEVIDQRFQDVQVAETRVQEAKLNLEFTEVKSPISGKISRDFVSAGNLIRMNDTVLTKVVSVDPIYFYFETSQNDLLKYIRLDRAGKRLSSEKKPTPVLIKLPDEKDYLHQGTVDFLDNVIDSGTGTILARALVPNPDNVIYPGLFARVKLVGSGEYEAILLPDKAINTDQARKFVYVVDNENKVKRVYVELGPLRESGFYIIRSGLKGDEKVIIHGIQRIHGPNQEVKPVVIEVTEN

SEQ ID NO: 61069 - protein, 223 aa, Legionella pneumophila
MLALKNKPPKNEKELLEQCQRIEGLSFAQLALELGLFTPVNPVHRKGWVGQALELALGADAKNESLPDFKQLGIELKTIPINKSGKPAESTFIVSIPLLTIHQQSWESSQCYAKLKKVLWIPIEGDTDIPFPHRRIGCGFLWSPNKDQESVLAEDWNYLTNQIVLGQLETLNSFSGEYLQVRPKAANGKSLCYGYDPEGNRIRTLPRGFYLRACFTSVILSQS

SEQ ID NO: 61070 - protein, 342 aa, Legionella pneumophila
MQNEYSQFEQRKRDHIELALMPANQSSELNPFDHFSLVHEALPDLDFKDISIQSIRFKKPVEKPFIISSMTAGHSNALEINYRLMEACSKTKWAMGVGSQRRELTDKQAAFEWTPLRRDFPMVSLFSNLGIAQLIDTPISAIQRLIDTLQAEALIIHCNPLQECIQPEGTTNFQGCWTALEALVKKIASPVIIKETGCGFSKNTLLRLNNIGVAAVEISGVGGTHWGRIEGHRANKDPIRQRTADTFRNWGIDTLQSTRNAISLNPSFEIWGSGGVRNGLDAAKLFALGATTVGFAKPMLEAALGSTGQVLTQMNTIEYELKTAMFCTGSRVLDDLKEKACP

SEQ ID NO: 61071 - protein, 377 aa, Legionella pneumophila
MMIATLMESAQETRVAITPNSAKQYIKLGYDVGIEKNAGLSSDFANEEFEKAGAIIFDSKSTLLKKTQILLCVNEPDPKNLNGLPPDSLIIGHIDNNPLSPLVKWCLDQKMTLFSMNLIPRISRAQSMDSLSSQANLAGYRAVLEAAATFHRAIPMMMTAAGMIQPAKALILGAGVAGLQAIATAKRLGAVVYAFDVRKAAKEQVESLGAEFIEVMQEQDSETAGGYATETSEEYKKLQAELIDQYAKTADIVISTALIPGRQAPVLLYKKTVEQMKPGSVIVDLATSRGGNCELSVADKIIKHGEITIVGLSNMAGLVPATASDLYSNNLVHLINILAKNPAELNLNPDDEIIQQAVLCHKGTYLPFQGVKEKQNA

SEQ ID NO: 61072 - protein, 452 aa, Legionella pneumophila
MKLSFLGATGTVTGSKYLVESNNKKILVDCGLFQGLKELRLRNWSPLPVSPKSIDAVVLTHAHIDHSGYLPLLVKQGFKGRIYATAATTDLCSILLPDSGFLHEEDARRANKYGYSKHHPALPLYTQEDANNTLKYFESVEYDTPYPLMDDCEISWHRAGHILGSAFIQFQTKQIKLLFSGDIGRLNDPVMKPSELMKSTDYLVIESTYGNRLHDKTDPLAFIANIVNTTCKRGGTVLIPAFAVGRAQTMLYYLYILKQKKLIPDVPVYLDSPMAIDATELLLKHHNEHRLSAEECRAVCQIATYVHAPNESMAVDWERESKIIISASGMMTGGRVLHHLKVYAPDPASTILLTGFQAAGTRGEKMLNHEPSVKIHGDDYPVRAQVATLTNASAHADYEEILIWLKHFEKAPKEVFITHGEPQAALGLKGHIETELGWNCKIPDYLQKVNLD

SEQ ID NO: 61073 - protein, 342 aa, Legionella pneumophila
MDNAIIKWGILGTSFISEVMANAIQESKTSELVAIGSRTSKIAKRFSEKFAIPKFYDNYQSLILDSDIDVVYIGLPNHLHKEWIIRCAQAGKNILCEKPFVVGIEEIHEVISVIERTNVFCMEALMYRYHPFIKKLQEIIQSNTIGKIKLYNATYTANIAEIANPVAGGSIRNLGCYPISLVRLLANAEPIEIRGIGRMNSRNNTDSQASVLLKFEDDSIAAVSTADDIEMHWQFEVYGTKGHLKVETNPWLPGSEGNKIYISLNTQSTPREISVKAEKSLYTYQIDFINEQVLKGDSRQFSKTSLLDSMGNTIVLETWLKQILSSKPSLELSRLKDRLPHA

SEQ ID NO: 61074 - protein, 252 aa, Legionella pneumophila
MCGICGCSVEKGQTMDNGHHAAHHEHSVPHEHSVDIEQNILAQNNEFAAHNRDYFLRHKILALNLMSSPGSGKTTLLSKTISELGKEMDIAVIVGDQQTNCDAQMLKSHGGDAWQINTGKVCHLDAHMISHAIQDISLKKQSLLFIENVGNLVCPASFHLGEQFRIVVLSVTEGENKPLKYPDMFHSADLLLITKADLLPHVNFDLDLCKEYVRRTNPSIDIITLSAVNGVGLKDWHDWLLHSFRLNVQSSS

SEQ ID NO: 61075 - protein, 167 aa, Legionella pneumophila
MSANSAKILSQLMPANRMLDIDHWISKYPKDQKQSAVMSALRIVQEEHGHLTTELMNAVAEYLDMPPIAVYEVASFYTMYEHKPVGRHLINVCTNISCMLRDSAGVVEHLEKKLGVNLGGTTEDGRFTLRSVECLGACVNAPMMQVDKDYHENLTAESIDKVLEQYQ

SEQ ID NO: 61076 - protein, 279 aa, Legionella pneumophila
MTRRSNQLNSNKDLAIGVFDSGMGGLTVLRALRDKLPHESFVYLGDTARLPYGTKSPDTVKQYAMQMAKILVERRIKALVIACNTATTAALPHLQSMLTDIPVLGVVAPGAAAAVSATKNHRIAVLATETTIASRAYHDLIIKNLPEAVVSSRACSVLVALAEEGMVTNAVAREALKHYLDDFSDEDAVLLGCTHFPVFKPLLSSLLPKDVAIVDSAQATAISLYELLQNQNLHNDNLEAPPRINYLVTDSINRFQKVGEIFLGEQLSLSDIELIDAMG

SEQ ID NO: 61077 - protein, 394 aa, Legionella pneumophila
MHLKRTLSLTLLAFYGLGTILGAGIYALVGEVAKEAAQFTPLSFLIASIIALFTAISYAELSSRLPLSAGSALYVRRAFHQKWLSGLIGWIVVLTGVISAATLSHGFVKYFQLFLPLPPSLIITILTVILAGVAVWGIRESATLILYMTLMEVGGLLMIIYYGRYSFASIDIQSFSLPHSFDGVLIGAFIAFYAFIGFEDMVNTAEETINPEKTLPKAIFLALISATILYVAVAWVIVSTIPSNALVKTDMPLIEIIKLQGQSPLLFSIIALISITNGILVQIIMASRLIYGMANQQNAPQIFSFVYSKTQTPVNSTLLVSLIILLFAYALPITTLAKLTSSIILCIFIIIHASLIKIKLTKKKPTNAISFPIVFPMISILLTLAFLIIQFFLK

SEQ ID NO: 61078 - protein, 162 aa, Legionella pneumophila
MQVMAELKAASDRMEIVAQSPYVLVDYAHTPDALENVLITVNQIKKGRLWVVFGCGGDRDKAKRPIMGKAASMYADNIVITSDNPRSEDPEIILNEIACGIPASAPVSKLVNREEAIAYALRKAEHNDIILIAGKGHESYQQIGNTKHVFSDQEVVRRLMNN

SEQ ID NO: 61079 - protein, 336 aa, Legionella pneumophila
MKYRKLGKVGPDVSALGFGCMGLSEFYGKPARLDDAIKIIRNAHDQYQVNFFDTADIYGKGKNEELVGKAIKPFRNQIILATKCGVVRTGSNDEMSVNNSSAYIRTACEKSLKRLNTDHIDLYYLHRYDHQTPIEEVMEIMHDLIDEGKIGYIGLSETDADTIRAAYTAVKDKLVAVQTEYSLRVRAPATAVLGTCRELGICFVAYCPIARGFLSGKIKKPNLLRTNGFDFRTNIPQFQPENFDQNLGLVNELETIGEKTGYTPAQLSLAWLLAQGEDIIPIPGTSNPQHLAENMRSIDIFLTPEQMKDLENAYKNNPVAGKRLSKELMATFHLKE

SEQ ID NO: 61080 - protein, 460 aa, Legionella pneumophila
MIARNRNTRNLVFFSTNFTMNRLQFVNSLKQINQDSMVFVACGLNHKTAPIHVREKVALQPAMQDSLLSSLLDLPEVNEAAILSTCNRTEIYCDTNTPEVLGNWLAHEHQLSEELLSQFLYIHQGKEGIKHTLRVASGLDSMMIGEPQILGQMKQAYQHACRLGTVKTQLRPVFEYIFRASKRIRTRSGIGANPVSIAYAAVQLIGQLFKNYHSLSVFLIGSGETASLVAKYLHQHGVHRFLIASRTLENAQKLAETFGGKTLSIGDIPQYLPLADVVISATACPLPFINKSLVEHALEQRNHAPMFLLDLAVPRDIEGNVNELEQVHLYNVDDLQSMIEKGMDERRNAALQAEQLIESELDNYIRWHRSLRAKDVICDYRNQMHTLAQQELQRALKKISAGQNQQDVLNEFSMRLVNKLTHNPTIGLRQIAWDNREDLLDLARYLFDTTANQSLYEEIS

SEQ ID NO: 61081 - protein, 855 aa, Legionella pneumophila
MKINLDLNDLSTYDQNLLLNELNSSLEGLNNFQAQKRLTQYGTNEILRKPYHLIILEAISHSINPLVAILFFAALISAFTGNVVNAAIIISIIIISIGLDYFQSHRALVAIKMLQKKIATTVTVLRENQWLEIPAKELVPGDLFRLSAGDMVPADSILLKSKDLHIHQAALTGESMPVEKEAIPLKTKPKNPLDALNIVFSGSSVIGGSATALAINTGSNSLFGHIAESLKKKPPHTEFEQGMMRFSTFIMKMVFLLVIFVFSINIYMHRPLLDSLLFAVALAVGLTPELLPMITTVTLASGAVRMSKKKVIIKNLSAVQNFGSIDILCSDKTGTLTSGEMNLTKYLDFSGKQSEFVMLLAYLNSLYITEIKSPFNIAVLKKARLNPLDLAILKHDHPDIQPYHKVDEIPFDFERRRSSVIVSKNENHLFICKGAPENIMSVCSYYDFAGERELFTEKEQKQCELLFQSLSSEGYRVLAIAYKLMDRQLKYTQSDEKEMIFAGFLAFTDPLLEDIPKVIKDLRQEGINIKILSGDNLIVTQHICQTVGMDTSRILTGEEISKISDDALPSLAEGIDIYARINPMQKQRIISALKKRGHVVGYLGDGINDVPSLHHADVGISVASAVDIAREAADIVLLEHHLKVLLNGIIEGRKSFRNVMKYLMMGTSSNFGNMISMAVAVLFLPFLPMLPRQILLNNLLYDISQITIPTDHVDPSSIHQYKRLDINIIRQFMFYVGPISSVFDFLTFFVMLKIFSANEALFQTGWFVESLATQTLVIFIIRTAKKPWQSMPSLPLTATVLLIVMVGIWLPFSPFSGLFGFVPLPPLYFLFLVTATFTYLFLVELIKKKIMRKLY

SEQ ID NO: 61082 - protein, 456 aa, Legionella pneumophila
MTLTALNAISPIDGRYVNKTRALSPYFSEFALTYYRLMVEIKWFESLAANDTIPEVPALDNKARKFLSDLISNFNESEAEKIKEFEKQTNHDVKAVEYYLQDKFQENEQLKSCVAFIHFACTSEDINNLAYALMIKQAIAQVIQPTIAEIMGSITLLGKQHADVAMLSRTHGQPATPTTMGKELVNFVARLKRPQQQLAEVLIPAKFNGAVGNYNAHVAAYPEVDWRKHCANFVTSLGLSFNAYTTQIEPHDGIAEVSQIMVRINNILLDYTQDIWSYISLGYFKQKTIAEEVGSSTMPHKVNPIDFENAEGNLGLSNALFIHFANKLTQSRMQRDLSDSTVLRNLGVAFSYSLIAYHSVAKGNDKLQINKSALQKDLSENWEVLAEAIQTVMRRYNEPNAYEQLKELTRGQMIDAENLKKFIKTLSIPEEAKAELMKLTPETYTGLATQLVKAFS

SEQ ID NO: 61083 - protein, 222 aa, Legionella pneumophila
GIPLGAELFFMYTTMLIAVPTGIKVFNWVSTMFKGAMTFETPMLFAIAFVFLFTIGGFTGLMLALVPADFQYQDSYFVVAHFHYVLVPGVIFALVAATYYWLPKWTGHMYNERLGKWHFWLSVISVNLTFFPMHFLGLAGMPRRIPDYALQFANFNMIVTVAAFAFGLSQLLFLYNVVATVRKRGTNKDVATSRVWEGSHGLEWTLPSPPPYHTFTTPPEIK

SEQ ID NO: 61084 - protein, 333 aa, Legionella pneumophila
MIVRNPTWNSLTPPLPKFVSCDTVETNFLKEKLGEDGGIYTAQFDLKSTYAFLFQRKNDQKKFFIKKVSAEHKRQYQQSEDLAQFIACPDYIVNIAINCISNEEENSLYYVYPYIHGKRLFAEPEQIITLATALAKLHLKKKSYPDQQLIIKNTTERTSQLNFIRKALADGCYSYIPHFSFVKKMAQQYDFDWINQEDAQPIHGDLNAGNLLLSEDNMICFFDFEDALHSFHPVVLDLLFVIERIIFNQNSSTEQLLNLGLMFIHAYKEAGGTYQYKTRDEFGLTILALKAFCLLTLLAEKNKNILNSEWDKFFKLTQKAGNERDLIKTILQG

SEQ ID NO: 61085 - protein, 741 aa, Legionella pneumophila
MAESKLEIVNKTEREESVILDGNGILRCYNMFPTQFGSIEEMIDYLPQLQAMGFNAVWINPVQTAGDVQGLFKRDKTIGVRAYNEVTRSLYAMTDCDLISPYFNPLPPNVDPKLKKQLDMEAMQKFTSEARNNGLVPMFDLVLNHVAADSRHRKEHPEWFQKDVHPDFKDAIAFDYSDPQIRDEIIEQFWKPYIYKYMIDYGFEGVRIDAVGYLNPELRKQIYAYIYDLAEQFNKPKPVILDELLFSGSQKLTDVVDGLLLPEKGPTHITRGTYYAQRDGYGGLPGWCKEEEGVKAQVVFLDKQKKLHPHAKGGCIAFSGNHDHNSLAMTILEEMAEHRLANHHTLHGAQEKFKHERSYDYDEALESVLRYSFVKDIQNEILSGNESTIKEVETRMREKIAFCALTSSGGWYALSGDETGDLLAKPVFRRVHALDQTYYAQRTHIIFDKKYPDNKVAMEVLTEMAIENIQKEKAGSIYNSLQHDKQSQERLLVPYLETLQNQINCGDTVVCKAFQEKLAQKNITIGFTDENYSPDPRTPQNGWNGQHDMRKFMFEINSILSSLPSSNMGFWSEVIPIQSKPGLLAVVRKNGLGLSSDTDIAIVNMDPSQKVELTRDDIHQLACNFQKRVIPEYTYYNDGKDKQYNWHTNNPDFNMAYHTVMSCIEAKRIHVDDSIKTNFPVHSANPYGMFSKKQSSKMNIAKIAKMSGEDTTLIEKGTNDTEGIIHDDEQIQPTITVENKK

SEQ ID NO: 61086 - protein, 313 aa, Legionella pneumophila
MYKIHHYFLFGVLVPFISLVSLFTIFSSDFLTLTTWASILASASDIGIIVLGVTLLLIGGEFDLSVGANFALSGLLFGSLTLLGINSFLALTIALAIGACIGLINAACTVFFKIPSFIVTLGSMLILRSLILLYTQGLPVSVEDTNGVMQVLAGELSQNLLSSFIWWFAIGFYLIYLLNWTKLGNHIVATGNNCDSAYLSGINTIRVKFFCFVCCGIIAAFSGVTQFSHLNSLSPIAGEQYELYAIAATVIGGTSLKGGQGSIISTLLATLLLSTVDTGIVQIGVSTYWYRSFIGLILIFAMTINVYLRKSDS

SEQ ID NO: 61087 - protein, 437 aa, Legionella pneumophila
MNSIPHLILGDIITPTQAGQSLLIKKGYVLINGDSIIEVGEQAHFNKEISYTVSNYPDHLILPGLIDTHSHLSQYAICGAGDLPLMDWLNTLVFPAETAFSSNLQRCQRHAELYMHACLGSGTTTINTMVTSSRQATEIVCDVAARLGIRAFIGLVLMDRNAPDNLLVDCAQAFKDLTVLKDRYHGKNNIHITVSPRFAVTCSAAMLRQAGEFARANKLILHTHLDKDEGFDELIQSLFSTAHDYFDVFESTQCIADKTVFAHGTLLSLHEMKRMGDYAKQVGISHCPSSNFSFAMGMAPVSFFKGLGIEVGLGSDSGGGDSLSLFDEMRSASFTNKALWRLDKKTALIDAKTWLYHATLGGAKLLGLEKQIGSIEAGKKADLIILDDRNNYPLAELSSLSQELALDELQYRLARVIARSCENKLVAVYIDGKKVYQ

SEQ ID NO: 61088 - protein, 337 aa, Legionella pneumophila
MNKQDFYFDLPSELIAQYPLANRSDSRLLIYNRQTEEYGHYQFREIADFLQPGDLLVMNDSKVIPARLYGHKATGGKVELLVERITGDFTFLAHIKASKSLKSNDLIYLDAGKRLEVLQRQDDLFLCKACENILDLLNDLGHIPLPPYIAREDESLDKERYQTVYAKCAGSVAAPTAGLHFDDAVLSSIRARGVNIAYVTLHVGAGTFRPVRCERIQDHKMHSEWFTVSPDLCTAVKAAKSMGNRVIAVGTTALRSLESAAMGGELIPCSRDTDIFIYPGYQFKVCDGLITNFHLPESTLVMLVSAFIGHQECMALYQEAIDKRYRFFSYGDASLLL

SEQ ID NO: 61089 - protein, 131 aa, Legionella pneumophila
MSMHDPIADMLTRIRNGQQAKHQQVTLVSSKLKEEIARVLKEEGYIQDFFIETLPNGLKSITLKLKYYHGRPVIEFIKRISRPGLRVYKSYKDLHSIPGFGVAILSTSKGIMTHVSAKVKGVGGEVICEVA

SEQ ID NO: 61090 - protein, 39 aa, Legionella pneumophila
MFELMESSQQENNAVIKVVGVGGGGGNAVEHMVAENIDG

SEQ ID NO: 61091 - protein, 437 aa, Legionella pneumophila
MKILFLLLLIFLSVIPAQAKPVELVFWHAMAGHLGDEVRLLADDFNKSQNQYRVKPIYKGNYTETLTNFAAAFRARQAPSIVQIFEVGTSIMLAPPGVIKPVDLLMSEQGISLPKDDFIQSVREFYSRDGQLMAMPFNLSAPVLYYNADILAKVGYGKHNFPQTWSAMEIMAEKIKKAGYDCTYTTAYPGWVLFESFLAIHGLPITQGNPARAVFHTPQLMAHFQRLKRWHDLHYFRYGGRVDDATILFTSSVCPLFSQSSGAYNSLSALVPFHLGVATMPLDTGASPIRHANVAGGAALWAVGGQTEEQYRGIARFFAFIAKPEVQKRWHEHTGYLPLGLKGIYASIVQSSQHPALLLARTDLEDNLPEKPYKHMGPQNQIRGINDEVLEAMFADLMSPEEALNEATIRANHLLLRFARNTQRERVVDDKVGKGLG

SEQ ID NO: 61092 - protein, 153 aa, Legionella pneumophila
MLRVSKLADYGTVVMVYLAKHSQELCNARDIALHTHLTVPTVSKILKRLTSAGLLTSVRGVSGGYRLQRPAAEISVSQIIFALEEHRGFTECSMQPNDCFLQGVCTIQGNWRLISHAIETALDSVSLEALAKPTLPTRDVERVRQLASGVNRG

SEQ ID NO: 61093 - protein, 103 aa, Legionella pneumophila
MYAVIKTGGKQYTVKEGDVLKIEMLPENVGNEIKFSEVLMLVDGDKVTCGTPFVAKATVKAEVLDHGRHKKVKIIKFRRRKHHMKQMGHRQYYSQVKITAIGK

SEQ ID NO: 61094 - protein, 310 aa, Legionella pneumophila
YRPANPALWQGRKDTANQERFFQKITFIDNQNELMTKDKKTIFLGFASDTGIKRNLGRTGAKLGPDQIKTQLAKLPCHNNKHYVDLGNVVCENDELELSQSQFAQIVHFCHENGHQICAFGGGHEIAWAHYQGLSSLYPKLGVINFDAHFDLRPYKKGEFGNSGTPFSQIATYCEEKKMPFHYCCIGVQKFGNTPSLFEKAKKLNVSYLSAEDLYEQSQAWQIAFLDDFILNLDHIYLTICLDVLAECYAPGVSAPQALGLSPWQIMPLLKYLIQSGKVVSLDIAELSPPLDSELKTARLAALIIAELLD

SEQ ID NO: 61095 - protein, 665 aa, Legionella pneumophila
MLNSQQMAAVKYIDGPLLVLAGAGSGKTRVITQKIGYLINSCGYNANSICAVTFTNKAANEMRARVSAFLPAVSRRGLKVATFHTLGLSIIKRDVSRCDLKPGFSIFDSEDCLQILRGFLPVNKATDRDFILKVQQQISLWKNNLLNPELILQNPPETLLCDEALTIYPRYQEALKVYNAVDFDDLIRLPVDLLNDHADVLEYWQNKIRHLLVDEYQDSNTSQYLLVKKLAGVRAHFTVVGDDDQSIYAWRGAKPENLAQLQKDFPRLKIIKLEQNYRSTSRILHAANHLIAHNQHLFEKKLWSDLGHGELLRVVSCKDEQDEAEHVIADLISHKLRNRTNYSDYAILYRGNHQARIFEKVLRHHGIPYHISGGQSWFAKLEVRDIFAYLKLLCNEADDAAFLRAITTPKRGIGESSLDALGRYAQSRGISLYHGSDHLALSEFVADKQRMIFHDFKLWMEDIKKRISSDSVLEHLRQMVEDIGYEAYIYEQCDSPAKAQKKMDNVWELLEWVNRLLNKEPEQSLMDVVNKLILIDILEQSDESSSDVVQLMTLHASKGLEFPFVYLVGMEEELLPHRVSIDDDQIEEERRLAYVGITRAQKGLCFTLAKQRRRAGELQDCVPSRFLDELPQESLEWFGKGGERCEEQSKKLAKSHLEGLKNLLS

SEQ ID NO: 61096 - protein, 126 aa, Legionella pneumophila
MNLMLGIRASHYGLMLLATLLGLSISVRQMYIHLTPGDPGYGGLIFGLHLYTWSAIIFLVIILLIAGALILDKGFMPDYKVRSKSAKVMIWVFFILILANGISTFLECGPHECPDNPSKYYLLNNN

SEQ ID NO: 61097 - protein, 963 aa, Legionella pneumophila
MWCFFLPLFLLFFSFSLFSASVKENNATLVEYLAHEKTHLTIAINEIKQKSAPKDEQEYNEKLRQIRTILSMNKAKIESLNSFSENQKKEEVNLNDQLKRLQQMPLANAEVTIQEKVGKIETLLTVNKKTTELIAETLDLAKQYQLLLNDVLNELKLWKANFDLKEKLKSIKAIRAKLNKELNILYENAVSSQDKKQPELTISEQIQYEANLYINNQRIAVIHQKLNALELQKKIIKTNILLLNNLDTKALQSAIDNYREVINQYSAIESSLQTILNSLTNQANLFVEPGLQKSVSLLQNDVKTELKETSNQKLILSKNLEDYQNQLKKQISTRQSLSEYNIDSWAVILNKLIDIPNLFYKYIKTLTIKVYDSYTWLDTFPAIFLWTVLIFILSLFYILNHVLKTLARDKERSRFTGYLYGGILVLLQRNIPHLCFFAMLSFILYFTSISYANSQLLIKLIIVWLTFRVLILIARLILLESISDSSGKDVKLYYRLKWLLLFGGWTTALMTFSHLLPLSILLQDIFNRLFMLFMLTVSLVAWKSKDVIPYLIRPLLKSKKRYFKNAISLLVILVPITLFTTAIIGLIGFVNLAWTMSRYQAYILLVLVGYILVRGLIFDALELFSEWMISSLKNGWLWIEVFLKPIDKILRIVLFLTSVLILFQLFGWYSDSLVVTSLEKVVQYSILNITGIHITVASIIEFLILLAVLVWAAKWTREFCFRWLYKNTKDVGIRHSLSVFTQYAIILLGTFITLHVLGLDFSGMSMILGGLAVGMGFGLRDFASNIVGGIMLLIERPVREGDLITIGEYEGQVAHIGIRSMRVSSWDNTQVLIPNAETFNKPFTNWTHQDGIIRTVIPIKVSRADDPVMIQQLILDVLAIIPEIVPDPPAQVFLKKIDTALIEFEARYFINIQNHNRVEVRSKVLFAITAQFKAAGIQPPIEPITVELKESSSVSLKKQTTEE

SEQ ID NO: 61098 - protein, 543 aa, Legionella pneumophila
QSEEFDAIKIALASPELIRSWSYGEVKKPETINYRTFKPERDGLFCAKTFGPVKDYECLCGKYKRLKHRGVICEKCGVELALAKVRRERMGHIELASPVAHIWFLKSLPSRIGLLLDMTLRDIERVLYFEAFVVVDPGMTELERGQLLNDEAYLDAMEQYGDEFDARMGAEAIRDLLRQIDLEDEIRNLREELPTTNSETKIKKITKRLKLLEAFYESGNKPEWMIMDVLPVLPPDLRPLVPLDGGRFATSDLNDLYRRVINRNNRLKRLLDLNAPDIIVRNEKRMLQESVDALLDNGRRGRAITGTNKRPLKSLADMIKGKQGRFRQNLLGKRVDYSGRSVIVVGPTLKLHQCGLPKKMALELFKPFIFSKLEFRGLATTIKAAKKMVEREESVVWDILDDVIREHPILLTRAPTLHRLGIQAFEPVLIEGKAIQLHPLVCTAYNADFDGDQMAVHVPLTLEAQLEARSLMMSTNNILSPASGEPIIVPSQDVVLGLYYLTREKVNALGEGKIYSSAQEAQNFYEAGHLDIHAKIKIRMPKE

SEQ ID NO: 61099 - protein, 278 aa, Legionella pneumophila
MSIAFVNGKYCCQSEAKISIFDRGFLFGDSVYEVLPVYHGQPYFVDQHLDRLFSNMKKIKMIIPNYDWHGLIHRLISENNGGNLQVYIQVTRGNQGVRKHDIPTSITPSVIAFTMHNPFPTLEDKEQGMSAKLVEDFRWMRCDIKTTSLIANILLNDEAVSAGFHTAILARNGLITEGSSTNVFIVAQDGVIKTPPMNNFCLPGITRQVVIEIIKKLDLKFREIEISISELFSAQEVWITSTTKEVFPITKINDSLINGGKVGEYWRIINDSYQQLVN

SEQ ID NO: 61100 - protein, 551 aa, Legionella pneumophila
MTEQTEKRAHFIRQLIIDDLANGKHQGIVTRFPPEPNGYLHVGHAKSICLNFGLAEEFKGKCFLRFDDTNPIKEEEEYVNAIIDDVRWLGFEWCAMTHSSDYYHELYELAIYLIKKDMAYVDSLSMEEIRAFRGTLQEPGRESPYRNRTIEENLDLFARMKAGEFPDGTHVLRAKIDMKSGNLNMRDPVLYRIRHARHQRTGDEWCIYPMYDYAHPISDALEKITHSLCTLEFQDHRPLYDWLVDNLPLPAKPVQTEFARLNLSHTVTSKRKLRELVEKKIVTGWDDPRLPTLRGMRKRGYPPAAIRQFCEIIGISRSDSVIDMSLLEECVRAEFNKTAKRALCVMDPLKVVIVNYPENKVEQLQAAFYPQNPESASRNLPFSREIYIEKSDFMENPPNKYFRLSPGAEVRLRHAYVIKCQEVIRNDQGEITELHCTYDENTLGKNPEDRKVKGVIHWVSSSHAYPVTIYQYDRLFTDPNPAREEDYFQFLNHNSLQTLQGFCEPAMAEQAEGDVFQFERLGYYCVNSVAEGCVQAFHRVVDLKDTWGKVS

SEQ ID NO: 61101 - protein, 417 aa, Legionella pneumophila
MNTNIANQLRAAKKATTDLNLIQSDTRTIILKTLAANLEKHIENIIQENQKDLSLMLEQDPRYDRLLLNKERILSLVNDVRKVANLPNPLGVNLFEKSMPNGLSIKKITVPLGVIAVIYESRPNVTIDIFSLCFKSGNVCILKGGKEAHFTNSYLLLLIKNTLKNFNINTDIVCLLPPERALMTQLLNATGLVDLCIPRGSQNLINFVRDNAKIPVIETGAGIVHTYFDKSGDLGKGKKIINNAKTRRVSVCNALDTLIIHADRLKDLPELVETLSQKNVIIYADQDAYHVLDKNYPEQLLIKAKPQDFGHEFLDYKLAIKTVPNIKAAIDHIQQFSSHHSEAVIAEDESAIDKFLTEVDAAAVYANASTAFTDGGEFGLGAEIGISTQKVHARGPMGLEALTSYKWVIRGTGQIRD

SEQ ID NO: 61102 - protein, 789 aa, Legionella pneumophila
MAEVMLASAAIIADELKVKVSQVETAIRLLDEGATVPFIARYRKEATGGLDDVQLRFLAERLIYLRELDERRTVILQSIREQEKLTPELEQSILAAETKTRLEDLYLPYRPKRRTKAQIAIEAGLEPLAHALWKDPALDPEEQASQFINSEAGIENTQAALDGARHILMEHFAEDAELINELREYLWQHGIVKSVGNSTKKDQANKFSDYFDYSEAIKKIPSHRALALFRGRREGILQVSLVLPDQDANYGENKVAAYFNVTDRQRKADGWLIDTVRMTWKIKLFTKLELELLTRLREIADEEAIKVFSKNLRDLLLAAPAGPQVTIGLDPGIRTGVKVVVVDATGKLLDYSVIFPFAPQNEWHQSIADLAKLAAKYQVNLISIGNGTGSRETERLVADLIKMYPDLKLTKIIVSEAGASVYSASEIAANEFPDLDVSLRGAVSIARRLQDPLAELVKIEAKSIGVGQYQHDVNQAKLARCLDGVVEDCVNAVGVDINTASAALLSHISGLNDTLAKNIVQFRDEHGAFTNRNQLKNIHRMGEKAFQQAAGFLRIMNGDNALDASCVHPEAYPLVEKIISDKKVSIKEIIGNRELLQSINAEQYVDENFGLPTIRDVLRELEKPGRDPRPEFRTAQFQEGVEDIKDLEQGMVLEGVVSNVTNFGAFVDIGVHQDGLVHISAMTNRFITDPRSVVKAGDIVKVKVVEVDKERRRIGLSMKLNDEQAPAVLQKANKPQPARKQAEQKQPEFKKKQEHKKKPDKIKKSEPVKKTVFNTAMADALAKLKRGGE

SEQ ID NO: 61103 - protein, 420 aa, Legionella pneumophila
MKINNLVGFLLAFCLTSLSYNISAAESPVVSHPKIQKEMSKYFKVYHNKEKFTAIAVSVFIPQEKNKDALDVATFVKGTMGYPPLSQEITPLNLFDIGSITKSFTSLILLQLQTEGKLSLDDPLGKWLPQYKEWKDVKLRQLLNMTSGIPNYSEDPEFAKKMEDNFAAIWGDEELLGYAHPEKPIETDRANRYEYSNSNYILAGMVIEKVTQDTFENQLKQRIINTNNGLNNSFYPAGPHGPEVEKSIRDRRVHGYFYDENNKKLIDTISNDLSWAGTAGAVIANTEDVGRWVQLLYHGLLIEPAFRDEALSELESVVSIKTGLPIPSVTEDEPYGFGLGVGFYYDKNSRQRFWTYQGSTLGYRVMYLWNPCNNVTVVVALNGKGGSGNEKSKIGNHIHELCLNIHKVIVKNHPHLQCAS

SEQ ID NO: 61104 - protein, 401 aa, Legionella pneumophila
MSSTVSSSKVGFSFSDLPVTCKLLLALSFIEAIGGGLSYHIAYFFSVSTNFNKLNIGFLGFSMGIGAILGSICGGYVTGKAQAKGIIGASFLLMGVAFVILAKVSSFHLSVVFVLLMGFGINLFITCSNSSFLQISKNTNHSLTIAQSYKNALENTGGIVAMVLIMLLAQNHFKLAMTLVGVTLILFSIVIFLKLEISNQDVAAKPSNKEEIESVYSSLIPMLFSVFCIGLTYGIQKTVLGIHLNETIGNSLIIGFFFATDPILIALFQVKLSKRIERFNKHIVACIGCILLGVSTFAMGLSSTIQGMFCSLLVFTLGEMLFMAYSVALCHQYGSSNHSGLGIGAWRSAYALGMMIGPLISGVAMYYFNAQSAWTISSLLCFMSAFLVFNSKRAQRLEAVY

SEQ ID NO: 61105 - protein, 577 aa, Legionella pneumophila
MSGLIPQPFIDDLLNRTDLVELIDGYVPLKKRGNSHIACCPFHNEKTPSFNVVAKKQFYHCFGCGASGNAISFVMNYLNQGFTDAVETLATRLGLSVPRDGTGEKHKSSLNLYNLMSEVSQYYQKKLKYNGQVAIDYLRNRGLSGEIAKRYHLGYAPEGWHNLEKAFPNNQRELLSTGMLIKSDEGKIYDRYRNRIMFPIHDRNGRVIGFGGRVLDKDQKPKYLNSPETVLFQKSRELYGLHQVLSQQKNPDSIIVVEGYMDVIALAQHGIFNVVATLGTATSTFHIQLLAKHTKHLIFCFDGDAAGKQAAWRALESSLPHLNAGLDAGFIFLPNEHDPDSLVRNEGKNGFLELLQQATPLHRFFFDTLSKDINLSNPAGKTQLINAVKPYLQKMVEGSYKQLLIDDLSRLTHIESHRLTNLITDKSESKPEVQAAISRSPLRIAIALLLQNPEIYSIAIQQINPALLHEQEHHILLKLLQQLKDKPNANTATLIEFWRNSSYFELIVKLAAWDHQVPEQELTKEFIDVLLFLQKQNREILIRQYIEKSRKTGLTEAERLSLQNLLKERHGQAEIEK

SEQ ID NO: 61106 - protein, 526 aa, Legionella pneumophila
  MISC_FEATURE (420)..(420): X=any amino acid
LLLPTHELYRDDEEILAHYRERFQAILVDEFQDTNTIQYAWIRLLAGDHTAVLAVGDDDQSIYGWRGAKVENIQQFVHDFKDTHIIRLEQNYRSTAMILNAANALILNNSTRMGKELWTAGSEGEKILVYSAFNELDEARFVTERIGMELNQGASADEIAVLYRSNAQSRVLEEALLRAGIAYRIYGGVRFFDRAEIKDTLAYLRLLVNPNDDTAFERVVNFPTRGIGEKTLDEVRQYARAEQCSLWGASKGILQSTGLGQRGSLALAKFIDLIEKLQVVVANKELDEQISDVIQHSGLYAHFSKIKGDKSESRVDNLQELINAAKQFRYEYDEEEELPLVNSFLAHASLESGELQADEHERSVHLMTLHAAKGLEFPIVFLVGMEEGIFPGRQSLEEPGRLEEERLLCYVGMTRAMRKXGLSYAEVIRQYGREEYHRSSRFLREIPQQFLDEVRVKSRSQWPGTTKSKLPVADEVSGITIGQNVQHAKFGQGVVLAIEGSGAHTRVQVKFSEHGVKWLVLAYANL

SEQ ID NO: 61107 - protein, 452 aa, Legionella pneumophila
MKTKHFDLIVLGGGSGGIASAVRAAQYGAKVAVIEQNHLGGTCVNLGCVPKKIMYNASSIAETLHKSPDYGFFLENNAKLDWKRLVNKRNAYIERLRENYEKRFSQHKITLIQGKGIFHDQSSITIDHTIYQAEHIIIATGSEPALPAINGIKHAIDSDGFFSLTKLPAKVAVIGSGYIGVELAGILNSLGSETHLLMRGTRPLSRFDHMIGDTLMEIMQKQGICIHQNHKAQAIHLHSDGRKSILCQSGSIIENIDVIISAVGRKPRTGNLNLDKINVNMDDKGLILVDAFQNTSVKGIYAIGDVTNAPALTPVAIAAGRRLADRIFGNQPDACLNYDNICSVVFSHPPSGSVGLTEHEAIEKYGKNKIKIYQTRFIPMYDALSIDKTPTAMKLVTLGKKEKIIGLHVVGYSADEMLQGFGVAIKMGACKKDFDNTIAIHPTSAEEFVTMV

SEQ ID NO: 61108 - protein, 576 aa, Legionella pneumophila
MVLRIHQLSPAIANQIAAGEVIERPASVVKELLENSLDAGASVIGVDVNYGGLLQITVSDNGSGIVGDDLPLAIAAHATSKIRTLDDLYSIDSMGFRGEALASIASVAKVTIISKPEEQDNAMMLRVEGENRTLSPCARNIGTTIDVSDLFYNAPVRKRFLKNEKLEFQAIEMVVKRFALSAPQIALTLKHNKKLIFSLPPALSEQAKAIRMGRILGNTFMREAIFLDVEHSGMRLYGWISNHRLQRSQNDRQWIYVNQRMVKDKLLQHAVKQAYDGLLHAGRFPICLLYFTLPASEVDVNVHPTKHEVRFQQPRLVHDFFTSQLTKALQSTLDHSETMEYAYAASSCNEQQNTVSEPSHICNDRESYEGARALSPSWSDNSLSSSITCKGYKKTSSVYHPETEFQWVILNERFILVLIKQQPYLVDIVTLFQEWIEKQLMQKALPLESRPLLISIRYPLPNQWIHKLDHLKHELTRVGIQIEYPNADDLLIRSIPLNAPYLDVRRFFNVLCELDFFDTEQLIALISRSQMFDPKQLTVEERIEMNQLLLELSLQEEKCNTCKALTIDDCRMLLHE

SEQ ID NO: 61109 - protein, 215 aa, Legionella pneumophila
MKEPLEKAQACVIWMHGLGADASDMMGLADQLTIEDTALRHVFLDAPRRPVTLNGGMVMPAWYDIYGLGFVDEEDKFGIEQSELLIRKVVDAQYNCGFKPHQIFLAGFSQGGAMALHTALHMTERLCGVIALSAYLPLAKHNKPQLDKNTPIFMGAGQFDPLVLPKWTLQSKDWLLANGYNEVSFHQYPMEHSICFEEIKDLSLWLNKQVQGVLQ

SEQ ID NO: 61110 - protein, 294 aa, Legionella pneumophila
MKKLASTLLCFSLLISASVFARDKYYLITHGSQDPYWTSLFQGAKKAAEELKVDLQILAPPGANDVPKQVQFIESALATYPSGIATTIPSDTAFSKSLQRANKLNIPVIAVDTRPKDKTKNPYLVFLGSDNLLAGKKLGEKALELTPSAKRALVLNPQPGHIGLEKRAYGIKTILQDKGIFFEELDVGTDPNQVQSRVKSYFKIHPETNIIFCLTSQALDPLGQMLLHPDRYDFNYQPQVYSFDKTPNTVSLIHKKLVNYVMDQQPFLMGYLSITQLVLMNRYQLNPVNINTAM

SEQ ID NO: 61111 - protein, 230 aa, Legionella pneumophila
MGEEGFLAHFAFSIGGLPITQSVLTTWFIMISLFIMAWSTTYKCSLLQPSTYQLIWEGVLSTMYDAIKEVLPEHVELIFPFVATLWIFILVSNLIGVIPGFYSPTADLSVTASLAIMTFLSVHWFGIRAEGWREYLKHYIKPTPFLLPFHLISEISRTLALAVRLFGNIMSLQLTALIVLMIAGFLVPIPILILHIIEAIIQAYIFGMLALIYIAGGIQAHELKSQGESL

SEQ ID NO: 61112 - protein, 156 aa, Legionella pneumophila
MLKITIITLGNKMPDWVNSGVNEYAKRFHDGIQIKLIEIPLLRRNKSSDLARILEKESALTKDALPANARLIALDMLGKSFSSEELALRLTQLQQISSHLCFIIGGPEGLSNEILTLCDERWSLSKLTLPHPLVRIILLESLYRAWSIINNHPYHK

SEQ ID NO: 61113 - protein, 82 aa, Legionella pneumophila
MSTVEERVRKIVVEQLGVKEEELKNDASFVDDLGADSLDTVELVMALEEEFETEIPDEKAEKITTIQEAIDYIESNLNKEEA

SEQ ID NO: 61114 - protein, 329 aa, Legionella pneumophila
MNKKTIAMLGAGSWGTAVAIHLAKIGHKTLLWSHNPQHVALMAEQHSNPAYLPGIPFPENLIPSDNLIECVQSADYVIIAVPSHAFAEIINKIPKPTQGLAWLTKGVDPASHELLSQLVASRFGVDFPIAVISGPSFAKEVARFLPTALTLASNNTNYQKKMHQLFHHDNIRVYLSDDLIGVQLCGAVKNILAIACGISDGLGYGANAKAALITRGLAEMTRLGLSMGARQDTFLGLAGVGDLVLTCTDDQSRNRRFGLLLGREVPIPEAEHQIGQVVEGKHNAAQICAIANKNKVEMPICEQINALLHGIVHAQEAVNNLMSRPAKEE

SEQ ID NO: 61115 - protein, 281 aa, Legionella pneumophila
MKEADTLQRFIFEHANIRGEIVHIEKTFQNIMNQRDYPPMVKNLLGEALVSCLLLASSIKFEGNLSLQFQGDERLSLLLVQCDHNLNIRGFAKCAEGLEIADYATAFLQGRMVITLSQDNQTQAYQSLIPIQSTSMSENLMTYFAQSEQIATRVWLAVNEDMAAGMLLQLMPGQDTIQREQFWEYAVQLGQTVTEGELLTIDNQTLLYRLYHETELRIFESRSTRFQCRCNQEKMKQVITVLGEEEATDLIKEKGKIEITCDFCNQKYTFDSIDVTLLFRK

SEQ ID NO: 61116 - protein, 196 aa, Legionella pneumophila
MSQSNVIIVHGAYGHPFENWFNWMKTELESLGIECFVPQLPTPDGQELKNWLHVFNSTVSPMITHDTILIGHSLGSAFLLRWLEQANQSVFSTILAGSFIGTVGIQKFDKINESFFENGFDWHSIINKSKQFFCYHGSNDPYISRSNFNFIANNLQARKIIISQGGHLNEAAGFSSFPQLLIQLKSLLGINYGKFI

SEQ ID NO: 61117 - protein, 71 aa, Legionella pneumophila
MDIRRIVLYMALALIGLSLWNAWQIDYPAKQPVEEKTASQLTSDGHLLPQIIPSNAEQPVTLKAEEKAGYR

SEQ ID NO: 61118 - protein, 368 aa, Legionella pneumophila
MKYIEEFRNGAYAQAIINEIIATAEPQRHYQFMEFCGGHTHAIHRYGIPSLLPNNVEMIHGPGCPVCVLPIARIDKAIALASMPQVILCSYADMLRVPGSGQKSLLTAKACGADVRMIYSANDALKIAQENPDKDVVFFAIGFETTTPPTAFVIKQAKKLNITNFSVFCNHVLTPIAMDSLLQANEVALDGFVGPAHVSIVIGSFPYEQVCKKYQKPIVISGFEPLDVLHSILMLIQQLNEGRCDVEIQYTRAVNRKGNLLSQRIMAEVLEIRDRFEWRGLGFIPSSALKIKESFSEFDAEQRFELPESAAQEHKQCLCGEVLRGVKKPTDCKLFAKACLPENPLGSCMVSSEGACAAVYAYGRVNAL

SEQ ID NO: 61119 - protein, 336 aa, Legionella pneumophila
MSYEELSNTMEQMLHEGKGILAADESNSTIGKRFASINTENTEENRRDYRLLLATTPDLEQYINGVILFEETFTQTDEHGTPIPELFANKGIIPGIKVDKGLVDLANTEHEKVTQGLDGLTERLLHFKKLGAKFAKWRNVYSISEYTPSLTAIKTGAENLGRYAAACQSVGIVPIVEPEVLMDGNHSIEHCAEVCEMVLHELFHTLFIHQVELEHIILKPSMVTCGKEVAPFSDPEEVADYTISVFRNNVPASVPTINFLSGGQTPQQATANLNAINQIGHQPWLLSFSFGRALQEDCLKEWCGNKANIAKAQEALIKRARLNSMACLGEYQNDME

SEQ ID NO: 61120 - protein, 495 aa, Legionella pneumophila
MQNKLLQFICIKKLYKQKQSYKSIIKFASLPLAKKQIMCSIALLFVIKLSWATHHYDTIIIGAGVSGLTAAHHLHKAQQKVLIIEAKNRLGGRVYTSYDWGFATDLGASWIHAIENNPLMPLIGKQSIIINTYSNSDPVAMLNNYALYDSEGKPVSKQTQTLFSSLTKEFLRYCQTRNQMISFAQNLTTFAKQKKLTSEQLALLSYALENIYTYEFADNLTKLSRNVHSASEASIASGKNALVPEGYFQLFRPLTQHVPIHLNQIVSQINYGADGVNIITQHEKYHANQVIITVPLGVLKANAIKFHPALPKDKRTAISQLGMGSYEKLYLLFDKVFWDKDKEWIGMLPQNEQEAFNIFNYYKYTKKPVLIVFTSGKLAHDMEKEHLTEWVMQHLRRIYGSNIPKPIKNKKTHWGSDPFTRGSYSYLPVNVDKSVIGILAQPVANRLYFAGEATSTTDPSTVHGAYLSGIRAAEEVLASIKHSGKNREKDKAVNS

SEQ ID NO: 61121 - protein, 793 aa, Legionella pneumophila
MKVSKLWLREWVNFSLTEQELAEQLTMAGLEVDAVNPVAGQFTHVIVAEVLDTKPHPDADKLTLCEVNINKDKPLKIVCGAANVRPGLRVALAMIGAHLPGGLQIKESKLRGELSQGMLCSATELGLAEHSEGIMELSDEAPIGMDLREYLALDDHVFDIDLTPNRADCFSILGVAREVAVLNKLPLIEQPIVTVPPAIDDGLRVNLIHSEACPRYCGRIIRNLNLEAKTPLWMAERLRRGGIRTLHPVVDVMNYVMLELGQPMHAFDLAKINGEINVRYGVSGEQLELLDGQEVVLNDNVLVIADKEKPLAMAGIMGGANSAVQEQTQHVFLESAYFNPVTIAGVARKYGLFSDSSQRFERGVDPCLQSKALERATELILSISGGEAGPVIESFDKKFLPGTVSFLFDTTKVKKLTGLSIPLNEMKNLLEGLGVVIIKETNHFFEVTIPSHRVDLQQDADLVEEIIRLYGYDKLQAQPMQTSVQAGLISAKEKIATHVSSWFSAKGYHETISYSFVDPELQEALYPQKEFMELLNPISSELSQMRAGMWPGLIASMIYNSHRQQTAVKFFEIGVVFDLDGGQLKERSCIAGLLMGEQGNLNWSESARLFDFYDLKGDLQSLFASLKLDDVEFIQSSHHALHPGQSAQIVINGKHSGWIGVLHPRLSDAFDLDQDVVLFELNLESLINPTIPLYKPISKYPQIRRDLSFLVDRQISAMQIERVIRNTVKEDWLKSFDVFDVYMGKGIPEDKKSIAVAMTLQDDTRTLVDAEINLTISAIIKKLENEFSILLRE

SEQ ID NO: 61122 - protein, 254 aa, Legionella pneumophila
MNNVSMRELLEAGAHFGHRTRFWNPKMSEYIFGSRNKIHIINLEKTLPMLSDVTNYVSRLAANKAKILFVGTKRAAQDSIREHAKRCGMPYVDHRWLGGMLTNYKTVRQSIFRLKELKEMKEKGLFNDMIKKEALMLTRELEKLERSLGGIENMGGLPDALFVVDVGFEHIAVEEARRLRIPVIGVVDTNNSPDNIDYVIPGNDDSMRAVDIYVRCVADAILDGKNSNTVGRVSSDSEFVEVTSNSNEEEKSGE

SEQ ID NO: 61123 - protein, 450 aa, Legionella pneumophila
MKVKTQFVCNQCAAIFKQWAGQCTQCGAWNSIVEEGIMPENKTLRSGQWANQRSVITAVEDVVMDKIVRMDCGISELNRVLGGGLVYGSVVLIGGDPGIGKSTLLLQTLANLSMQETVLYVTGEESLQQVAMRAQRLGLPLAGLRLLAETQVESIIAQAQKEKPRIIVVDSVQTIFTEAISSAPGGVSQVRESAAQLVRYAKMTNTAIFLVGHVTKEGTLAGPRVLEHMVDSVLYFEGQNDSRFRVIRAIKNRFGAVNELGVFAMTDKGLKEVANPSAIFLSRQPEPTPGSAVMVTWEGSRPMLVEVQALVDEAHGQQAKRVTAGLEHNRLAILLAVLHRHGGIATYDQDVFINVVGGVKVTETASDLALLAAVISSLRNRIFDSETIIFGEVGLAGEIRPVQSGQERIKEAIKHGFKRAIVPFANAPKQQIDSMTVEPVKHLRDVLEKM

SEQ ID NO: 61124 - protein, 143 aa, Legionella pneumophila
MYKRVLFATDFDEVGVRAAEKAKKIADENGADLILVHVVEPIPAYAYPGFAGFAEVEMSIREQAEKELNELAEKLGVDEKHRFIEYGSTKNEILRVAKEHKIDLIVTGSHGKHGLSLLLGSTANAILHGAECDVLIVRPKISH

SEQ ID NO: 61125 - protein, 265 aa, Legionella pneumophila
MFMQRLITTLILVPLVLLAIFYAPSWILWGVVLVILLLAGMECFKLIPVDNLTVQACFLIFLLMCFWACGYFYSYWLSVGLLVWLLNGLAILTYPRSQNYWGYPIVVAIASLILLPLFTQSLMQISFLQQGKELLVYLLFLIWASDIGAYLTGKQWGKHKLIPKVSPGKSWEGVTGGVILAMIVATLGYYYFIPYSIYIWFGLALSTVVISIFGDLFISILKRRCQLKDTGNIIPGHGGILDRLDSLIAALPWFYFGLTYIPLGI

SEQ ID NO: 61126 - protein, 387 aa, Legionella pneumophila
MKILTVLDSYPPDLNGGAYFTHRLAKFLQAKGHEVLVICPSRSLKQGYTSYEGVNLYGVRSWPALGYKNFRVCWPFFIKKGILKAITDFNPDVVHLQGKFFLGGICYRACRKKGIPLMATNHFMPENFFHYTHLPKYFEKWFHRTTWNIVIDMLNHVKIVTTPTHTAANLLKEVHIQKEIHVVSCGVDLQKFQPKQNANLIRQRYKIPDKPILLYAGRLDKEKNLSIAIKAFYKARQSIDAHFVLTGRGAELQRLKKLVQTLNLTEHVTFTGYLSDAEYPLVYSLANCFVNPGTAELQSIVALEAIASGLPLLAAKAMALPELVKEGVNGYLFDPNDVETLSCYMVKILSDRTFSEQMGRESRKLSQEHDIKRTIEQYETLYQSMVS

SEQ ID NO: 61127 - protein, 256 aa, Legionella pneumophila
  MISC_FEATURE (227)..(227): X=any amino acid
  MISC_FEATURE (241)..(241): X=any amino acid
  MISC_FEATURE (244)..(244): X=any amino acid
  MISC_FEATURE (248)..(248): X=any amino acid
MRILSCLVLIISLVACSSKPAPNTLVIGTIAGPETELIETAKQVAEKEYGLNIKIVEFNDYNLPNEALQDGSLDANVYQHLPYLKAAILSHGYDLQAIGRTFVYPMGIYSKKYKTLSELPENGIIAVPNDPSNEMRAFLLLEKAHLITLKNTTNSGIQDIESNPKQFKFKEIDAAQLPRVLPDVDAAVINTTFALPAGLSPSKDALFTEGKDSPYANIIVIRRDTEXRPQLELFVKALNSXEVXEKAXNLFGEDAI

SEQ ID NO: 61128 - protein, 255 aa, Legionella pneumophila
MEVESIEGYKNSESIGILSIVFNINNGPILMNDSGWFLISTALLLGMRHGFDLDHLATIDAITRTVRYKPSLSRMVGFLFSLGHGLVVIIVSLIIGGGIISASTPEWLNEVGNIVSVTCLLLFGFLTLWNTVHYSSSAIIPTNLRSYLFRKLADNNVHPLMILFIGALFALSFDTMSQIVLFSLAASALSGFLFSGLLGFVFMLGMMMSDGLNGFFVASLIRRADGFSLLFSRLVGFGIAFFSIGIAIINCCKLL

SEQ ID NO: 61129 - protein, 678 aa, Legionella pneumophila
MNLLADYVQPLTYWLQANPHWSLFITFLIALSESLAVIGSIIPGSVTMTAIGILAGSGIMRIDLTLLAATLGAICGDSLSYFLGYFYSDRLIEIWPFRKYPGLLKYGKDFFASHGGKSVLIGRFVGPLRSIIPVIAGIMHMKQWRFLIANIVSAIGWSILYVMPGVLIGAAGHELSAEGATRFFILILVILAVIWLSSLVLKWLFIRLNSFLRSNLHRFWLEIKTSPRLSKVYYAITPVQEENHYNTVGLLLIALVIFFLFLTLVIFTIEGQLLDYINVPVHFFMQSFHSSLLEAVFIVCAQLTSKSTLTGLFVASCTWFIYHKNYRATVYLSSITLLSGVIALFLTKIIDSPRPQGLLVTLPGSSFPSVSISIATALYGFVLFYINSKYSLITSSFKTIILIVLGLSGFANIYLGDFWFSDILAAYLLGAEVCLIHCLVYRRFSTSVIKNEHPLIMLISLLMVIVFATAVSTVVNFKEQVHDHMPYHKEFTLTEKQWWDQQRPLLPLYRLSRIGKRISLLNIQYVGDLDALQNKLEQFGWEPQSDKTFFTRLLMRMNNAPSNVKLPLLTQLYENKKPGLIMTYQDKKSKLIFDLTIWQSNYYLSEPKRIVWIGSIHQNIFNLKQKKSRHNLPPVLNPLSYVIPALDDFTLRRIMLSDDLVKTSVFPTAPYILLIKTK

SEQ ID NO: 61130 - protein, 85 aa, Legionella pneumophila
KNTMEAFYGEVGSCYVREILVMLILTRRIGETLIIGDDVNITVLGVKGNQVRLGINAPKDVSVHREEIYLRIQQEKESDDSEQAV

SEQ ID NO: 61131 - protein, 65 aa, Legionella pneumophila
MQVSLITSRIKYLTDHFKENKKDFHSRRGLQELVNKRRKLLKYLKRNDQDRYQTLIQNLGLRDSY

SEQ ID NO: 61132 - protein, 194 aa, Legionella pneumophila
  MISC_FEATURE (15)..(15): X=any amino acid
  MISC_FEATURE (23)..(23): X=any amino acid
  MISC_FEATURE (26)..(26): X=any amino acid
  MISC_FEATURE (28)..(28): X=any amino acid
  MISC_FEATURE (36)..(36): X=any amino acid
  MISC_FEATURE (171)..(171): X=any amino acid
MIESMINGTPAICVXRVAWFWWXVAXNXACSINENXPINKPHLSGRHSVRDFPMVSLFSNLGIAQLIDTPISAIQRLIDTLQAEALIIHCNPLQECIQPEGTTNFQGCWTALEALVKKIASPVIIKETGCGFSKNTLLRLNNIGVAAVEISGVGGTHCGRIERHRATRIRXDNRPGDTFRKWGIGTLQSTRNAI

SEQ ID NO: 61133 - protein, 292 aa, Legionella pneumophila
MSTISAALVMQLRERTGAGMMECKKFLIATNGDIEQAIIEMRKAGQAKADKKADRVAAEGIIVIARSSDERTAVMLEINSETDFVARDENFTNFANAVADVALTSLPKNIEDLSNQALSSGATVEQARQELVAKIGENIKLRRLEKMHCDGVIGYYLHGSRIGVMVALKNGSEALAKDIAMHVAASKPMVVSRDQVPAEAIENEREIFTAQAKESGKPQEIIDKMIDGRINKFIDEVSLLGQPYVKDPNIKVGQLLKEKNAEVISFVRYEVGEGIEKKEDNFVEEVMAQVRT

SEQ ID NO: 61134 - protein, 430 aa, Legionella pneumophila
MNFLKKLYVQVLLGVFIGILLGYFLPDVGVQLKAIADVFIKIIKMLISPIIFLTLVSGIAAMNDMRQVGRLAGGALLFFTFITTLALLIGLLATDYFKPGVGLNVNPNSLDAKEASSYLEGAHKVTNVTDLLINIIPRTFISAFVDGELLQVIFISILFAIGLILTGNMGKSLVNGMQILSNVFFKIIHLVMYMAPIAAFAAMAFSVGKFGVGPLFNLIGLLACYYLTSIFFILIILGSLLQWYCKINIWHLLRYLKDELLIVWSTASSETVLPSLMQKLERLGCEQSVVGLILPLGYSFNLAGTAIYLTMAAMFIAQATNTDLTVWQELSLLGVMIISSKGAAGVSGSGFIVLASSLATIGHIPAAGVVLVLGIDKFMNEARSIINMMANAIATIIISRWQQSLDYQKTQFELQEKGQAETKSVYASEM

SEQ ID NO: 61135 - protein, 165 aa, Legionella pneumophila
MELFLEALRKEIDDLNQHGIRLKFTGDREPLSQILQKQMCDAEALTKNNQQLILNVVVNYGGKWDIVTAARKLIRTVLDGKLAYDEINEAVFAQFLDTNGMPEPDLFIRTSGELRISNFFLWQLAYTELYFTDVHWPDFNEHEFELALISFAKRARRFGQISQSE

SEQ ID NO: 61136 - protein, 75 aa, Legionella pneumophila
MQISELKQGDKVRLVSFGATDMQYRRRLLSLGITCGVEFSVVRMAPLGCPVQIEVRGTFLTLRKDEASQLVLEHL

SEQ ID NO: 61137 - protein, 189 aa, Legionella pneumophila
MNTIAAMDETRNNEFTNPGYELAALRQQKGYSIEYVASKLHLRARIIELIEAGDFDLLPQPVFVKGYLRAYSKLLGVSPEPFLTLFNAQYCFEKKPERAALWQSKKESHKAEHFIKWFTILFAIGVLVAVGIWWQKNKDSQSIDTPKENSSGLSISETSSEIKLTDLSKMESLLTPNNTQMTPLEKNGG

SEQ ID NO: 61138 - protein, 253 aa, Legionella pneumophila
MKRIVFILLFISNVLVHSESLKVGVLQFAPPFSSISDKANHYYGFVVALMNIICNRLQEKCEYIPIPKEGELKGLDKGVYHIVFSSTPITTSLPANYRYSLPYLPSDGQFLTLKNNSIDTLNDINFKKVGFFKINFQQSPLLKKYETTNTLIEYTDPAELVNALTTKKIDAILINYQASRFIVNNLNPTEDDQLKLIGDKIPIGSGYGIIALKNQSALIDKINHILLEMEKDGSYLRIYNEYFGANPAYNLHH

SEQ ID NO: 61139 - protein, 182 aa, Legionella pneumophila
MEQFHGTTILSVRRGNQVVIGGDGQVTLGNTVMKGNARKVRRLYKDKVIAGFAGGTADAFTLFERFEAKLEMHQGHLIRAAVELAKDWRTDRILRRLEAVLAVADSKASLIITGNGDVIEPEESLIAIGSGGPFAQAAARALMENTQLSAKEIVQKALTIAGDICIYTNNNLTIEELNDEGK

SEQ ID NO: 61140 - protein, 960 aa, Legionella pneumophila
MKFTDLFIKRPVLSIVVSMLIFLFGINSIYKMQIRQYPKMENTVITIMTGYPGADAELIAGFITTPLESAVASAEGIDYMTSSSQQGLSTITLNIKLNFDPQIAFTDVMSKVQQTLNQLPKESQQPVILKKSDSSTALMYISLDSKDMTPQQITDYATRVVQPQLQTVDGVAKADILGGQTYSMRIFMNPIKMAALNVTPADVSAVLASNNFLTAAGSTKSEYVAINVTAKTDLNNVEEFERLIVKSDKGSIIRLRDIAKVELGSQNYDSSVTFNSKKAVFISITPTPTANPLTVINDARKLFPSIVREFPPSLTGTIVYDATAFIRASIHEVMETIIEAAVIVIIVIFLFLGSVRSVLIPVVTIPLSLVGVCTLMLILGYSINLLTLLAFVLAIGLVVDDAIVVVENVHRHLEEGKTPFESAIIGAREIATPVIAMTITLAAVYAPIGFMSGLTGALFKEFAFTLASAVIISGVIALTLSPMMCSKILSEEATSGKFAIFLDEFFNKLKRVYQNALHSLLDTREMMLLLAGVVILMLPYLYSNTAAETAPDEDQGFFFVMATAPQYATLDYIEAYTKPFDAIYKSFPETENYFTVNMSQPISGMVLKPWDQRKKSQFALKQPLQNKLSKIAGLNAFAIVPPPLPGGGGGPAVQFVVKTTNDFQSLMDVSNKLTEKARNSGLFIYIDNSLKFNQPQVEFSINRAKASEMGLDMRALGSSLTSALSGNYINYFNLEGRSYQVIPQLARKFRLTIEQLGQIYVKTLNGTMVPLSTVITPTEKTQPNAATHFQQLNSATIQAVMMPGKTLGQGLEFLQKAAQEVLPKGFTYDYGGESRQFMQEGSALIFAFLFAIVVIFLVLAAQYESFRDPLIVLISVPMSICGALIPLNLGVATINIYTQVGLITLIGLISKHGILIVDFANHLQREKNLDKRAAVEESAGIRLRPILMTTAAMVFGVRGS

SEQ ID NO: 61141 - protein, 208 aa, Legionella pneumophila
MIDNTKIRSLLEKGLAEFKLDSIGDLLLDFLLLLNKWNKTYNLTAIRDIETMVSKHLFDSLAILPWIKGNHIIDVGTGPGLPGIPLAIAKPDLQFVLLDSNGKKIRFLNEVKRQLNIKNIEPIQIRVENYHPNQGFDTVISRAFSSLEQMIKWTQHLVAQDGLWLAMKGRFPDTELVPIHQTYRVERYAVPGIEGERCCVLINNTNKE

SEQ ID NO: 61142 - protein, 107 aa, Legionella pneumophila
MIPLDIEFTESTMIQKSTPIDSTLIKISQLGIKMAIDDFGTGYSNLSYLKTFPFDKLKIDRSFIQNCTTNPNDASIVEAIIAMAHSLELKVLAEGVLFGVGSYLWAP

SEQ ID NO: 61143 - protein, 475 aa, Legionella pneumophila
MMRAWVLSLLLYLPSSFAVFSAQLKNITVSQQPTMTSLYLSIQGSFTHKLFTLSQPNRVVLDLSDTQLAVNISQLGLINSLIQQVRSGSPSKNTLRLVMDVKQPVKVRSSSWKPKGELNGIRIDLVNDTPLVINNRRQLSSPVKTIKAPVQQTQSKISSQPSEQRITVHKTPVQVPHNPSKKPLRDVVVVLDAGHGGKDPGARGPRRSNEKDVVLAITLKLKRLIDRQPGMRAVLTRSGDYYVGLRQRLDIARKYNGDVFISIHADAFNNPHSNGASVFALSQRGATSEAARWLAEKENYSELGGVNLGELDDSNGVVRSVLIDLSQTATINAGLEMGGKVLGQLDNFTNLHNNKVEQARFVVLKSPDIPSILVETGFISNPREERNLTNPAYQERLSQAIFQGLKNYFWDHPPHGTRIEAMISPNFHIVKKGETLPAIAARYRVSVNALQSINRLQARARLMPGQKLVIPGTWS

SEQ ID NO: 61144 - protein, 544 aa, Legionella pneumophila
MTKESEIKIPDIGGANQVDVIEILVKEGDQIEVDTPLITLESEKASMDIPSPISGTVTQILVKVGDKVSEGDLIVKAKSDTTTNISSSQEQKTEPEKQNLQTRAEEQSVDTKATASTPSSKDIEISIPDIGGANDVDVIDILVKPGMEVEKDQALITLEGDKATMDIPSPYAGKVIEMKIKLGDKVSQGTPILTLKTLGKSETPEIEKSQIKNISEQSIKEIEKPYEELKSEAISINNLEIAESKSILISAGPAVRRLAREFGVDLSLVQGSGRKSRITKEDLQNYIKVRLSEKTTSGGFSLPSNPAIDFSKFGSIETKPLNKIKKLTGTNVHRSWITIPHVTQFDEADITDLEAFRKSESESAKNQDYKLTLLAFVCSVVCKALHAYPQFNASLDTSGENLIYKKYYNIGIAVDTPNGLVVPVIKNVDKLSVIDIAKEMSRLSTKAREKGLTPIDMSGGCFTISSLGGIGGTAFTPIVNSPEVAILGLSRSIIKPIYDNKEFKPRLMLPISLSYDHRVIDGAEAARFTRFLCDCLGDIRRVLL

SEQ ID NO: 61145 - protein, 357 aa, Legionella pneumophila
MMSVDNIKNDNQVLAEEDFLEYALSHGFGDLHFKVDPQTGMKAMIAIHSTKLGPALGGCRFIEYPNTAAALKDAMRLARGMSFKAASVNLPLGGGKSVIIKPKGFFNRAEYMHRFGEFVNELNGRYITALDSGTELSDMDIIAEHTDYVASLSRYNGDPSPSTSKGVLRGIQAAVAFKLGKDSLKGLHIAIQGLGHVGYALAKQLHELGATLTVADISPAAVNMAVQELGAKAVGTDIIHKVPCDVFAPCALGAIINDLTIPQLQTSIIAGAANNQLAHTYHGKILHEKGILFAVDYVINAGGLIFAASKYLQTPEDKVSEQIDSIYTSLTEIFTRSAKDNLPTSEIADTLAKEKLA

SEQ ID NO: 61146 - protein, 330 aa, Legionella pneumophila
MVNSIFSKLSIAPMIDWTNSPFRTLMRLLAPNALLYTEMQTTGAVQNNPDRALYFNSVEHPLAIQLGGADKSALVKCAIIAEQKGFNEINLNLGCPSDKVQAGRFGACLMKEPEHVADCIRAIKQVVGIPVTAKTRIGIDNQDSYEFFRSFSLHLVEAGCDKLIIHARKAWLNGLNPKQNRTIPPVNYDYVYELKKEIPHIFITINGNILTVEEINNHLKHVDGVMLGRLACDNPYQIAEIHQALYPEFIKIKRSQLLMNYLDYWFDQSRANLSLSILVKPLFNLAFGLPGAKHWKKKLMNIIQEKNTSGFSELIQYLLNLEAINQVEFV

SEQ ID NO: 61147 - protein, 670 aa, Legionella pneumophila
MTSERKMLVTSALPYANGHLHLGHLVEHIQTDIWVRTHKMLGIQCISVCGDDAHGTPIMLKAEQLGITPEALTAEIKLSHEKDFKAFAIDYDYYHTTHSPENQALATTIFERLQAGGDIVKKTIRQFYDPVKQMFLPDRYVKGTCPKCAAVDQYGDNCEVCGATYSPTDLINPVSVISGVSPVEKESEHYFFDLPRYEELLKDWTRKGHLQTEVTNKLSEWFEAGLKQWDISRDAPYFGFPIPGVPDKYFYVWLDAPIGYMASFKKYCDERGVSFDEFWDKASKTELYHFVGKDIVYFHALFWPAMLAASGFRTPTAVYTHGFLTVEGQKMSKSRGTFIEARAYLAHLHPEYLRYYFAAKLNGRVDDLDLNFDDFVNRVNADLVGKVVNIASRCAGFINKRFDNRLSSELNDQKLYNDLLSARESVIDAFVSRDYARAIRQIMDCADKVNQYIDANKPWVLAKDESKLNEVHAICTMGINLFRILITYLKPVLPMMAKASEEFLNSEPLHWDSIDKPLLNHRINTFKPLMVRVEKEKIEAMLVQSKESLMTTPVKENTPVEDANLISIEDFAKVDLRIAKIVNAEPVEGADKLMRLILDLGDAQKQVFAGIKKAYDAEELIGRLTVMVANLEPRTMRFGVSEGMVLAAGDGQGIYLLQPDAGALPGMKVK

SEQ ID NO: 61148 - protein, 896 aa, Legionella pneumophila
MKPPLILIDGSSYFFRAFHALPPLTNSKGQPTGAIYGVANMIKKIIKDYQPEEIAVVFDAKGKTFRDEWYPEYKAHRPPMPQELSSQFQPLIQLLQAMGLPLLIIDGVEADDVIGTLAKQATEQGIPVVISTGDKDMAQLVNEHVSLINTMSNYSMDIDGVKAKFGVTPEQIIDYLTLIGDSVDNIPGVEKCGPKTAVKWLTEYQTLDNLLAHANEIGGKIGEYLRASIPHLPLSKKLVTIKTDLDLPLNLNQLMPKPADSEQLIKLTRELEFKSWLKELLQEEENQKSPKEMDASNNKSYEIITTHKQLNHWLNKLEQSQQFCIDTETTNLDVMQAELVGISLAVEEENASYIPLAHTDGSTQLVKEEVLTALKPILENPAIGKIGQNIKYDYSVLKNYGITLKGIGYDTMLESYVLNSGAGRHDMDSLALKYLGYKTISYEDVAGKGAKQLRFDQIPVVKAGIYAAEDADITLRLHHKLYPMLDESLRNVLHDIEIPLLTVLADMEMHGVLIDPVILEKHGSRLKEQMKSLEQEAVQLAGKAFNLNSPKQLQEILFDEQKLPVVAKTPTGQPSTAESVLQELAFDYRLPAVILEYRSLSKLVSTYIDALPKRINPKTHRVHTSYNQAVAATGRLSSSDPNLQNIPIRSEEGRLIRTAFIAPEGSLIMAADYSQIELRIMAHLSQDDNLLRAFANGWDIHAATASEIFQTNLDAVSKEQRRRAKAVNFGLIYGMSAFGLAKQIGVERQDAQHYIDTYFRRYPKVLEYMERTRKQAHQLGYVETLFGRRLYLPEINSRNLMRQKAAERTAINGPMQGTAADIIKKTMLAISSWEHSQKNPSAKMIMQVHDELVFEVRKEAVEECRAIIHKLMEQTVKLSVPLVVSIGTGSNWDDAH

SEQ ID NO: 61149 - protein, 791 aa, Legionella pneumophila
MRSIVIILLAFVCCSLVRANDVNISTVTKDGNTFFYLQAGAYNLEKDAKIRQNELAKLVDQKVEIKNLADKHLYLVQIGPIDDYQTARALKEKLSQKTEKQFNKISKNQTSSLEVSQLPKNMEQAQTAPPGSKLWNLRNADIRAVIAEVSRITGKNFVIDPRVQGKVSIVSSTPLSSRELYQVFLSVLQVSGYAAIPNGEIIKIIPNIDAKTQSPDLLSGMKSPPRGDDMMVAVIPVHYVPSEQLVPVLRPLMPQWSSVSAYAPSNMLILSGRANNIKSLAEIIKQVDSSSANGIDMVRLHHALAMDVANTLKDLVKTQPGIGSRTQITIAADDRSNSILVSGSKTDRIRLRMLILKLDKDSSTGVNSNTQVVYLNYLRAEDLVPILAGIAQANFSGNVGTTIGTITRPALDSTNPASSLANTSADGQSSSLSSTSTSSAPMNASGATANTTSASTQNEGSTKPTVQIIGEPNTNSIILNAPASIIRILKTVISQLDIKPAQLLIEALVAEVDEKDVNNLGIEWGSNQQTGNPKDFRPGFAIINSKTRIDDFQAQIYALAREQRANILSTPSVVVLDNRQAKILIGKQVSIATTSYPNNAGGTTTASPFTTFDRVNVALHLYVRPQITRGQGIQLQIDQGNDTLDPATATTDNTTTPTFNISSIVTSVHVESGDIVVLGGLIQDSIGNDNNKLPILGDIPGIGRLFQRNIRNRDKRVLMVFIKPIILRNERDNLHVTGEKYNYVRQYQLDWIRSQEAFEQTDDETVLPPLTQGNLPVPFSTPPQYSSKMTK

SEQ ID NO: 61150 - protein, 185 aa, Legionella pneumophila
MINEIKQDSEKRMKKTIEALHTDMSKIRTGRANASLLDHVMVDYYGSPTPLSQVANITTSDSRTILVTPWEKSMVAAIEKAILNSDLGLNPATAGTAIRVPMPPLTEERRKELIKVVRHEGEQGRVSIRNIRRDANNQLKELVKEKAISEDDERRAAEAIQKLTDRYISEVDAVLAEKEKDLMEI

SEQ ID NO: 61151 - protein, 185 aa, Legionella pneumophila
MPYLDIPLQHANSRILKAMKRPASSENTLLRIASWREICPDITLRSTFIVGFPGETEEEFSELLAFLKEAQLDRVGCFKYSPVEGAKANDLDNPVSEDIKEERYHRFMQVQAEISRNKLKNKIGSTQTVLIDEINDDQIIARSKSDAPEIDGLVYLPKTSGITVGSFAEVVITDSDDYDLYASLV

SEQ ID NO: 61152 - protein, 749 aa, Legionella pneumophila
  MISC_FEATURE (738)..(738): X=any amino acid
  MISC_FEATURE (739)..(739): X=any amino acid
  MISC_FEATURE (740)..(740): X=any amino acid
  MISC_FEATURE (741)..(741): X=any amino acid
  MISC_FEATURE (742)..(742): X=any amino acid
  MISC_FEATURE (743)..(743): X=any amino acid
  MISC_FEATURE (744)..(744): X=any amino acid
  MISC_FEATURE (745)..(745): X=any amino acid
  MISC_FEATURE (746)..(746): X=any amino acid
  MISC_FEATURE (747)..(747): X=any amino acid
  MISC_FEATURE (748)..(748): X=any amino acid
  MISC_FEATURE (749)..(749): X=any amino acid
MVNTRGERSLSGLVFLNATAVTTDGDGDTATASASLDLGGNVKFDDDGPSVTMAVSDNNAITLNTQDADTIGAASDSDSASFAAAFAVTPNYGADGAGTTVTTYALSVSAQGVDSGLDNNGNNIYLYNIAGSVVGSTSATQAGITTGNTIFSLGVNSSSGVVTLTQHQEVDHGLPGASSNYAAQEAILNTGLVFLNATAVTTDGDGDTATASASLDLGGNVKFDDDGPSVTMAVSDNNAITLNTQDADTIGAASDSDSASFAAAFAVTPNYGADGAGTTVTTYALSVSAQGVDSGLDNNGNNIYLYNIAGSVVGSTSATQAGITTGNTIFSLDVNSSSGVVTLTQHQEVDHGLPGASSNYAAQEAILNTGLVFLNATAVTTDGDGDTATASASLDLGGNVKFDDDGPSVTMAVSDNNAITLNTQDADTIGAASDSDSASFAAAFAVTPNYGADGAGTTVTTYALSVSAQGVDSGLDNNGNNIYLYNIAGSVVGSTSATQAGITTGNTIFSLDVNSSSGVVTLTQHQEVDHGLPGASSNYAAQEAILNTGLVFLNATAVTTDGDGDTATASASLDLGGNVKFDDDGPSVTMAVSDNNAITLNTQDADTIGAASDSDSASFAAAFAVTPNYGADGAGTTVTTYALSVSAQGVDSGLDNNGNNIYLYNIAGSVVGSTSATQAGITTGNTIFSLGVNSSSGVVTLTQHQEVDHGLPGASSNYAAQEAILNTGLVFLNAAAVXXXXXXXXXXXX

SEQ ID NO: 61153 - protein, 382 aa, Legionella pneumophila
MSLALKIKSIILSFFLVLVTTVACATQVSLRDKIGQMLILGFQGKVVDEKSPIAQAIEKNNIGGVILFDFNQQSQTFDKNIESPEQVNRLNNQLQTLTQKANRKYHRDNLPLLISVDYEGGNVNRLHPRYGFPEMPSAKDIGSMSLERADASAELMANTLKSTGFNLNFFPELDVNINPDNPIIGKKDRSFSSIPEIVTQYAQLYTEQFIKHQIHCSYKHFPGHGSSLSDSHLGFVDISDTWSEQELIPFLQLLSQPNHCDMVMIAHIVNRKLDMTGLPASLSYQIINGLLRRDLKFDGVVITDDMQMKAITNYYGLETAVTLSINAGADMLIFGNQLVEKFQDSTEIIDMIEQKVRSGEISEQRINEAYQRIVKMKRSFNY

SEQ ID NO: 61154 - protein, 451 aa, Legionella pneumophila
MLAAGVNVVRINFSHADSSALQLIALVRKIADELNHPVAVMADLQGPKIRVGRFQNKSITLIDGQNFTLDCMAPDTLGDINGVSVAYPNLANELSIGDHLLINDGLIELEVIEISGSKIHCKVVEGGVLTDLKGLNRKGGGLAARTLTEKDRNDLRTAIEAEVDYISLSFVKDAEDIRQARALMKDYGAQITPIIAKIERMEALDHLTDIIREADAIMVARGDLGVEVGAAEVPAIQKHIIEQTRLLDKVVITATQMMESMISNPQPTRAEVSDVANAILDGTDAVMLSAETASGLFPVKVITMVNKICLSAEKHASFFYHSDPETCHYQRADQAIAMATMHTANHFPIQAIITLTESGDTALWVSRHHSTVPIFAISANKRTIGRLSLVNNVFPIYIDFHQFNPEGLNQQILHELIKSGHLEKRGYVLLTRGTQIGMPGGTNCMEIIPVV

SEQ ID NO: 61155 - protein, 374 aa, Legionella pneumophila
MFIELISYSLYIWHWPVLALIRYLNIEESNLVLLVTFGLISIIAYLSWRFIEKPARKLHRIRFSYTVVCLLIMPVFVTHLSDYLIKKNAGYPYRFNEAIQVYAELNKYKNPQRPLCLERKNTEVNPQCVLGAKNSDSRTGFMIGDSYSNQHWGFMDTLAKEANVSILAHATVACLALPDIYQFDWNVKNKIYQECHDQTNRYFNMIKTNHYDYVILGQNWNGYFGDRIINQLNDNRSQELSLKRIEKALDKALELITTSGAKPVLIKSIALSKGNPYNCFFEHIKLHKKYNPERCDFNLDVSEQIWFDNLFAKMQRKYKTLVIIDPRVAQCPSGMCKVDINGIPVFRDSGHITDYASYHLAKLYLEKNNNPLVS

SEQ ID NO: 61156 - protein, 300 aa, Legionella pneumophila
MKNLLHSLACLLILISSAKLSYGLALPENHSVNGGLTIIPIDFNQKPEAYFEGKRIPVLPSTQPRQWLLIVAIPLKNTNSVQYINVTKPIKASIPFHVSEKFYSTQFLNIKDISKVDPQPEDLIRIEKETKKLTQIFANYSNTNPFEKQFTAPLRGPITSLFGLKRVYNKQPRDPHSGLDIAADEGKPVYAVNQGVVADTGDYFFTGNTVILDHGMGVFSVYAHLSKILVKTGETIKQGQELGLVGMTGRVTGPHLHWTMVVNQTLVEPLLFVPFRKITVTPVIPDKKSNKSTQDATAKS

SEQ ID NO: 61157 - protein, 764 aa, Legionella pneumophila
MLKILKRIVQDVTAASDLKEALGILVQRINTAINAEAVSVYLIDNKNAEYVLIATEGLNKQAEFRVRIALDCGLIGLIGRREEPINIENAPSHPDFYHNPLIGEDHLNAFLGVPIIQHRKLYGVLVVQQLEQRYFDDAEESFLITLAAQLGGIIAHAEATGELAELTQPKKGIGVDKVEATYTALTGIGSVPGIGIGTAVVVYPPADIDAVPRNPVEELEDEINAFYEALETTRDDIRRLSKRMKETVAEEEHALFDVYLRILDRDSLGAEVEHVIREEKISAQAALATVIKKHVQQFESMGDDYLRERASDFRDLGRRVLAELQRTQREEIVYPKRTILIGEEITAAALAEVPEGQLAGVVSAKGSNNSHVAILARALGVPTVMGLRGLKVELVSRRALIVDGYYGHVYISPSKSLLAEFKQLAQEEQELNQSLVSLRDKPAETTDNYRVSLQVNTGLAMDAGLSMSVGAEGVGLYRSEVPFMSRDRFPSEDEQTIIYRQTLKAFAPRLVTMRTLDIGGDKILPYFPVEEENPYLGWRGIRITLDHPDVFLIQVRAMMRASEELDNLRIMLPMVTTLSEVEEAVYLIEQAFEELVEEGCEIVKPKIGVMIEVPAAAYLAREMAKRVDFISVGSNDLTQYLLAVDRNNARVAALYDPLHPAMLRTLLKIVEGGHAAGVEVSICGEMASDPLAVILLIAMGFDTLSMNSASLPRVKWVIRNFAIANARKILAEVLEFEHPAEIRFHLQKALEEEGLGGLIRAGKS

SEQ ID NO: 61158 - protein, 149 aa, Legionella pneumophila
MEVILLEKVRNLGNLGDKVHVKSGYGRNYLIPQNKAVFATEQNIELFEKRRAELEKKAQQALANAEQRAAKLNDTTIVISAMASDEGKLYGSVGVNEIKDALIEKQIEISKREIVMPEGPLHSIGNYVVEVHVHSDVVANLQVEIIPAK

SEQ ID NO: 61159 - protein, 400 aa, Legionella pneumophila
MLLHVLASTPPLSNQLLAVHINHGISGNSLNWQRHCEQLCLDLGIAFIAKAIEFDRSANVEEAARNARYDFFSSLLEDNDCLVLGHHLDDQAETVLLQLFRGAGVDGLAAMQECSNLGAGQLARPFLTCPRVELEHYARIHELKWIEDESNQDTKYSRNYLRHRVMPLLLEKWPGVAGNISRAATHCQQAKANLEVLAIKDCPDLLNATDHLLIEPIKGLEFERITNVLKFWLKKNRIQLPSSKTFHRIIHEIIFAKLDAMPTVSWNQIQVRRFQQHLYLLKADQINLPKAIKWQQFPASLTYPDADIKLSAVKAQKGLMIPKDAQIEIRFRKGGEEIYWHGQTKHLKKLFQEWQIPPWVRDRVPLVYINDQLACVVGYAVSDLFFTTNPLEAWSISNNS

SEQ ID NO: 61160 - protein, 147 aa, Legionella pneumophila
MTIKEQINNDIKDAMRAKDKNLLNALRLISAAVKQIEVDERIEVDDERMLVILDKMSKQRKESIAQFEKASRDDLVAQEQFELNIISKYLPEPLTDNEIEELICDAIKSTGAEKMSDMGKVMAILKPKLQGRADMAQVSARIKAKLS

SEQ ID NO: 61161 - protein, 179 aa, Legionella pneumophila
MSRVAKAPVIHSANVEVTFVDGVITVKGPKGILTQKINKLVNIQHSKESNKLEFSPASNDPMGWAQAGTARALVRNMVQGVTEGYTVTLELVGVGYRAQSKDKSISLSLGYSHSIEYDLPKGVTVETPNNTTILLKGVDKQVLGQIASEIRAFRPPEPYKGKGVKYAGEQIVRKEAKKK

SEQ ID NO: 61162 - protein, 274 aa, Legionella pneumophila
MPELPEVETTKQGIKPHLEGRMITAVQVRNRKLRLPVPLNLNELCQGKHITAITRRGKYILLHMDKGYLLIHLGMSGHLRIVSQTANPQKHDHVDLHINNGLALRFCDPRRFGLFIYIDENPYQHPLLAHLGPEPLSDDFNSEYLLRKAANKSQSIKSFIMDSQIVVGIGNIYAAESLFLAKIHPNTSAKKITTEEFNSLTGHIKKILESAIEAGGTTLRDFYSSDGKPGYFRFALKVYGRKNLPCLVCENKIETVVIAGRHSAFCPHCQPIIT

SEQ ID NO: 61163 - protein, 474 aa, Legionella pneumophila
MANKIKTDVVVLGSGPGGYTAAFRAADLDKKVVLVERFDSLGGVCLNVGCIPSKALLHIAKVVDEAHEMSEQGVAFGKPKFDNKKLVAWKNSVVAKLTGGLKALAKQRKVEVITGTGKFSGTHQILVETKEGTVEIEFDNAIIAVGSESIKLPFIPEDKRIFSSTGALELADIKGDLLVLGGGIIGLEMATVYSSLGVNVTVVEFMDQLIPNADADLVNILQKRMTKKGVKFLLKTKVTAVEAKKDGIYVSMEGEHATDKPLCFQQVLVSVGRKPNGGAINAEKAGIKVDERGFIPVDNQLRTNVPHIFAIGDVNGQPMLAHKAIPEGKVAAEVIAGKKHYFEPKCIPSVAYTDPELAWAGLTEKEAKEKGINYEKASFPWAASGRALSMGREEGMTKLLFCPETNRILGAGIVGVNAGDLIAETALAIEMCCDVEDIALTIHPHPTLSETIAQSAEAFEGTITDLYLPKKKKK

SEQ ID NO: 61164 - protein, 231 aa, Legionella pneumophila
MSISQNINKVRELITQTESSSNRQPNSVLLLAVSKEQSPELIREAFQQGIRHFGENYFQEAQEKILALRDLPICWHFIGPIQSNKTKGIAKYFNWVHSIDRNKTAKLLNQFRSEQLPPLNVCLQINLTGETTKSGIPPEHAIDLALEVKQLPNLQLRGLMTIPPQQNNMQTQYNLFLKLNQLKESINKALHLKMDTLSMGMSDDLVPAIKAGSTIVRIGRAIFGERKGKLL

SEQ ID NO: 61165 - protein, 334 aa, Legionella pneumophila
MNIILNVFLIFVSAILTKLFALFAQHTKLIDIPNERNLHSRPTVRGGGLVFIGLSLFCWFFICNSQFFLTLDQFIFSIAIIFIATISFIDDFYNLSVTIRFFFQCLIAFLIVIFILPSQLDFGLFLFENTYLIAFFLFFAVIWAINHFNFMDGLDGFCASQAIFLLAAYALFFNSAGSLIYQDFCLILISSLAGFLIFNFPPAKIFMGDVGSASLGLITFFIAIIAQKNYQIPILYWFILNSLFLFDSTVTLIRRIIKHEKWFSPHKKHAYQRLKQLGINSRFILLGQAIINGSLFLSVMFMHFQFFNLKNLIIIQLCYLSAIYFFIEKKYPME

SEQ ID NO: 61166 - protein, 338 aa, Legionella pneumophila
MMPSELSAAGTQIILGGNTYHMLCAPGMKVIENAGGMHRFMGWHGPMLTDSGGFQVFSLSKNKEICSIDESGAHFKLPGSKGIIHMTPEMSLETQKIIGADIIMAFDQCTPDSCSKDEVSQIMLRTHRWLKQSIDYHQQYPNSRYGYKQALFGIVQGGVFQDLRRESADFVSAMNTDGIAIGGETVGFDMDTTVEVIRWVYEYLPGNKPRYTMGVGMSPQDLLDVVAEGIDMFDCVAPTRNARHGALYCGKLVREGNWLKFQSEHENGRIQIKKSCFADDLAPVMESCSCYTCLNYSRSYLHHLSKQKANLFTALASIHNVHVLHDVCNHMRHLIINS

SEQ ID NO: 61167 - protein, 225 aa, Legionella pneumophila
MKANGFFDEQSSLKKSKIGLNLVWMFSLGHIFLITLSNVLVQYPFDMMGFHTTWGAFTYPAIFILTDLTTRIATANKARKIIMLSMTPGLILSYLVASYIEAGNNLNESGLSVLHLMPLRIALACFIAYVVGQLLDVAVFQRYRNRPAWWLAPTLSAVAGNFIDTALFFTIAFYHCSNPFLSQNWPEIAMVDVFFKIMISLIAFVPVYGLVLSILGIKTTNKLMV

SEQ ID NO: 61168 - protein, 79 aa, Legionella pneumophila
MDNREKSRLLWKCRRGMLELDLVLQKFIANEIDRLTENQLKAFDNLLTHNDPNLYAWLMGHEEPEKELLEIVSFIRNCD

SEQ ID NO: 61169 - protein, 506 aa, Legionella pneumophila
MDKFLNGLSISLMLSPLIAMLFYILLGKTRNIQATYYGTTVIGFGFGLSLLALIVSANTVNQNSYFLFHASTLSLLLSTLILFISFIIHRFSLRYMHGDKCYRRYFFKLSAITLTTVVMALADNLLLFWLAWSASNLLLINLMIHKSQWKAAYNSGILTLKTLLPGSLLLITAFWILFTLNNTLSIETITSEVSNKSSLAIAVALGFIILAAMAQSAIWPFHRWLMSSLNSPTPVSALMHAGLVNGGGFLIVKFAPLFVTQENLLTILFIFGALTALLGTLWKLLQWNIKSMLASSTMAQMGFMMMQCGLGLFPAAIAHLCWHGLFKSYLFLNSGSAVQQKKYQNKSRPEKLTNLLTAFFGGLSGMYGFALITGKPILSLHASTFLLGFAFITGTQLTLGLIAYEKHFKKVILALALVFSIGIFYGGSIHLIESLLPNLTGFPQYQLSSLQVLTLIIFFSLWLLFSMGLFKKIRETRLWDWFYMYMFNASTPHPKTITANRHTYYY

SEQ ID NO: 61170 - protein, 564 aa, Legionella pneumophila
MGGLTSEQYHSQVVGKIGYIARCMQTIDPENNLKKIREDYQDVLIWAEKNYRFEEILEASKSGKCPNDLDALSRRSLILQELLRLVSSISPFKMKLDLIESQYEKMKQHVNLWKSDYHVKLNQLNQLTDYLKNAAPTPKNNFLRAMTSVLQMQIAQYGITEDNEGINQLFKLGLHLLAMANEKIDEQYHLFKGYVKDQPEESPFEGILPAEDQKILVKTMIDYAMPKLSSKVLQDKLSALSSSDVLTKTLLDSIDRIVKENEKLNALSKVKLGKFGLDIREIEVIYSQALKISPQDALQYTAQQCDAQLLSMAFPDSQNYIIESISNKKVKTIAELIHSKEFIYQIIKTEVFKQVDPNEKIRLQAATELYQLLGRIMDKQINLFTKMNLEQINEYIQTKTKAILDKIPERVELLTFMGFEIPTFKGIETLMTDISHSQDNETLAIAQEFYTNIKNAKNQLLGDKLIEDITPQDVEKFFNQCSQYGSEAAEKLADNRPVLTKIADILTAIARWAISLIGFNTPPQFLAPTRTCVDQVSDEITKIKLKLEDTLGSLQKVQEESLSL

SEQ ID NO: 61171 - protein, 281 aa, Legionella pneumophila
MNEVVYDPYLPKEVEIIQRTQESSSIFTLHFRFTDEEHHKQFQFYPGQFNMLYLYGVGEVAISIVSDPRKKTFLSHTIRAVGRVTKAMQKLQVGDRLGIRGPFGVGWPLQKTIGKDIIVLTGGLGCAPSVSIINYILGRRRHYGKLSILQGVKHSEDFIFRKQYAKWQKSDHTEVYIAADQAGPKWPWGVGYVTDLIDHIIIQPDNSVVMMCGPEMMMNTAVKVFTQKGILENDIYLSMERNMECGIGHCGHCQYGGLFVCKDGPVFAYSQVKELFKESGF

SEQ ID NO: 61172 - protein, 197 aa, Legionella pneumophila
MDALSRLVEALRCLPGVGPKSAQRMVFHLLQHQRQRGLHLASCLEQAMKHISHCQQCNNYTEQTLCALCQNPNRDSTLLCVVESPADVSAIEQSNSFQGKYFVLMGKISPLDGLGPDDIGLPKLKELITREKIQEVILALSPSVESQTTIHFIHQLLKDETVNISQLAHGIPSGGELEFLDGNTISSALKNRAVINV

SEQ ID NO: 61173 - protein, 452 aa, Legionella pneumophila
NQYWWPKMLDLSPLRQPNATSNPMGEKFNYAEEFNSLDLNAVIEDLKKLMTTSQDWWPADYGNYGPLFIRMSWHAAGTYRIYDGRGGANGGFQRFAPQNSWPDNANLDKARRLLWPIKQKYGRKISWADLLVLAGNVAMESMGFKTIGFAGGREDAWEAININWGPEGKWLESKRQDKDGKLEKPLAATVMGLIYVNPEGPNGVPDPLAAAEKIRETFGRMAMNDEETVALIAGGHAFGKTHGAASGKYLGPAPEAAGIEEQGFGWKNSYGSGKGKDTITSGLEGAWTVTPTHWSHNYLQNLFNFNWVKTKSPGGAIQWVPENSNASSMVPDAFDPSKRHAPVMLTTDLALKFDPVYSKIAKRFLDNPKEFDDAFARAWFKLIHRDMGPRSRYLGSLVPKEAMIWQDPVPPVDYKLVDANDIANLKGKNSQLGIDHIRAGQNCLGLGIHLPW

SEQ ID NO: 61174 - protein, 608 aa, Legionella pneumophila
  MISC_FEATURE (555)..(555): X=any amino acid
  MISC_FEATURE (557)..(557): X=any amino acid
NVKLPDGNVKHFEAPLTIYDVAHHISPGLAKAAIAGRVDGVLVDTSYLIKEDCSLIIVTEKHEDSLEIIRHSTAHLLAQAVKALFPSAQVTIGPVIEDGFYYDFAFERSFTPDDLSLIEAKMHELAKANLSITRRELPRNEAIQYFKDLGEEYKAKIIADIPENEALSLYRQGDFEDLCRGPHVPSTGFLKAFKLTKVAGAYWRGDSNNEMLQRIYGTAWADKKSLEEYLFRLEEAEKRDHRKLGKALDLFHFQDIAPGMVFWHPKGWTIYQELEHYMRNRLVDFGYQEIRTPQLVDRSLWEKSGHWANFRDEMFVTETENRHYAVKPMSCPCHVQIYNHGLKSYRDLPLRLSEFGNCHRCEPSGALHGLMRVRNMVQDDAHIFCTEDQIQSEVAMMLELVQSVYKDFGFTEIKYRLALRPEKRVGSDDVWDKAETALKLAMQGRNIEWVDAPGEGAFYGPKIECSLSDCLGRIWQCGTIQVDFSMPARLEASYVAEDGSKQTPVMLHRAILGSFERFMGILIEHYAGKLPLWLSPVQAIVLTISEKQNEYARKXGXLLQKRRIRANLDLRNEKIGFRIREHTQQKIPYSSVVGDKEVQNCQVAVRTL

SEQ ID NO: 61175 - protein, 491 aa, Legionella pneumophila
MNYILAIDQGTSSTRAMIYTLQGDLIANSQYPLTQYYPNSGWVEHDPEEIWQKTLNAMRDVVSQVQGKAILCCGLTNQRETTLIWNKKTGECLAPAIVWQDRRTEEFCYSLSEYSSMIQEKTGLLPDPYFSASKLNWLLKNNAQAQSLINQGDLAFGTIDSFLIWRMTKGASHATDITNASRTMLFNIHDEKWDKQLLELFSISESVLPAVYSSDNHFGVIDKEWLGVEIPITGVAGDQQAALIGQGCFNGGMVKATFGTGGFLLLNTGDKPVFSKHKLLTTIAYKIKEKTVYGLEGSIYHAGTTVKWLRDEMKLISHSAETEVLARSLDSNNGVYLVSSFTGLGAPHWLSITGTAIIGVSRSTNRAHFARAALEGVCYQTRDVLTCMRDDSQLDLTLLRADGGMAVNQWFLQFMADQCQLTIQKPKDIETTAKGAAVLAAIGSGLFDSVSSVNKIWDVENEFQPFREREVVEKDFRGWLEALSMVKARHA

SEQ ID NO: 61176 - protein, 416 aa, Legionella pneumophila
MSNTEYQTIDNKTQYINGKEKHQNHAYPEYINHSMEKYYEGRVNKSWQGKHILKGKTPTANSLIFSSNDYLNISQHPQLIKAQIAAMQKYGNGQMQSAVFLNNSSFLLSQCEKKFSSFLNYSAALLTQSGWSANVGLIQTLAKYNTPVYLDFYAHMSFWSGVKAARAKSIPFLHNSVDSLKKRIEHHGPGIIAVDSIYSTLGTISPLADYADIARKFKCLLIVDESHSLGTHGSQGKGMVAKLGLSSQIDIITASLAKALSGRGGIITGDRQLIEYIRYSSLPSIFSSALMPHDLAGFSASLEIITQEEWRRAKLQTNADFLREALSCEGINIGSSGSQIVPLVTGSEANTLWLRDELEKEDIFGAVFCSPATPKNKCLIRLSISAHHEKSDLLRVIECLVRLARKRPDIPLFKGN

SEQ ID NO: 61177 - protein, 155 aa, Legionella pneumophila
MNGKMLLMSIFNTPVGNLEVAHDEHFIFNASFTDKSGAPAQNQLAHLIASELKAYFDNPHHRFQLPLKPQGSLFQQKVWNTLLVIPVGRTVTYGELATKLQSSPRAVGQACKCNPLALFVPCHRVVGKHDLGGYMGNPNAISYKKNLLAHEAKII

SEQ ID NO: 61178 - protein, 220 aa, Legionella pneumophila
MKPTDKKHWSKIEYLHQSVKNPNIHIKGKHSYYSDAWTGSFEETVVRYLYGDEYSLQTWQPQWQIDQLYIGDYVCIAAEVIILLGGNHNHRADWFCLYPFADKYVEAYQGKGDTIIKDGVWLGMRAVIMPGVTIGEGAIVAASSIVTKDVEPYSIVAGNPAKPVKKRFAENVIERILALGIYSWSEAKFNLLKDYICSNNIDKLEQASRSYDQNHTIESK

SEQ ID NO: 61179 - protein, 383 aa, Legionella pneumophila
MRLLSFKKSKIVSIGTELEFQIIDCSSLSLVSRSKELMRALKDMRYRDQIKPEITQSMIEINSSIHQSAKEMYDELLELQKILVETAASIDIAFCGGGTHPFQQWTMQKIFPSKRFKKKFNQYRYLSKRATVFGQHIHIGCPTGDDAIYLTHALARYVPHFIAISASSPFYLGINTNYCSSRSTIFNAFPLSGVIPYLRNWQEFSDYYRKMYRWKIIENMKDFYWDIRPKPELGTIEIRVCDTPLTLRKSILITAYIQALALYLLEEKSVQLSHDLYYVYNYNRFQASRHGLEGELTVTDKDRPIPIMDDILETIKKIEQYINGLGNSEYIEELYSDVINKQNDSVLINKIYKQDGSFSKLVAAQCELWLSDSKDRKWMTQPS

SEQ ID NO: 61180 - protein, 353 aa, Legionella pneumophila
MGGQENAFTNNDYTAYYEKLDAGHLATSFELEADRMNNLLLNSEEFAKEIKVIQEERRLRTDNNPQALAFERFLATAHLTAPYNHPVIGWMNDLKQMKVEDLKKWYESYYAPNNATLVVVGDVNPEKVHALAEHYFGSIAKRPIASRKPQQEPSALGKKMVYINAPAKLPLLLIGYTVPSVKTAKNNWEPYALEIIAGILDAGESARFAKHLVRGNQVATGAEAYYNLYSRYQSQFIVYGAPSQDHQIKDLEKALITELEALKKAPVSNQELQRVKNQIIAQKTFEKDSIFGQAMELGLLETIGLGWKNTETYTKAINEITPEQIQQVAQRYFQENNMTVAELKPIRQEEVRP

SEQ ID NO: 61181 - protein, 113 aa, Legionella pneumophila
NMLEIGPGLGALTQPLLQKLNQLTAIEIDTDLQSYLTCLPAISRQLNLIPADALTVDFCQFGPHLRVVGNLPYNISTPLLIYLLKFITCIDDMHFMLQKEVVERIAAAHGTKA

SEQ ID NO: 61182 - protein, 438 aa, Legionella pneumophila
MKSRLSVLSLALITVCSVDSIRNLPAAALAGNQLFYYFALALLFFLLPCAIVAVWFSRQSEQGVYGWVKQGLGNQWAFIAIWFQCIQNVLIYPTLLSFIAGTLLYSISPDLVQNKSMLFLIIIFLIWSLTWINLKGIHLSSRFNSYCSITGLILPFIIILFVGLYWWITQVKPGTTVLPPAEPYSWTSLTAIILSFCGIELAAVHARDSKQGAFPKAIAISVITIFLTMLFGSIVLAMIIPPEQLNFISSIPQLIQLFFNKIGYGYFAFIINGLIAIGCIGAANNWLIAPIKGLEFAINEGFLNRQLSQVNKHNAPFRLLVAQAFCVSIISALFLIVPSINASYWIMLNAATQINLLMYLLLFISAIKIVSSKPILSKLNIMIPAYLGLAGSGITLIVSLTPPPSLAISSKLIYALLGAIFLVIMTLIPIWRRPRVLT

SEQ ID NO: 61183 - protein, 370 aa, Legionella pneumophila
MINKSAILALADGTVYEGLSVGASGDSVGELVFNTSMTGYQEMLTDPSYARQIITLTTAHVGNTGCNMEDMESTKVWAAGLVMRNCTAIPSNYRAEQSFPDWLSKNGVVAISGIDTRALTLKLREKGSIGACISTNVEKPEIVVAKAKSFAGLQGADLALEVTRQTIERWHEGRGMWSLDKQPQQLHVVAYDFGVKHNILRILHDKGCHITIVPAKTSAEEVLAMNPNGVFLSNGPGDPQACDYAIKATQVFLDNNIPLFGICLGFQILALACGGITKKMKFGHHGSNHPVVETTGKKRVFITSQNHGFAVDEDSLPNCLEVTHRSLFDNSLQGIRHKTKPAFGFQGHPEASPGPHDIDILFNEFLNLMK

SEQ ID NO: 61184 - protein, 382 aa, Legionella pneumophila
MNKSLIFLAIGMFTVGCNTFLIAGLLPQIGETLEQSVAVTGQGVSLFSLTYLFSAPLFSLILVNQPVKRMIQLALTVFMLGNLITLLSENIVLFLIGRSLAGAGTGIFTPLCISIAIHFTRPSAKGRILSFIWSANSAGVVFGVPAGLYLSSLFHWQLSIASLIILSLLALIGFSMQNIDIKLPKPSPFGGRLRLLIEPKTLSVIGITCFTALASLGLYSYVTLIQSGSPNSLSMTLLSWGLGGFIGSSLIGVFIDRTGKPRVIMALILVGLMFALIAIPFTRNLPYLGLIPFFMWGACGWAIVTPQQHILYELHENQGTILAAINSSALGLGSALGTLLGGLLISSGFRGIYLPFSAATLLFFVLIIQLIVINTSHKVNNI

SEQ ID NO: 61185 - protein, 627 aa, Legionella pneumophila
MLFQYIKKFFLFLWVQAVSISFLLAMASVSFAQLTAQDHAAHHQGEKESEGMGGMMKNIGTPSKELYPSLMNLPTLSPEKRLAIQQKAHQRITSGMALMKGGLNELLLASNNNDYAKMQEALEKLREGIAQYESALAALRALSEGKNPRDIALQWFKREMNLLPSTPQAKNVLGGPFFHLTIIALFGLFFLVMIWMYFFKMRRAAALLDRLTKQNATVSSETPPQFSKAPEPTPSLTSVEPIKSSQVSKVPSETAPTTPPTCPAHKCPVPQFPVMRSLTEPEEKWEGQLRVCRIFQEAPGIKTFHLASTHEVALPFTYYPGQFITLTALINGKTVRRSYTMASTPTQLHYCAITVKREEQGVFSRYLHDEIKEGDLLEVMGPNGKFTFTGEEAKSIVLICGGVGITPMMSIIRYLTDIGWHNDIYLLYCCRTTSEFLFREELEQLQERYLNLHVYASMLRSEGTIWMGLQGLFTKNIISHLVPDIASHRIHVCGPPAMMAAILGILKELKVPADLILTEAFGPEKKPEIIQEDLEAIKADTRSMISFRKSEKMVPILPDRTLLEIAEANGIAIDNACRTGQCGLCKVKLLSGEVTMACEDALSKEDKQQRLILACQAKATQNIEVDA

SEQ ID NO: 61186 - protein, 168 aa, Legionella pneumophila
MSFDELPKSDGYQEKLVSVTRTAKVVKGGRVFGFAVLVVVGDGKGKVGFGRGKAREVPIAIQKAMDQAKKNMVYIPLSGTTIFHEITWNYGASKVFMKPASEGTGIIAGGAMRAVLEVLGVQNILAKSIGSTNPSNIVRATIGALTHIGTPDYVAAKRGKTVEEVMAG

SEQ ID NO: 61187 - protein, 230 aa, Legionella pneumophila
MVFNNEVPVITLDGPSGTGKGTICHLVAKRLHWNMLDSGAIYRVLAYAARKNSIEPNDIKKLTALARSLNLRFESSADNETKVILDDENVSQQIRSEQCGQDASQIAVIPEVRAALLERQRNFAQFPGLVTDGRDMGTVVFPNAVLKVYLYASAEERANRRYLQLQDNGINVSLAQVVEELAKRDARDTARTHAPLKPAEDAVLIDTTGLTIVQVFNIVLKLIDERLNNL

SEQ ID NO: 61188 - protein, 331 aa, Legionella pneumophila
MNEYNLPLRLSRLRKNAMSRALVRETRLHAQQLIAPLFISEYLTEPKEIGAMPGQFQLGLNCIPEEIEILSKSGIPAVILFGIPKHKDAYGSESFNSNGIIQQAIKKIKSVNSDMLVITDLCFCEYTDHGHCGVLNGTQINIAATLELLGKQAVSHAEAGADWVAPSGMTDGMVLAIRQALDHASFHEIPILSYSAKYCSCLYGPFREAAQGAPQFGDRKAYQMDPANSEEAVRETRLDLEEGADMIMVKPAGFYLDIIYKLKQHFADVPLCAYQVSGEYSMIKNAAKNNLINEEQAMTESLIAIKRAGADFIISYFAKGMAELLNSQNFI

SEQ ID NO: 61189 - protein, 340 aa, Legionella pneumophila
MLRNNIPDQHLIELLKVYYGIDIHTVQLIVGGADMNAFGYKADSESNSYFVKLKYGHHDEINLSIIRLLHDSGVKEIVFPINTLEANLFQQVDHVKIIVYPFIDAPNGFTKNLTEKQWKQLGKILRQIHGTSVPTSIQQRLRKETYSPKWREMVRSFYSQIRFDESDDQITTDFKSFFNQNIDSIHQLVNSSEELSKKIRPDFEKYVLCHSDIHAGNVLVVDEESIYIIDWDEPMFAPKERDLMFIGGGIGNVWNKPHEIDCFYEGYGKTSIDKTILSYYRHERIVEDIAVYGHDLLSHDQNAQSRLESFKHFKSMFDPNDVIEIAFASYFNLLFFRIIQ

SEQ ID NO: 61190 - protein, 248 aa, Legionella pneumophila
MHDHMITFQLATHFLSRIALRLEYLFKTINEACNESHEVIHRFALKNIIEIVEIVEKPELKSRFIKELIRIEHVLKKANLLNHSELFDDLETQIHVLNHVPGRFSNKIHDDEFLKTLRQIHHPNTKECEFNSPHLVLWFDSDPLMRQKTISQWVSCLKDLEDTVKIYLSLLRGVTQYTPIRANNGFYQHSLSPKSLNHLILLRIDKKLKMIPKIQLGHHSLTIRLYELVTGQEIRDKTIEMEIAFCQI

SEQ ID NO: 61191 - protein, 380 aa, Legionella pneumophila
MGWNEPEKGKDPWSGKNQPPDLDEALKRIQDKLKKTFFGGTGKSNNNSSGGSSGGLLAVTVLLIAFILWALSGIFIVDPAEQAVILRFGKYVETVGPGPHWIPRFISSKIVMNVDRVLDYSYSAQMLTSDENLVSVSLAVQYRINDLSEYLFNVANPEESLQQATSSALRQVVGTTTLDQIITEGREVWGGRVQETLTKTLESYKTGILIVNVSPQPARAPESVQDAFDDAIKAQEDEKRFKEQAYAYAAKVVPIAEGKASRIQQEAEAYSKQVVLRAQGEVAEFLALLPQYNAAPQVTAKRMYLEAMQKVMNKSSTIIVDSKAGNLLYLPLDKLLGNQYVPQSENLKAIKNGTNVSNEEDNLILSGRDLTRPTYSQGRD

SEQ ID NO: 61192 - protein, 89 aa, Legionella pneumophila
MAETLCDELKLNKPVAKEMVENFFEELRHALENGQHVKLSGFGNFTLRDKPQRPGRNPKTGEEIPVEARRVVTFKPGLKLKTKIEKIGK

SEQ ID NO: 61193 - protein, 792 aa, Legionella pneumophila
MINIIKNRNKKNHTASTELKSKIKKEQVKLLFDQVGMAISGEALTVTILPIALWSVTNHELLIIWMIFTYVFSDLYKSMLLFYYNKQPTLFSTEKWLFLFNLGVVSSGLAWGFASSIMIPASSTLHQIFVVFLITGVTAAANSLYSPVRLSYFLFLVTAFVPFTIWLFSKGQVYLLLGFCGIIYLGIMLFISYYSNRILINTLKMRFKISNLNSTKDILEKKVADRTKELEKILALTKSTLESTADGILVVDLKGNIEFCNQQFLKMWGIAPGFIDSHNDTETIQYVLNQLKNPEEFLKQIKELYNNPKQESFDELHFKDGKIFERYSQPHWLDNKIIGRVWSFRDETLRTRLAYQANHDSLTGLPNRTALYDRLDHAINYCKRLNTSLSVLFLDIDNFKLINDSLGHDAGDILLYEFSRRLKGCIRHSDTVARFGGDEFVLLLMTTEPKDVILIAQNILKAVAQPIKLPTQEVIVTTSIGISLFPKDGIDASTLLKNSDTAMYLAKKEGRNNFQFYNNSINQQSLKRLEIQTQIHNAIKNNEFFILYQPIYNLRSGELVGAEALIRWGHPAIGLLSPDEFIPIAEETGLINQVGEWVLRNACVQNKTWQLMGLPHISISVNVSWRQLKNSNFIEIAESVLKESRLDPQYLEIEFTESTMIQKSTPIDSTLIKISQLGIKMAIDDFGTGYSNLSYLKTFPFDKLKIDRSFIQNCTTNPNDASIVEAIIAMAHSLELKVLAEGVDTIDKAFFMHQHGCDEVQGFLYGLPVKADKFVKLMQKTKIRHSKFINKT

SEQ ID NO: 61194 - protein, 340 aa, Legionella pneumophila
MKIFSLLLALLTFKAFSNPVVNVYAWGGEIPKKIIHQFEQESGIKVNFSTYDSNETMYAKLRASQKTIYDVILPSAYFVERMQKQGMLQLLDHKLLPNLHNLDEQFVKNDYDPGNRYSIPIIWGATGIFFNHNSVSNPPKNWQGLWDKKWRNQLMLLDDSREIFAIALMSLGFDPNDTNPNHIKAAYEHLLQLVPNIKLFASDSIQAIMIDEDAFIGSAWNGDAFKAHTENKAIEFIYPQDGFVIWVDCLAIPKNPPHLKEAYQFINFILKPETSAQIALKEGHAITNAAGRALLPLPIKNNPVVYPPDKTLKKGYFQRDIGEETLALYNQYWEQLKLAF

SEQ ID NO: 61195 - protein, 426 aa, Legionella pneumophila
MLDNQLLRENPQYVATQLLKRGFQFDAVTFSQLEEKRKALQVSTQSLQNERNLRSKAIGEAKSRGENIGPMREEVNKLGAILEQQKTELDEVLKQIEVISLSLPNIPHESVPVGKDELDNQEIRKWGDVPAFSFPVKSHDELGEALGQMDFALAAKITGSRFVVMKGHLARLHRALIQFMLDIHIQQHGYQEIYVPYIVNADSLLGTGQLPKFEADLFKLTGDNGYYLTSTSEIPVTNTVREMILSAEQLPIRYVCHSPCFRSEAGSYGKDTKGMIRQHQFEKVELVWITKPEDSYNALEQLTQHAEIILQRLNLPYRVVALCTGDIGAGSAKTYDLEVWLPSQNTYREISSCSNMEAFQARRMKARFRNPDTNEIQLVHTLNGSGLAVGRTLVAIMENYQDEHGNIHIPDALKPYLGGIDIISVK

SEQ ID NO: 61196 - protein, 1439 aa, Legionella pneumophila
MIKSKTFSCYIIGEANITLQCADILLAGGHKLLGIISPSNTIKKWCTANSIAYLENIKEFEKNHMDEEFDFLFSIVNSEIIPQKILRLPRYYAINYHNSPLPKYAGLYATSWAILNGETQHGISWHIMNEVIDAGDILKQPTFPINDLDTAFSLNLKCYEQGIYSFHELVEELSSHTTTSVKQNLSCRSYYGLKNKPANFGFISWEESSESIDRLCRALTFGNYTNQLEVPKIMINKEIYVVKSYEKLNISSGVKPGTVVNNSNGGLQVATGTTDILILELTDLEGRTCSMEELGSLFKMTRYSQLDTIEPAFFEKLTICPAKKPKIEKFWVNEFLKCAQEKNSFLSPLSQLDKTSCSLHDRKTVTQVPGELLAKLKKLCPEHWQIKNILLTSLLIYLYRLNNYSNLSIAFINSQLSSNDPDLNKLLSDYVPLTTQFDSTMTFMDALTFVSKEQGKLYENSTYTRDIFIRYPELHNAFNHIDVSITYITDSKAVAPCVGDKKLNFCIAEDCSWFYVNNKTNYRAHLESYAFFENMNEHLLTLLEDIVSNPDKKIFELSIISKKEKNDLLVVWNNTQCDYDYEKPIHQYFEEQVSKTPDEIAAVFENKSITYVELNRKANQLAHYLRSQGVKQDDLVGISLSRSLEMVICILGILKSGGAYLPLDPNYPDERISYMLMDSKTNLLITDQEFIKRKPHGFNGKSIEINSFLNLKNLSSENLQAINKPSDLAYIIYTSGTTGKPKGVAISHRSICNHMLWMKKEYAFKNKDVFLQKTPFSFDASVWEFFMPLLVGGKLVVAPNDAHTSPNQMIRLIRENKVSVLQIVPSMLKELVSNEEFGLCKSLTHVFCGGEALLSETINAFFKYNFSDTKLHNLYGPTEVTIDTTAYTCTAGDAKGDVSRIGKPIMNTKVYVLDAKMQPVPIGIMGELYISGDGLARGYLNNPEFTIQKFLPNPFSNNKNDRLYRTGDLVKWNSNGVLEYHGRCDNQVKIRGYRIEINEIESYLEKIPSIHQCIVKPEKNQDDSMSLSAYLVLEKNSQISAVDIRAILKQNIPEYMIPARFYIVDKFFSTPSGKIDRKMLPIPSKRLRSGTNYAPPNNPKEQLLHNIWCSVLKIDNLGIYDDFFELGGNSLSAMNIISHIREQFSLTLSVRTLFDFPTISSLSKAIENIYHKKTDCIYNQSSGNHIIPLRTEGEKTPLFLVHPIGGSVFWYKLLGQYFDKDRPLYGIQDPGLDRNELIFSNLEEMASAYVHSIQAIQPSGPYILGGASFGCTVAIEMAKQLEEKGETVISIISLDGWAFYPSLQNNELYFQEVMKEQNSRILKKYIENNVSNSKFLLELQWHRENMLTQYKMPIIKPKFILFKAKKLTEMFQYNASLNWWENYTSQPIELHLTPGDHESMFYEPNIKILATKLNDSLNEQDIKHYQFNDTLKDSFIDQL

SEQ ID NO: 61197 - protein, 505 aa, Legionella pneumophila
MKHGLFAHLKHDLPASIVVFFVALPLCLGIALASHVPLFSGIIAGVIGGVVVGFISGSALGVSGPAAGLVAIVISSVETLGSWEAFLLAGVIAGILQLIAGFLRGGIIAYYFPSSVIKGMLTGIGIIIVLKQIPHLLGHDVTPLLLSMSDGELDINDIREALDDINPEVVIISIVSLLTLIFWEKLVKKHKLFEMIQGPLVVVILGIALNLFYEHRLTSFSLDPSELVQLPKFNKASELFNYLTLPDFSLITHLKIYKIAILIALIASLETLLCVEAVDKLDPYKRVTSTDRELKAQGVGNILSCLIGGLPITQVIVRSSANVAFGAKSKLSAILHGLLLFICVISIPEILNEIPLASLASILIIIGYKLAKPALFKQMYKMGWEQFVPFMITIIGIIFSDLLFGITLGFSLAIFIILRHHFLNSHDMIKTRGKNKTQYCLKLAEEVTFLNKGSIINELKNIPEGAEVVIDGSRSKIIDHDIKEVIQNFILNSKTKNIQVKLIGI

SEQ ID NO: 61198 - protein, 467 aa, Legionella pneumophila
MTEVFTIKQCLDGEISIDETVTVRGWVKTRRDSKAGLSFISLHDGSCFSPIQIVATDQLSNYHKEVTKLTAGCSMIATGKLVASQGKGQFFEIQAESIEVVGWVENPDTYPIQAKRHTLEFLREVAHLRPRTNTISAVTRVRHSLAQAIHRFYHEQGFFWVHTPIITASDCEGAGEMFRVSTLDLLNIPKNDKGQIDFSKDFFGRETFLTVSGQLNVEAYCMAMSKVYTFGPTFRAENSNTSRHLAEFWMIEPEIAFANLEDICKLSQNMLRYLCKTVLEERADDMDFFNQFVAPGCIERMEHIADSEFEIMTYTDAIKALEASDQKFEFPVSWGLDLQSEHERYLAEVLCKKPVIVTNYPQEIKGFYMRLNDDGKTVAAMDVLAPGIGEIIGGSQREERLEILDRRMDECNLNKEHYQWYRDLRRYGTVPHAGFGLGFERLISYVTGVSNVRDVIPFPRTPGHADY

SEQ ID NO: 61199 - protein, 328 aa, Legionella pneumophila
MKLLRGSTHFAIFDKGAVATIGNFDGVHLGHQHLIKTLRAKADEMNLPLVILLFEPQPKEYFHREKAPARLSTLREKIDVLNLCQVDYIYCIKFDARLAQTPALYFAQFYLFEALKIRYLLVGQDFRFGKSREGDVNLLKTLGANYSCEVTVQSDFLIENEKISSTRIREALQQGNLRFAAKLLGRPYSMCGRVIKGDGRGRQWGIPTANLGMHRLSIPLQGVYAVQVHINSNVFYGVANIGKRPTVAGTKNILEVHLFDFHGSLYGQLVQVIFLHKLRDEVKFSSVEALITQINSDIILAKAYLKQNWLDSVIDSSNDVANGINNTV

SEQ ID NO: 61200 - protein, 206 aa, Legionella pneumophila
MAIVAKRTIMSLFSDVDDVYSHQVRIVLAEKGVNVEILAVKQDEPGADLLSINPYGTVPTLIDRELVLYEARIIMEYLDERFPHPPLLPVYPVARAEARKMMHRIEQDWYYLMNAILREESVEQARANLLESLTSLDPVFADKPYFLSDEFSLLDCALAPLLWRLPKLGLEIAPNFKGIISYMQRVFKRDSFQTSLTDAERQIRAA

SEQ ID NO: 61201 - protein, 488 aa, Legionella pneumophila
MEIYKMYIDGKFTLAKSGATRDIFDPANGDLIAKVPESAKEDAILAIKAARKAFDEGEWRKSLALDRGKLLFKLADLIRANAKMLAELETRNCGKPLLEAEFDVTDAANCFEFYGGLATKIHGETMSVPANSFSYVVREPIGVCGQIIPWNFPLLMAAWKLAPALAAGNTVVLKPSELTPITALELFKLIDECGFPAGVVNLITGPGIGVGEELASNAMVDKVAFTGGSATGRKIMQAATGNLKKISLELGGKNPNIVFADSDLEMAIDGALFGAFANQGEVCSAGSRLLVERSIHKKIVEGMLKKIPNIKLGHGLDAGVKMGPLVSSAHREKVESYVKLGMEEGAKLLCGGKRPTGNEFAKGHFFEPTIFDEVKSTMRIAREEIFGPVLVVIPFDTEEEAIRIANDTDYGLSGAVWTKSVTRAHRVTSQIRAGILWVNHYHPTYNEMPWGGYKQSGAGRELGLYGIESYLEVKQVNINLDETPIGWY

SEQ ID NO: 61202 - protein, 535 aa, Legionella pneumophila
MSSDKTLNVKATGIIALAVMCSRVLGLIREVLFNALFGSASMGIFLIAFRAPNLLRDLFAEGALSVSFITVFSKKIETEGEKSAWQLASKMLTLTSVFMSILCLFGIIFAKYLIFILAPGFSVKDAETTIFLTQLMFPFILLVSLAAIVMGMLNSKNVFGMPALASSFFNIGSILGGALCGWFIDPSFGERALIGLAIGTVIGGLLQLGVQFPSLRKVGFYFKPNFHWYDSGVRNTLILTIPAVIAASAVQINVLINSGFASYLGKEAVTWLNSAFRLMQFPLGVLGVAIATITLPVVSRLAATNNHSQFGSTLARAIRLAVFLTMPAAVGLWFFATPIISLIYEHGKFHASDSLQTAYALQFYALGLVAYSCIKVLSPAFYAIDKKWTPMIVSFATIILNIILNYFLIFKLSMGHRGLALSTTVSATVNFLVLYVLMTRLHNLQNRYLFNTILRCVLASAILGFMCQSIFAYGADFLYHPSFWIRAVSLAISISFAVLVYLSMCVILRVDEAKSIFMIIRHRLGFPIKFKSKQV

SEQ ID NO: 61203 - protein, 460 aa, Legionella pneumophila
MLDLQISKKTVDPLKRPPHSVEAEQSIIGGLMLDNQVWDKVSNKLCETDFYRTEHRILFRAISALAKKDQPFDVVTLLDALKTRNELDDAGGEAYLFELANNTPSVANVTAYADIVREKSVQRQLIAVATEIADSAYNPAGREVPELLDMAETKVFAIGEQTASDGGPENIKSILVRAVEKIDALYHNGDAITGLATGLSDLDEMTSGLQPSDLIIVAGRPSMGKTTLVMNMAEHAAIKAGKPVLVFSMEMPADSLAMRMMSSLGRIDQHRIRTGKLDDNDWPRVTSAVHMLSEAPLFIDDTPALSPGEMRARARRLAKEHGSLGLIVVDYLQLMKVPGFNADNRTAEISEISRSLKSLAKELQVPVIALSQLNRSLEQRADKRPVMSDLRESGAIEQDADLICFIYRDEVYNEDSPDKGTAEIIVAKQRNGPIGKVRVAFLGKYTRFEDLAFNGYQGVE

SEQ ID NO: 61204 - protein, 735 aa, Legionella pneumophila
MAHNHHEGHSHVHNEHLCCHKKDNAHKPQIISDGTIFYTCPMHPEVRQATPGICPLCGMALEPEAISIGEATNPEYLDMKHRFWVALILTLPVVILEMAGHGFQHFVSTGISNWIQLLFATPVVLWCGWPFFLRGWQSLKTRRLNMFTLIAMGIGVAWIYSVVAVFFPGLFPAAFRSQEGVVSVYFEAAAVIATLVLLGQVLELKAREQTGSAIRALLKLAPENAHRIKEDGSEEEIALNQVEVGDSLRVRPGEKIPVDGEIQEGRSFIDESMVTGEPMPVAKGIGDKVIGATINQTGSFIMKALHVGADTMLARIVQMVSDAQRSRAPIQRVADTVSAWFVPAVILVAVLSFITWGLLGPQPSLGYGLIAAVSVLIIACPCALGLATPMSIMVGVGKGAQNGVLIKNAEALERMEKVNTLIVDKTGTLTEGHPKLTHIETSEDWDERQALLLAASLEYHSEHPLASAIVKAAQEMQIAFISVQNFEAPTGRGVVGRVNSHHVAIGNAKLMHEYGSDDTSLFEKADKFRAKGSSVMFMAVDGKTVAFLVVEDPIKSTTAETIHALQKKGIEIYMLTGDSKKTAEAVAATLGIKNVIAEIMPEDKGRIVSELKGNGLIVAMAGDGVNDAPALAKADVGIAMGTGTDVAIESAGVTLLHGDLSGIAKARYLSESTMNNIRQNLFFAFIYNMLGVPLAAGIFYPLTGLLLNPVIAAGAMALSSVSVIVNALRLRRVTL

SEQ ID NO: 61205 - protein, 295 aa, Legionella pneumophila
MSSYCGYIALVGRPNVGKSTLLNRILQQKLSITSRKPQTTRHSILGIRTEGEFQFVYVDTPGIHQGNAKAINRMMNKTAISVLRDVDVIAFLVDGTHWKDEDEYVLNLIKQAKVPCILVVNKVDKITDKTQLLPWIEQISQRYQFAAIIPLSAKTGLQVDELEGKLKNYLPEGPHLFPDDQFTDRSTKFLCAELLREKIFRFCGQELPYSVTVDIESFKDEGNLIRIHALILVDKDNHKRMIIGDKGQKLKEMATNARLDMEKMLDKKVFLQCWCKVKSGWSDDERILKQLGYDQ

SEQ ID NO: 61206 - protein, 169 aa, Legionella pneumophila
MNNKTNWVIIGRFGRPHGIKGFVTVHSFTDPADNILRYNDWHVFLNKQWQPLKLLTIEVRSKAIIAQIEGYPKRELVSALTNLDIGVQESQLAALAPGEYYWYQLIGMSVINSKGDLFGKVVEIMPTGSNDVLVVEGEKRHLIPYLPGQFVINVDESQQVITVDWDMNF

SEQ ID NO: 61207 - protein, 586 aa, Legionella pneumophila
MKAIIEYLLKQALINLQQSGEMPIDLEIEIKVENAKDPAHGDYATNLALVLAKPCRQAPKVLAERLVAVIPVDPSVEKIEIAGAGFINFFMRSTARSLIISEILNKGKEFGRGNLGQSQKVLIEFVSANPTGPLHVGHGRGAAFGATLGNVLKAAGYDVTLEYYVNDAGRQMNILAVSVWLRYLELAGEPIVFPANGYKGQYVYEIAQEIWSEQGNQFVHPWISVVENLPADEPEGGDKETYIDAIIARAQSLLGKDGFANFHQHALKTVLDDIKDDLQAFGVRFDSWFSEQSLFEDGSIEKGIQALKDRGHTYEREGALWFRATDFGDEKDRVLVRANGQTTYFASDVAYHWNKYDRGFDRVIDIFGADHHGYVTRIKTAVKALGHDESALDVILVQFAILYRGGDRVQMSTRSGSFVTLRELREEVGNDAARYFYVARKPEQHMDFDLDLAKSESSDNPVYYIQYAHARICSVLRQLKERGLKWDKDMGLKNLDLLEQQHEATLISLIARYPEVIQSAAASCEPHQLAYYLRELANGLHSYYNAIQLLCEQEQLRCARLCLLESVRQVLNNGLAILGVSAPESM

SEQ ID NO: 61208 - protein, 237 aa, Legionella pneumophila
MINDFKLHTNQVNIETLHFIFKVSMRTSSFLDRLIGEVDSALRTLVLPQKRITTRQSPAENLADTVLSAQEKKHISGLMRLNHAGEVCAQALYQGQALTARFTHIKEQMASAAAEEVDHLAWCEERLYELGSKPSLLNPIWYCGSVLLGALAGLAGDKVSLGFVAETERQVTAHLQRHLHYLPEKDKKTIAILKRMQEDEEHHAHTAMEAGAVELPYIIKQLMNAVSKLMTQSSYYI

SEQ ID NO: 61209 - protein, 248 aa, Legionella pneumophila
MSSERLQKILSQAGLGSRREMERWIDNGWVQVNGKPAKLGDSAGPSDKISVKGKLIPNPLKSKQNIRVLLYHKPVGEVSSRHDPKFEKTVFDNLPHLRQGRWVQVGRLDLNTSGLLIFTNNGELANQLMHPKYGLEREYAVRVHGQVSQESLNNLLKGVMLDDGLAKFTKIQFRGGEGTNSWYHVTLNEGRNREVRRLWESQGVEVSRLIRIRYGMLTMPRFLSRGQFYELTPKEVTEFLDSLPNELS

SEQ ID NO: 61210 - protein, 3217 aa, Legionella pneumophila
FDDDGPSVTMAVSDNNAITLNTQDAETIGVLSDTDSASFAAAFAVTPNYGADGAGTTVTTYALSVSAQGVDFGLDNNGNNIYLYNIAGSVVGSTSATQAGITTGNTIFSLDVNSSSGVVTLTQHQEVDHGLPGASSNYAAQEAILNTGLVFLNATAVTTDGDGDTATASASLDLGGNVKFDDDGPSVTMAVSDNNAITLNTQDAETIGVLSDTDSASFAAAFAVTPNYGADGAGTTVTTYALSVSAQGVDSGLDNNGNNIYLYNIAGSVVGSTSATQAGITTGNTIFSLDVNSSSGVVTLTQHQEVDHGLPGASSNYAAQEAILNTGLVFLNATAVTTDGDGDTATASASLDLGGNVKFDDDGPSVTMAVSDNNAITLNTQDAETIGVLSDTDSASFAAAFAVTPNYGADGAGTTVTTYALSVSAQGVDSGLDNNGNNIYLYNIAGSVVGSTSATQAGITTGNTIFSLGVNSSSGVVTLTQHQEVDHGLPGASSNYAAQEAILNTGLVFLNATAVTTDGDGDTATASASLDLGGNVKFDDDGPSVTMAVSDNNAITLNTQDADTIGAASDSDSASFAAAFAVTPNYGADGAGTTVTTYALSVSAQGVDSGLDNNGNNIYLYNIAGSVVGSTSATQAGITTGNTIFSLDVNSSSGVVTLTQHQEVDHGLPGASSNYAAQEAILNTGLVFLNATAVTTDGDGDTATASASLDLGGNVKFDDDGPSVTMAVSDNNAITLNTQDADTIGAASDSDSASFAAAFAVTPNYGADGAGTTVTTYALSVSAQGVDSGLDNNGNNIYLYNIAGSVVGSTSATQAGITTGNTIFSLDVNSSSGVVTLTQHQEVDHGLPGASSNYAAQEAILNTGLVFLNATAVTTDGDGDTATASASLDLGGNVKFDDDGPSVTMAVSDNNAITLNTQDADTIGAASDSDSASFAAAFAVTPNYGADGAGTTVTTYALSVSAQGVDSGLDNNGNNIYLYNIAGSVVGSTSATQAGITTGNTIFSLGVNSSSGVVTLTQHQEVDHGLPGASSNYAAQEAILNTGLVFLNATAVTTDGDGDTATASASLDLGGNVKFDDDGPSVTMAVSDNNAITLNTQDADTIGAASDSDSASFAAAFAVTPNYGADGAGTTVTTYALSVSAQGVDSGLDNNGNNIYLYNIAGSVVGSTSATQAGITTGNTIFSLDVNSSSGVVTLTQHQEVDHGLPGASSNYAAQEAILNTGLVFLNATAVTTDGDGDTATASASLDLGGNVKFDDDGPSVTMAVSDNNAITLNTQDADTIGAASDSDSASFAAAFAVTPNYGADGAGTTVTTYALSVSAQGVDSGLDNNGNNIYLYNIAGSVVGSTSATQAGITTGNTIFSLDVNSSSGVVTLTQHQEVDHGLPGASSNYAAQEAILNTGLVFLNATAVTTDGDGDTATASASLDLGGNVKFDDDGPSVTMAVSDNNAITLNTQDAETIGVLSDTDSASFAAAFAVTPNYGADGAGTTVTTYALSVSAQGVDSGLDNNGNNIYLYNIAGSVVGSTSATQAGITTGNTIFSLGVNSSSGVVTLTQHQEVDHGLPGASSNYAAQEAILNTGLVFLNATAVTTDGDGDTATASASLDLGGNVKFDDDGPSVTMAVSDNNAITLNTQDADTIGAASDSDSASFAAAFAVTPNYGADGAGTTVTTYALSVSAQGVDSGLDNNGNNIYLYNIAGSVVGSTSATQAGITTGNTIFSLGVNSSSGVVTLTQHQEVDHGLPGASSNYAAQEAILNTGLVFLNATAVTTDGDGDTATASASLDLGGNVKFDDDGPSIAVVAASDALVVDESFLATDASANFVDNFTSSYGADGAGNITYALGINAGSTGLKDTATNEDIKLVNNGGVIEGRTVTSNALVFKVSVDASGVVTLDQQRAIVHSPNTGPDQAKTLNAANLITLTATITDKDGDSSSATLNIGQALSFKDDAPVASDITRSGAASEVADTNLMLILDTSGSMAGSGIQTLINSTLELLEQYEALGNVKVRIVTFNTSATAVGSGWMTVDAAKNAILGLTAGGNTNFDAALITAMNAFNSGTVGGADGRIAGAQNVSYFISDGNPTVNQDWPSIPGTLTQNGIQPSEQAAWEAFLQDTNGASAGGERIRSYALGMGTGIDVNNLEPIAFNGVNGANIPAVVVTDISQLADVLVNTITAGPISGTIISDPNPGVSFGTDGGHIQSITVNGITYTVSTDLGSVSTSGSATQGSNTYSYNNSTHVLTVTISTGESFTIDMDDGSYTFTPPANITNAINRIINYVLVDNDGDTSAAAITININLPGTNDPLVVRDDLILTNQPAVSGRDVISIPTWALLANDTGGNGVSSVSSVTQPVAEGTVVLNAGSVAFTEESNSAADGTYNGSTSDPFRYTNTTGSQSATAKVDLDRAQAGENTLDGTYRSEILLGRDTSNDTIIGNDGNDILIGLGGDDTLSGGNGDDILAGGAGNDTLDGGAGNDTATYIDATAGVTVSLNTGSAQNTVGAGTDTLTNIENLTGFKFNDTLTGNNSANTIKGLEGNDTISGLGGNDTLDGGSGDDVIIGGLGDDILTGGSGADQFVLVKGQGGASAGAAPIDTITDFEVNIDKIVINGNNITGVSVSTPVSNTYTITVNYSDAATEHFKMTLSNGALLNDSGKTHLNGVVISGGTATIDGTIVGAVLYLDLNANNQEDEGERLGITDQYGHVEWVVDLSKFDVNGDGQYVIGEARAVQTGGFDIDTGLSYEINLYGPVGSAVISPLTSLLQAQLEAGMDYETANAALVARLGLPEGTQIISFNPITGSGEVLAQNAGVMTAAIQFAEIAAIHYSTDEGHVSFVVFEAISKALLELPEGVVADFGDEGFLQSISNYLGLDALVTSDMIDYMATSQKALEASILTLAPGEDALTAISKIQHVTQGIYAQAIEMALIGYLPLDALKNMSAVLKAYADGDITDEQLNSFEDKLSAVIVNWEDNNVTDTSHQATLQTERIVDDSSVKSEANHEMAQEVNAVINDFMDEHNISLYYYDQQAQMPQEVQEQQPTEDQAEETVMHDDVVQDLLLDDHSLTMLANNPQLNGGNGNDVLHGTTGNDFIRGGQGNDTMTGGGGVDTFFWLSGDDDGGVDTITDFKANPVDQSSDASVLNLSDLLSDADLETNSLDNYLNVSTTEEGDTAIKVDPNGNGNFDAPAQTIILEDVDLTAVFATNNSHDIVNQMIANGNLIVEQ

SEQ ID NO: 61211 - protein, 317 aa, Legionella pneumophila
MKNAVINGTGSYSPERQMTNAELETMLDTSDEWIVTRTGISSRSVAQEHETTSYMASRAAEQALEASGLDAEEIDLILVATCTPDYFFPSVACHVQHALGIKRPIPAFDIGAACSGFVYAMDVAKQYIATGAAKHVLVVGSESMSRAVDWTDRSICVLFGDGAGAVVLSASDRQGIMGSVLHSAYDSDKLLVLRNSTFEQDRATIGMRGNEVFKIAVNIMGNIVDEVLEASHLKKSDIDWLIPHQANIRIIQAIAKKLSLPMSHVIVTIGNQGNTSAASIPLALDYSIKNNQIKRDEILLIESFGGGMTWGAMVIRY

SEQ ID NO: 61212 - protein, 672 aa, Legionella pneumophila
MNNYKHWDLQRDKDAILWLGLNRRDAAVNSINEEVLDELNSLLHEISHDKKAMGLIIYSLKEKGFIAGADVNAFSQFESSSQAVDFLQKGQTVFARLQALSIPSVAMIDGFCMGGGYELALACTYRIATDDKDTRIGLPEVMLGIHPGWGGTVRLPQLIGGFKALSQVILTGSAIPAAKAKSLGMIDEVVPVRQLRRAAVYFIKNKPPRHRASFIESLTNSSLLRKAIAYLLRYNVAKRVRKEHYPAPYAVIDLWEKEGGVGERAYLKEVDSIEKLVSQNDTAKNLIRAFLLRERLKGFAKDSHFKATHVHVIGAGVMGGDIAAWCALRGLQVTLQDKSYEQIAPAIGRAHKLYSKKLRKPRLIQAAMDRLIADPHGHGVKRADVIIEAVFENLVVKHEIMKTVEKNAKKDAIIATNTSSIPLDEISSVMSKPERLVGIHFFNPVAKMDLVEIVSSSSTTKKVQQSACAFVNQIGKLPLPVKSSPGFLINRVLMPYLMECVQLLDEGYSAETIDEAALQFGMFMGPVELADTVGMDVCLAVAENLTSHFGGTIPQRLRDLVKEGKLGRKTGEGFYKYKNGKVIKKKAPSHVDKTIADRLILRMVNESAACIREKVVEDSDLLDAGMIFATGFAPFRGGPMNYANDFGKDKLETLFKTFESKYGERFKVDTSL

SEQ ID NO: 61213 - protein, 293 aa, Legionella pneumophila
MKNRLRLALQKKGRLSDESLNLLQRCGLKFRIKPNALLTHVDNFPIDLLFVRDDDIPTLVFDSLCDGGIVGENVLLEASFNRPDKAYRKILALGSCTCRLSIAVPEAFDYQGAGSLDGKRIATSYPNLLNNYLAERKISAEILTLSGSVEVAPRMGMADVICDLVSTGQTLEDNKLKEVDTVLNSQAVFIQTQRQLDPDIQELFAMLARRIQAVQQAQERKYIVFHAPKSALERIAQKLPGAESPTILPLPGNNEKVAVHVVSSEGVFWNTLETIQYLGASSILVLPIEKMLE

SEQ ID NO: 61214 - protein, 426 aa, Legionella pneumophila
MVVDKIQAIRGMNDVLPDSTSIWRFIEQTFINCLVRYGYKEIRFPIVENTQLFKRTIGEITDIVEKEMYTFNDLNGDSITLRPEGTAGCVRACIEHGLLHNQQQKLWYLGPMFRHERPQKGRYRQFNQFGVEALGITGTGIELELISICRRLWIDLGFSQSVQLQVNSLGEINERQKYRSILVEYLRDHFQILDEDSKRRLDKNPLRVLDSKNPDLQQLIQNAPKLIDVLGDDSREHFQSFCNGLETLGIPYSINPVLVRGLDYYGQTVFEWVTDQLGSQATICAGGRYDMLVEFLGGAPTPAVGFALGLERIFLLMETLNLLNESNNKQSIFIIATNEEAILKALVMAESIRNAHPSLDVITNTAGGGFKSQFKKADKSGARLALILGEDEIAKEYVSIKDLRTEIEQISIPMTKINEFLQDYLA

SEQ ID NO: 61215 - protein, 57 aa, Legionella pneumophila
CEKAGILTELRRREFYEKPTAERKRKQAAAVKRHLKKISRDVSSRRGVGHRRKKSTT

SEQ ID NO: 61216 - protein, 458 aa, Legionella pneumophila
MFDNLTERLTRTFKNLRGQGRLTEDNIQHALREVRLSLIEADVALPVIKEFIEQVKQKSLGQEVLTSLNPDQAFIKIVHDELIHVMGNERVELDYKTQPPAVFLMAGLQGSGKTTSTAKLARYLKETENKKVMMASVDVYRPAAIHQLKVLAEQIDVAFFDSDPNEQPIKIAQKALESARKQYVDVLILDTAGRLHVDEDMMSEIKSLHKAVNPIETLFVVDSMTGQDAANTAKAFHEALPLTGVILTKTDGDARGGAALSVKQITGKPIKFIGSGEKIEALEPFHPERIASRILGMGDILTLIEEVERKADKQASEKLAKKLKKGKGFDLEDFKQQLLQMNNMGGISGMMSKLPGVGQLPKQAMQQVNDKAMAQTIAIINSMTPKERRIPKIIVGSRKKRIALGSGTQIQDVNRLLKQFEQMQKMMKKFTKPGGMQKMMRGIGGMAGLKGMFPDDLK

SEQ ID NO: 61217 - protein, 318 aa, Legionella pneumophila
MNEFTLIDHYFKSIPCKRNDVLFGIGDDAACLQVPDGMHLLVSTDTLVSGIHFLPQWDPYDIACKAVMVNISDMAAMGAQPCWVTLALTLPELNQSWLDSFARGIKDSLGLYNVDLIGGDTTKGPLSITLTIMGLTPQGQAIRRCGAQAGDAIMVSGELGAAGLAVKLLDEHKKVNAKDKVELMNKLLHPKPRVDLCHLLRKYATSAIDISDGLGADLNHICAASGVGANLFEEAIPRHPLLNQYCPEQALDLALSGGDDYELCFTVSIQQLDSFNRDLQKENLICFPIGVIEEKPGLRIQSADSPSKELQPRGYSHF

SEQ ID NO: 61218 - protein, 375 aa, Legionella pneumophila
MNKSNLAMNKLTRYSQQIKMEEIGLDGQEKLKNSRVLCIGLGGLGSPLLLYLAAAGVGVLGIVDDDIIELSNLHRQILYNHTHINKKKAVTAKKQLLAINPLIQVESYSSRLTEENAAELITQYDIIADGTDNFYTRYLIHSICFELEKPYVYASASGFQGYCSIFHGKQDPCLHCIFPVSVSDINIPNCEGAGVIGTLPGMLGIIQATEIIKWILQIGNPLKKRLLTINLLTMTFKNIIISRNPDCEFCIQNQSIRQLINPVNCSAQIEPCHHRITLDEFYQLFTNNKNIHLIDVRSTKEHQIQNIGGIVLPLDELPQRLHELNPNRLIILYCQSGTRSKMALDILLKAGFASVKYIENGLKGVTDNYNKDMPQ

SEQ ID NO: 61219 - protein, 219 aa, Legionella pneumophila
MASFNKALSLGCRFIEFDVMCSLDGEPFIIHDDNLKRTTNGKGEVGLMEADYLRGLDAGSWYSKQYKGEKIPHFTDVLKWLSFSDVQANIEIKPYPGTVEQTTVSVLSHIHRHWPQNKELPLVSCFEWDALVLCRSIAPEMPLGLLLHEWDKDWLQKAKQLECYSIHFNRKILTADRVKAVKDQGYVVCAYTVNRKRLAKKLFDWGVDALFSDYPDLLK

SEQ ID NO: 61220 - protein, 276 aa, Legionella pneumophila
MNSLQDLIEQAFENRQNLSLDTASSDLINAINEVLSGLDNGQFRVAEKINGEWTVHQWLKKAVLLSFKLFPNQIIDAGFCKFYDKIPLKYTDCSNEQFQQSGVRVVPHAMVRRGAYIAKNTVLMPSYVNIGAYIDEGVMVDTWATVGSCAQIGKNVHISGGAGIGGVLEPLQANPTIIEDNCFIGARSEIVEGVIVEKNSVISMGVFLGQSTKIYNRITGEVSYGRIPAGSVVVAGNLPSHDGSHSLYCAVIVKQVDEKTRAKVSINDLLRANQDD

SEQ ID NO: 61221 - protein, 495 aa, Legionella pneumophila
MSKLQIIQSKGQYINGEWIKGNGLILESTNPASGTLLWQGNNATDEEIANACYVAHRALKSWANTSFEERARYTKAFVEQVEKNREQLARLISLETGKPLWESQTEVSSVIGKVNLSIQAYQERTWPKQTETAEANACLRFKPHGIVVVLGAFNFPAHLSNGHIVPALLAGNTVLYKPSEHTPAVAELIIQCWHDSGLPPGVINCLQGNANCGNTLLSQDIQGVYFTGSYATGLRIHQQFCNRPEVILALEMGGNNPLVIDEVKDIDAAVYHTILSTMITAGQRCTCARRIIIPDSQTGDLFLERFAKACKLMRIGSFDSQPEPFIGPVISHVQALKHLHAQKQLIEMGGEIILPMSLLLEYTGLVSPGIIDMTRAKNPPDEEIFAPFAQIYRYNHFDEAIQLANQTRYGLSAGLLSDNKDHYQQFYQNIRAGLINWNRPTTGAASSLPFGGVGCSGNHRPSAYFAADYCAYPVASMEQPLLTTPVQRLPGLVLE

SEQ ID NO: 61222 - protein, 401 aa, Legionella pneumophila
MIVQDSVCSELMRGCEEILPVPELEKKLQKGIPLKIKAGFDPTAPDLHLGHTVLLNKLRQFQQFGHEVIFLIGDFTAMIGDPTGKNVTRMPLSQETVLENAKTYQHQVFKILDPDKTTVAFNSQWLNKFNAVDLIRLAATHTVARMLERDDFNKRYTTGQPIAIHEFLYPLLQGYDSVALKADVELGGTDQKFNLLMGRELQKHYGFEPQVVMMTPLIEGLDGVKKMSKSLDNYIGINETPEQMFGKIMSVSDELMWRYIDLLSFKTGKEIQQLKQSVLEGKNPRDVKIDFAKEIVARFHDQTQAEFAHNKFIERFQKGNIPEDLEELSLVIAEPIALAQLLKQIDLTASTSESIRMVKQGAVKVDGDKISDPSLKLPIGKSYIIQVGKRRIAKLSIQQAD

SEQ ID NO: 61223 - protein, 736 aa, Legionella pneumophila
MKHDHHQGHTHSGKGHACHHEHNSPKTQQASSKMEGPIVYTCPMHPEIRQSAPGHCPLCGMALEPETVTVSEVVSPEYLDMRRRFWIALMLTIPVVILEMGGHGLKHFISGNGSSWIQLLLATPVVLWGGWPFFKRGWQSLKTGQLNMFTLIAMGIGVAWIYSMVAVLWPGVFPHAFRSQEGVVAVYFEAAAVITTLVLLGQVLELKAREQTGSAIRALLKLVPESAHRIKEDGSEEEVSLDNVAVGDLLRVRPGEKIPVDGEVQEGRSFVDESMVTGEPIPVAKEASAKVIGATINQTGSFVMKALHVGSDTMLARIVQMVSDAQRSRAPIQRLADTVSGWFVPAVILVAVLSFIVWALLGPQPALSYGLIAAVSVLIIACPCALGLATPMSIMVGVGKGAQSGVLIKNAEALERMEKVNTLVVDKTGTLTEGHPKLTRIVTDDFVEDNALALAAALEHQSEHPLANAIVHAAKEKGLSLGSVEAFEAPTGKGVVGQVDGHHVAIGNARLMQEHGGDNAPLFEKADELRGKGASVMFMAVDGKTVALLVVEDPIKSSTPETILELQQSGIEIVMLTGDSKRTAEAVAGTLGIKKVVAEIMPEDKSRIVSELKDKGLIVAMAGDGVNDAPALAKADIGIAMGTGTDVAIESAGVTLLHGDLRGIAKARRLSESTMSNIRQNLFFAFIYNVLGVPLAAGVLYPLTGLLLSPMIAAAAMALSSVSVIINALRLKRVTL

SEQ ID NO: 61224 - protein, 67 aa, Legionella pneumophila
MADTEGGEGATWSKSLKVGRSPDWSLQLDSMKSESLVIANQHVAVNTFPGLVHTARHTMGVGCTRSR

SEQ ID NO: 61225 - protein, 112 aa, Legionella pneumophila
MDINQNLGNLMKEAQKMQQRMQEAQQQLSQLVVSGESGGGMVTIKMNGRHDVTEVKIKPTLMDEDIEMLEDLIAAAVNDAVRKIEKASKEKISQLTAGLNIPTDLMGDKEGE

SEQ ID NO: 61226 - protein, 294 aa, Legionella pneumophila
MIDKYTQRHELYLEQLLNEIIIPAPQIRSALHYALFSGGKRIRPILVYLAGDLIDVDQGVLDIIAAALELTHCYSLIHDDLPAMDNDDLRRGKPSCHKAFDEATAILVGDGMQALAIEVLLMRLSPLLPAAQVVAITQVLVNASGISGMVSGQSLDLSELAKSSVTEEQLREIHLLKTGKLILACFEMVLAAQHEVSEQIKSALRTYGKHIGLVFQMQDDYLDLYAPTQILGKGRSSDQANQKTTFATLFNKQQLEEEIAVHYQIAMDSLRLFGSKAAALIELTKQLQNRSNLS

SEQ ID NO: 61227 - protein, 156 aa, Legionella pneumophila
MRHSPRKRFGQNFLQDKYIINEILRAINPLADDNMLEIGPGLGALTQPLLQKLNQLTAIEIDTDLQSYLTCLPASQGKLNLIPADALTVDFCQFGPHLRVVGNLPYNISTPLLIYLLKFITCIDDMHFMLQKEVVERIAAAHGTKAYGRLSVMGML

SEQ ID NO: 61228 - protein, 322 aa, Legionella pneumophila
MINCKKSIITLCFVLMLPFASWAEAPVIDDSENFAMIDRQEEYEAPLVNPKYDNPQIENAELDGSQNDNYSTDTSQSYDEPALVKEDRSTISDNAKLIDKIQQLQKEIQELRGQLEVQAHDLKLLQQQQVAFYKDLDSRLSNSSTSAKTVQNDKPATDISLGSNSPETLKVASPQIKAGSSNGKPQPVVAVSRANPADEQISYLAAYELVKNKRYDEAIKSMQTFVQKYPRGGYTANAEYWLGELYLVKKDYSKAIEHFEIVLQQYPSSSKAAASLLKSGYAYAEKGDKQEAKKRFQQVVKTYPDTPTAQLASSKLEAINAL

SEQ ID NO: 61229 - protein, 178 aa, Legionella pneumophila
MKSLGLDFLVVPSNCNEEEIKTRHNSVELVELGITLAKIKALDVSQHYPEHYIIAADQLCVADKRVFNKPLNHQTAVSHLRELSGKQHQQIACLCIVKESKILWQYHETATLTLHHLSEKTIEAYLQAEKPYQSCGAYQYEGLGKWLFKEVQGSEDTILGLPLMPLVNALVNLKVVGI

SEQ ID NO: 61230 - protein, 372 aa, Legionella pneumophila
MSSKSGGLAGVVAGQSAIATVGLAGKGLNYRGYSINDLAEYASFEEVAYLLHYGELPTQKELDVYIKKLVNLRHIPDVLKTVLKLIPKNTHPMDVLRTACSFLGTIEPEENFKQQYEIADRLLALFPGIMCYWYTYHFKNKEISGLSEEDTTGGHFLALLHGRKPSKIETDMMNVSLILYAEHEFNASTFAARVTAATLADFYSAITSAIGTLRGPLHGGANEAAMGLIERFKTPDEAAIGIKQMLASKELIMGFGHRVYTTCDPRSDIIKKWSFRLGEEKGNLLLYHISERIEEIMWQEKKLFPNLDFYSASAYHYCDIPTHLFTPIFVMSRITGWSAHVFEQRANNKLIRPTSEYIGPDSRPFPAIETRG

SEQ ID NO: 61231 - protein, 78 aa, Legionella pneumophila
MSRVCQVTGKRPMVGHKVSHANNKTKRRFLPNIQNHKFWVEEENRFVTLRLSTKGMRIIDKLGIKAVLDKIRAKGEKI

SEQ ID NO: 61232 - protein, 281 aa, Legionella pneumophila
MKFVDEALIKVEAGKGGNGCLSFRREKFIPRGGPDGGDGGDGGSIYFEASSDLNTLIDFRYTRQYKAENGQSGMGGNCTGKKGDDLTIKVPVGTMVYDADTGELLADISQPGIPVLIAQGGFHGLGNTRYKSSVNRSPRQTTPGSPGESRNLRLELRVLADVGLLGLPNAGKSTLIRAVSSSKAKVADYPFTTLHPGLGVVRVSPYKSFVMADIPGLIEGAAQGAGLGHRFLKHLSRTCVLLHVIDIAPLDGSDPVADAKAILNELTQYNPDLLNKPRWLV

SEQ ID NO: 61233 - protein, 352 aa, Legionella pneumophila
MISDFERPNDTLLCIINNITDLDMKTMLEHLVNNRSLITFRPIESELLLNKQKNYLFDLSYLGVIDLFGEKSIDFLQGQLTCDLRLVSDVSMVQGAQCNLKGRILSLLDIINWQGVKLVLPQDLIEVTQNSLNKVALLSRVKITSNNNYKILGFYLQHDNDQIPQLLPLPSELYALSCTAHGCVYHLGKGFYIYLIHSDYYDSLCKPFIENNQLLGSLTWHTLRLFNNQIDIYPNSRGLFLPHRIGLHQTTYVSFDKGCYKGQEIIARTHYRATLKHELKKFVIQSDNQLYSGQKLFKSDENTEVGELIDYSMLGENRYLVAASILKENFSSVCLEGNKFPIQLEGKIELEL

SEQ ID NO: 61234 - protein, 729 aa, Legionella pneumophila
MAKITKEIVFGNHKLILETGEVARQADGAVMASMNGTQVLVTVVWKKDGGESNDFFPLTVNYQEKFYAIGKIPGGFNKREGRPSDNETLISRLIDRPIRPLFPDNFFNEVQIIATVLSLNPEVSPDIIAMIGASAALSISGVPFNGPIGAARVGYKDGVYLLNPSRKEQEESKLDLVIAGTKDAILMVESEAQELSEDIMRGAMLYGHEMMKNVIKSIEELARDVGKSKPEWKAPEIDTVLKARINDVARNEVEAAYLIKDKQQRYQRLDELREQTISALLAENDELNADVIANMFGELERSIVRNRILDGEPRIDGRDHRTVRPISIRTKFLERTHGSCLFTRGETQAIVVATLGNERDAQILDGISGESRDRFMLHYNFPPYSVGETGQVGSPKRREIGHGRLAKRALMAVLPDANEFPYVLRIVSEITESNGSSSMATVCGTSLALMDAGVPLKAPVAGVAMGLIKEGDRYAVLTDILGDEDHLGDMDFKVAGTEKGITALQMDIKISGITNEIMEQALEQALEGRTHILGVMNNALAEHRTELSQHAPRITTMKVAEDKIRTIIGKGGATIKGLIESTGVSIDIDDSGVVQLFSPDKMALEEAQKQIKALIAEIEVGQTYQGKVSKIVDFGAFINLLPGKDGLLHISQICADRTQKVEEVLQEGQEIEVFVAGIDKQGRVKLEWKDKPQAEAKEVEDAPVSATFLTMEEQSEEINSGNKISEEEE

SEQ ID NO: 61235 - protein, 771 aa, Legionella pneumophila
MRRQEINYEKVAKAAEKIKKRGIEPSVNEIRDELGLVGNHPQLSILLEEWYHNQPEFKRKSHTPLTENINLNTDEIREKNVELEKSISLLRATLESTADGIMMVNGHGAVVDWNQKFVEMWRIPSYMMESGKESISFEYILEQLIDPQSLIADVQYLYQNPEWQGELPELHFKDGRIYERFTQPQRVGSQIVGRVYSFRDVTQKRMALDELRIRERAIEASTHGVVIIDVTKNENKVIYVNRAFERITGYGEQHALGKGLLTLLGSNLEEVNHKRIELAIRESKEETIEMESIKRNGEFYWCEISVAPVKDSFGYVKHYICILNDVTQRRDMEDQLLLQATYDSLTNLPNRVLLMDRVEQAILQARKNKAILAFLFLDLDRFKLTNDTLGHSMGDKLLQAIANRLLIVTEDFDTVARLGGDEFVILLTDIDNMLEAETIAQNILKIIEKPIQIDQHSLKITGSLGISFYPRDGDDYESLMKSADLSMYHAKDTGRNNYRVYEPEMNRRVINHMQLDNALRDALKNDELFLVYQPLIDLKQSRVVGFEALMRWHSKILGLVSPADFIPMAEENGMILEMGEWAMKQACIQVKEWHKAGFKNLSIAVNLSGRQFRQKNLPEVVSRVLKSSGLQSRFLELELTESLLIEDIDHVVDTMYALKDMGTKLVIDDFGTGYSSLSYLKQFPVDKLKIDRSFITEMVSNQNDAAIAKAIINLVHSLNLQVLAEGVENEFQRDFITSHGCDYAQGYFFKAPDTPENILEFLKSLSESKIK

SEQ ID NO: 61236 - protein, 119 aa, Legionella pneumophila
MNKQNARHRRGLKAKALIRKTGRSRLVVYRSGVHIYSQIVKSDQLGDKVLVASSTIDKELRSSLTGKSKVEQASLVGQLLGKRAKAAGITQVAFDRAGYKYHGRVKALAEGAREAGLDF

SEQ ID NO: 61237 - protein, 483 aa, Legionella pneumophila
MEHYSLAQLSKALHNREFSSVELTQHCINKIQSNKDLNAFISLDEDQALKEAQSADLVLKSGEGKPLTGIPMALKDLFCTKRLNTTCASKMLANFQAPYDATIVTKFKQNGAIIIGKTNMDEFAMGSSNENSYFGSVKNPWDRERVSGGSSGGSAAAVAGNLVPFAIGSDTGGSIRQPAAFCGISGIKPTYGLVSRYGMVAFASSLDQAGPFAKSAEDLAMILHCMAGFDSKDSTSVDRVIPDYSAEIKNPVDKIRIGLPSCFFQPQVEKGIQDAIHDAVKLFENLGAEIIEIDLKLQPLWVPCYYVIACAEASSNLSRYDGIRFGHRSKSASTLIELITNSRSEGFGNEVKRRILTGTHVLSSGFFDAYYLHAQKVRRLIRDELITTLNSVDVILGPTTPTTAFKLGEKIDDPIQNYLADVFTVAANLAGLPAVSIPTGFENKLPIGLQLMSKHFSENRLLAIAHHYQQHTNWHLANPNKQR

SEQ ID NO: 61238 - protein, 270 aa, Legionella pneumophila
VNREYISRLEPWQIAQMARHPLRPQTTDYIERIFTDFQELHGDRSYSSAPAIIGGMARLNGEPVMVLGHQKGKRTKEKVYRNFGMARPEEYRKALRLMRMAEKFKMPVVTFIDTAGAYPGIGAEERNQSEAIARNLFAMSRIKTPIVCIVTGEAGSGGALAIGVGDKIIMLQFSIYSVISPEGCASILWKDASKASEAARAMGITADRIFENELVDMVVPEPLGGAHRDVDEMASRLKRLLTSELQALKKVPLDQLIELRYQKFMAMGAC

SEQ ID NO: 61239 - protein, 226 aa, Legionella pneumophila
MKPIAHIADKEIISIPVKECGEELIDLKNQNIIVYGPPPETPLTANDYTKIRKTVYQKLCLAQNDLPNGWRFRLYEGLRSLAVQEILFNQQRDNLRQSKEYDSYEDLFNETCRLVSPVVHLDGTANIPPHSTGAAIDIELIDSYGNLINLGMAAKDWLIVDPDLSETYSKLISEEAMQNRILMLKIMAKHGFVNYPREWWHFSYGDRLWAYMTEHSTAIYGAIINN

SEQ ID NO: 61240 - protein, 388 aa, Legionella pneumophila
MSPIEKVAPGVITRKSVDQPVQTGLKAIDAMIPVGRGQRELIIGDRQTGKTAIAIDAIINQKGTGVKCVYVAIGQKASSVASIVRKLEEHGALEHTIVVVAGASDSAALQYIAPYSGCTMGEYFMERGEDALIVYDDLTKQAWAYRQISLLLRRPPGREAYPGDIFYLHSRLLERAARINADEVEKLTNGEVKGKTGSLTALPIIETQAGDVSAFVPTNVISITDGQIFLDVDLFNSGVRPAINSGLSVSRVGGAAQTKIMKKLGGGTRLALAQFRELEAFSQFASDLDDATRKQLERGQRITELMKQKQYSPLTVAEMGVSLFVVEKGYLDDVPVNEISSFEASLHDYMRSTHAALLHAINEAGAYDNEIEAKLKKAVEEFKNTGSW

SEQ ID NO: 61241 - protein, 321 aa, Legionella pneumophila
MIFTQRTYTVYSMSAKIIRIATRQSPLALWQANHVREMLVKQWPNLSIELLPMITSGDRFLKDKLLSAGGKGLFVKELEEALLDKRADLAVHSTKDMPAQLPDGLLLTAICKRDNPFDALISPQFKSLAALPKNAIIGTSSLRRQSQLLAYNPNLQIKTLRGNIHTRLSKLESGEYQAIILAAAGLERMGLAHHITQLIPDDIMLPTCAQGALCIECRTDDLEIQELVHGLNDPISALCVHTERRVNAKLGGNCHIPFAVYCTITEEKLLLLRAKVLNMDGSQMIDDEQQGKIAEAEVIADRCTESLMTKGAMSLLSTIPS

SEQ ID NO: 61242 - protein, 393 aa, Legionella pneumophila
MYHSKTSILALYQLMFRVLIFLSCLVILTPNTIADTNPCEKHSCIAVIDAGSTGSRLHIYSYDTDDTNTPIHIEEIWNKKIKPGFASIQPNSVTIDAYLTMLLADAPIHNIPVYFYATAGMRLLPQSQQKKYYDELEYWFRQQSQWQLAEAKTITGNDEALFDWLAVNYKLDTLKSVQNKSVGVMDMGGASVQIVFPMPKNAEISKHNQVELNIYGQNINLYVHSFLGLGQTEMSHQFLNSPSCFANDYPLPDGESGQGNAPSCKEEVTSLMNSVHKVNQQIQPLLALNPVNEWYSIGGISNLASSQLFHFENSELTNQSLLQQGDNQICHQQWDILNGQYPDDEYLYQYCLLSSYYYALMVDGYGINPNQTIHYIPPEQNLDWTIGVVLHRA

SEQ ID NO: 61243 - protein, 496 aa, Legionella pneumophila
MLLKAESKYPCDLILFGTLGDLSCRKLLPALYQLELANLLHEKTRIIGCAREELDFSAYVDLIKNKIQQFLFDEIDEAVWLRFIKKLAYCKLDLNQSDDYQKLTDYVNPSERVVISYLAIPPSLYSQTCRSLARLNLTQKPSRVVLEKPIGHDLPSSVATNEQVACFFAEDQIYRIDHYLGKETVLNLLVLRFANSIFSTNWDNRVIDRVEISVAEEIGVEGRWEYYDKSGQVRDMLQNHLLQILSLVAMEPPLSLSAESIRSEKLKVLKSLRFINKSNVHDHTVRAQYVANTLANGKKIPGYLEEVGANQASTTETFVAIKAYVDNWRWSGVPFYMLTGKRLPKKQSEVVIYFKPQPYNIFHPLNEELYPNQLIIRLQPDEGVEVRIMNKIPGLGERMMLHDSKLDLNFHHSFKTQRIADAYERLLLEVMLGNQYLFVSREEIEQAWQWIDSIVSAWEEDNIPLYTYPACTWGPKEVIRLFNGQAHVWGDHNAVS

SEQ ID NO: 61244 - protein, 365 aa, Legionella pneumophila
MLEVNQINLSLIDLNERIESLRGYLDFEGKSERLEEVIRELESSNVWDNPEQAQALGRERTQLETIVHSLSQLSQSISDQRELFELAREEDDEQTINDIGEELKSIEQQVASLEFRRMFSGKMDHSNAYLDIQAGSGGTEAQDWAEMLLRMYLRWGEHHGFTTELIECSPGEVAGIKSATIHFTGEYAFGWLRTETGVHRLVRKSPFDSGNRRHTSFAAVFVSPEIDDDIEIEINPADLRIDTYRASGAGGQHVNRTDSAVRITHIPSGIVVQCQNDRSQHKNKDQAMKQLRAKLYELEMQKKNAEQQALEASKSDIGWGSQIRSYVLDQSRIKDLRTGVETSNTQAVLDGSLDQFIEASLKAGV

SEQ ID NO: 61245 - protein, 507 aa, Legionella pneumophila
MRKKPLSTGAEWTFELIQAYDREIARIAKSFNLDTYPNQIEIITAEQMMDAYSSVGMPIGYHHWSFGKHFVSVEKSYKRGQMGLAYELVINSNPCISYLMEENTMAMQALVIAHACYGHNSFFKNNYLFKMWTSADAIIDYLVFAKKYISDCEERYGIDAVEPVLDACHALMNYGVDRYKHPTPLSIQEEKIRQQNREIYMQSQVNELWRTIPFSKQIDKNGQKKRFPEEPQENILYFIEKNAPLLEPWQREIVRIVRKLAQYFYPQGQTKVMNEGWACFWHYTILHALYDEGLVTDEFMLEILQSHTNVIMQPAYNSPYYNGINPYTLGYHMMQDIKRICENPTDEDKKWFPYLANTDWLTSLDTAMRNYKDESFIAQYLSPKLIRDLKLFHIVDDDRNSELYINAIHDEWGYQQIREALSRQYNLGYLEPDIQVYSVDLQGDRSLTLRYSQQNRVPLGSSTNEVLKHLHYLWQFPVILQAVDGENKITEEFSCPPLNKNKTAETN

SEQ ID NO: 61246 - protein, 315 aa, Legionella pneumophila
MHWFAQAPANIALIKYMGKKDENSNLPDNSSLSYTLSNLLSSVKLEKLPTKKDIWEPLTIPGAPEFNLSVEAQKRFIDHLVRLKEYFGYVGGFLIQSSNNFPHSSGLASSASSFAALTKCASIALSELTQKPLPSIDEQAQLSRLGSGSSCRSFYAPWALWTGDKVSAIDLPYKDLLHQVIVISSQEKEIPSRVAHKLVKTSPFYETRSERAEANLKLLLNAFENKDWTSIYQICWHEFLDMHQLFKTCEKPFSYITDNTLHILSVIEKFWNEKGDGPVVTMDAGPNVHLLYRSDQTDLARQFKSDHLVGNYDVL

SEQ ID NO: 61247 - protein, 297 aa, Legionella pneumophila
MFSLKKTTAAVFALGSSALFAGTMGPVCTPGNVTVPCERTAWDIGITALYLQPTYDADWGYNGFTDVGGWRNWHDVDLEWDWGFKLEGSYHFNTGNDINVNWYHLDANTDHWAFVDQLHAYDITWDAVNAELGQFVDFSANKKMRFHGGVQYAYIKTDVNRHLNGFFLDNFNSKFNGFGPRTGLDMNYVFGNGFGIYAKSAVAILVGTSKFVDNCTVCGFSYGSKNAIVPEVEMKLGADYTYAMAQGDLTLDVGYMWFNYFNALHNTAAVNVGLGTSLETDFSASGPYIGLKYVGNV

SEQ ID NO: 61248 - protein, 545 aa, Legionella pneumophila
MTKYIFITGGVVSSLGKGIAAASLAAILEARGLRVTLIKLDPYINVDPGTMSPFQHGEVFVTNDGAETDLDLGHYERFVKTTMTKRNNFTSGKIYENVIKKERRGDYLGGTVQVIPHITNEIKRCIKLGADAFDVAMVEIGGTVGDIESLPFLEAIRQMRIELGSQRAIFIHLTLVPYIATSGETKTKPTQHSVKELRSIGIQPDVLICRSEKPLSMADRAKIALFTNVEKEAVISLEDANSIYQIPMILHAQHLDEIVVKKLSLEAKQADLSEWQRVVDMQAVQTMTVKIAMVGKYTELNDAYKSINEALLHAGIHTETKVEIIYFDAEMIEKHGALLLESIDAILVPGGFGERGVEGKIKAIQYAREHKVPFLGICLGMQTAVIEFARNVVGLTGANSTEFNKETLYPVLGLISEWMDADGSKQIRDENTDLGGTMRLGGQYCHLAEGTLARKVYGKPQIIERHRHRYEVNNKYVDSLVKHGLIISGRSADNSLVEMIELADHPWFLACQFHPEFTSNPRDSHPLFKEFVLAARIHHQEKDKK

SEQ ID NO: 61249 - protein, 119 aa, Legionella pneumophila
MPRVKRGVTAKARHKKILDQAKGYYGARSRTYRVAKQAVIKAGQYAYRDRRQKKRQFRALWITRINAQARECGLSYSRLIDGLKKASIELDRKILADMAVHDKVAFAAIAEQAKAALAG

SEQ ID NO: 61250 - protein, 191 aa, Legionella pneumophila
MNTVLKILMAGVDEVGRGPLAGAVVTAAVILKKPIDGLTDSKKLSPKQRNLLAIRIKEEALAFAYGRAEVEEIDQLNIHHATLLAMRRAVEALPIQPDNVFVDGAFTPQLNIPCKAIVQGDSLIPEISAASILAKVLRDEEMVALDKIYPGYGFAEHKGYATPVHKEALMRLGPCKIHRRSYSPVADLISK

SEQ ID NO: 61251 - protein, 462 aa, Legionella pneumophila
MIPVIALVGRPNVGKSTLFNRITKTQDALVADFPGLTRDRQYGHAQHENKSFIIVDTGGIGVDDIEVDTLMSRQSQVALNEANVILFLVDGRSGLTGIDQQIAQALRKFNKKVHLVVNKTDGMNEDIACADFQSLGITDIHAISASHGGGISSLLEEILEPFTTETHEATDDKAIKIAFAGRPNVGKSTLINRILGEERVVVYDMPGTTRDSISIPFTREDKQYVLIDTAGVRRKSRIDEKIEKFSVIKTLQAIKEAHVCLLLLDANEGITDQDMNLLGFIIESGKALVIAVNKWDGLEEDHKEKIKSELSRRLHFANFAKIRFISALHGSGVGGLFKDINEAYHSAIQSFSTPKLTRLLQDISAKHTPPCINGRRIKLRYAHLGGHNPPVIVIHGNQLDALPESYKRYLNNEFIKHLGLVGTPLKIEFKGGQNPFANKKNKLSQRQVNKKKRLMRWAKSKK

SEQ ID NO: 61252 - protein, 369 aa, Legionella pneumophila
  MISC_FEATURE (282)..(282): X=any amino acid
  MISC_FEATURE (322)..(322): X=any amino acid
  MISC_FEATURE (349)..(349): X=any amino acid
  MISC_FEATURE (366)..(366): X=any amino acid
RGGLAELKSRLMFVVLGILVYRLGAHIPVPGLDPAKLANFFSEQQNTIFGLFNMFSGGALSRVTVFAIGIMPYISASIIIQLFSVVSPKLEQLKKEGESGRRKINQYTRYLTLLLSIFQSMGMARWLASQQIAMQPDFSFYFTAVVTLVTGTMFLMWLGEQITEKGVGNGISLIIFSGIVSSMPNAIGSVLQQVKEGQMQALTLVIIAAVVIVVTGFVVFMERAQRRIRVNYAQRTQGKKVYAAQTSHLPLKINMSGVIPPIFASSIILLPATLAQCFSQTXRLRWLSDSGMALSPGQPLYLIMYATAILVFAFFYAALIVXPLKIQQNTWKKSGAYIPWFRPGEANTXIYPIQWKTRLDFIGTLXLGF

SEQ ID NO: 61253 - protein, 533 aa, Legionella pneumophila
MNIKSNLAYSSVILKGHVNRYAFLGLLISVGSILIASCIVSYQLTGSVSLGGFIQAQRSNPAIWILDLTPFMFVYWGQAFCYGLVNKAESLLVDKTKELLNISGNLELKLKYDSLTNLPNNRLLNEKIRLAIEQLGSQGELAVIVIKINDLNYNFSSFNTNNIVKQFAEKLKSVLIDPYMLKASLGINMVARLQSDEFAILMPRLKKDLEINELLIHLLTLLNSNLMVDGININLATTVGAAIYPIHGEEDDVLLNHAIIAVYQARKENKSYAIYSPEMEEDLINNRIVMNELQRSIENKDLKIYYQPIVELANGQIVGAESSARFEHPELGLLSAEKFMPLIEGTSLIHNLTTLMLKEVIKQLAAWHDAGHKIFVSANLSVNRGLPDLIEKLLNDYEIAPQFLKLEFTERTCLAEQMVTSEVFERLSTMGIKLCIDDFCSENSSFIYLTDFPIENIKVEKSFVLKIAKDAKKAKIVEAIVKLAQTLGWEPLADGIADQNALEKLRDLGCLYGQGLYFSRAVNVAEFTSLLKK

SEQ ID NO: 61254 - protein, 861 aa, Legionella pneumophila
MKNDNRIIKNTIKQFKEKLCKDFSQKTNITSITRKLAVFIDTILIQLFIKNKLHFGDNFCLLALGSYGRRELQLHSDIDLLILHTEKVSNIQLQRAQKFIQDCWDVGLEVSHQITTVSSCANLASQDLSVISTIMDMFLLCGHGALMEELIYQTHTLHMWPSHQYFFAKLQEQQNRYAKYGETAYNLEPNIKNGPGGLRDLQILLSISKRHFKIKKLAEGIGYGFITDKEYEELKYCQNFLWRVRFALHMLAGKPEERLSFDYQVKLAQFFGYQDQSHILAIEQFMKDYFKVIKRNRELNEMLLQWFNETIVYHQKQKIIRLDDEFQLSNRFIEVRNNRVFKQNPQSILKLFYWLVKRPDIEGVRASTIRLIRESLFLMGKRFRQSKETANIFINIFRTGNDPYDALQRMNRYGVLAHYLDCFATVTGQMQYDLFHAYTVDQHTLFVIRNISRFKKNEYAKQFPLCAKIITALEKPEILYLGALFHDIAKGRGGDHSELGAIEAQQFTQRHYMEAEDSKLIVWLVRYHLLMSQTAQRKDIYDPKTIEQFCQLLPHARYLDYLYLLTVADICGTNPTLWNAWKDSLLKELYHAAKTRLHKQQELLDEAALISIRKQYAMDILISDGISFRVIQDLWGQFKGKYFLHESPEVIARHTKAILNSKQFPVVIIMPHHSQGGTEVFIYMPHKDERFTITTSVLSNHHVTIQEAAIITCDNQFDLDTYIILDENNQAFLNEQRARDIQKSLCDHLANTGRLPAVSRRRLSRALTHFNVKTQINFIDDNTNHQTQLFLVTNDRPGLLATISRVFLTLNIHLHNAKIATAGERVEDMFYISNQTGYSLNHEEKTILKEKLILEISKSKY

SEQ ID NO: 61255 - protein, 121 aa, Legionella pneumophila
MTNIIDQINAEQMQGKEIPDFNPGDTVLVQVKVIEGNRERLQAFEGVVIAKRNRGLNSAFTVRKISHNVGVERVFQTYSPIVDSITVKRRGDVRRAKLYYLRNLAGRAARIKEKLSGKKGD

SEQ ID NO: 61256 - protein, 260 aa, Legionella pneumophila
MKLKNKVAIVTGAASGIGKEIALVYAKEGAKVAIADLNLDQASHVAEEIKSSGGQAMAVAMNVTDEAQVNQGVDKVADHFGGVDVLVSNAGIQIIESVDKLAFSDWKRMLAIHLDGAFLTTKACLKYMYASGNGGSIIYMGSVHSKEASVLKAPYVTAKHGLLGLCKVVAKEGGTHKVRANVICPGFVRTPLVDKQIPEQAKELGISEEDVIKKVMLKETVDGEFTTTDDVAQTALFFASFESNALTGQSLVVSHGWFME

SEQ ID NO: 61257 - protein, 136 aa, Legionella pneumophila
MSKKSICLATLALIFTFGQPVFANSSEATQTKPCHCHDHKKILSQLNLTQEQKTKIKTIKIQAQKSIKENYRQLKAIKEQINALIANEKLDEAKLDSLINQRNKITGTMLKNRVMMKNQIYNQLTNEQKSQYKKNM

SEQ ID NO: 61258 - protein, 296 aa, Legionella pneumophila
MDKDYYKIMGVSQDASEKDIKMAYRKLARKYHPDISKEPDAEERFKEMAEAYEVLKDPKKRSEYDQYLKYKEFNPQSDGFTGRRTQEQPFQEFHFDSDFFETLFGHSRYQQQPMTGQNYHGKITISLEEAYHGAVKNLQVPVEQGTETKIQTLKVKIPAGVKSGQQIRLAGQGGSGSGGGARGDLYLTVEVMKHPIFDVMENDIYLTLPVTPWEAALGATVVIPTLAGKIDLKIPPGSQGGQKLRIKNRGLPGSPPGNQYVLLKIITPPAQTEEAKALYKKMAEVMPYNPRKTMGV

SEQ ID NO: 61259 - protein, 361 aa, Legionella pneumophila
MAETPKPKSQTPTPKPKPKPTDEQTVEPAPQQSTLGKVGSVIGGLAKKGLGKLADNIGKQFGSNAPQPGAENKPAEGQKKDDDKKDPQMEMIERYMKLVEQWQGGINKPFYWVGGKISAGASFLVDKAVEGIKNKLAESEQPKPNPNSSTQQSNSSSSSSSSSTTPTPTSSSSSGSQSSSPPTTSSGSDSQSSSPPTTSSGSDSQSSSPPTDSSSSGSDSQSSSPPTDSSSSGSDSQSSSPPTDSSSSGSDSQSSSPPTDSSSSGSDSQSSSPPTDSSSSGSDSQSSSPPTDSSNSSSSSSSDTSSQLSPPPDSNTNTSTPDLGSQTKYDETSSSSNSGSGQSSGSGSSSDVPTPSQSMPG

SEQ ID NO: 61260 - protein, 357 aa, Legionella pneumophila
MHEQFLLAALEQAKLGRGFCAPNPSVGAVAVQNGNIIAQAWHRGAGTPHAEQLLLSQIPPQTPGVTLYVTLEPCNHWGKTPPCVDAIINHGIEEVVFSYFDPNPIVAKSNSSEKLREHGIQVRHIPVKAIDVFYKSYAYWTMTHKPRVTVKIAQTFDGKIGKSEGARVVLSNALCEQFTHQMRAASDVILTSAKTVQMDNPRMNARLDSGLVAKPVAIVDRNLSLSDDTIIFSTAKHCHIYHQPQANQAKTYPNSTHYAMPLQNGLMDLEAIITHLGQLGYHDVWVEAGGAIFSALHSKGLVHRTYLYLVPGSLGHQAISAYQQQGIFEKAHTVSWQAMGDNMIACLDWQEDECLPD

SEQ ID NO: 61261 - protein, 405 aa, Legionella pneumophila
VSTTAWQKCLGLLQDEFSAQQFNTWLRPLQAYMDEQRLILLAPNRFVVDWVRKHFFSRIEELIKQFSGDDIKAISIEVGSKPVEAVDTPAETIVTSSSTAPLKSAPKKAVDYKSSHLNKKFVFDSFVEGNSNQLARAASMQVAERPGDAYNPLFIYGGVGLGKTHLMHAIGNSILKNNPEAKVLYLHSERFVADMVKALQTNSINEFKRFYRSLNALLIDDIQFFAGKDRSQEEFFHTSNALLEGQQQIILTSDRYHKEIEGMEERLKSRFGWGLTVAVEPPELETRVAILISKAEQSNIELPYEVAFFIAQRIRSNVRELEGALRRVIANAHFTGKPITIEFVHEALRDLLALQDKLVTIENIQKTVAEYYKVKVADLLSKRSSRSIARPRQMAMALSKELTNH

SEQ ID NO: 61262 - protein, 555 aa, Legionella pneumophila
MMNKDKNKRVISAPRGTEIQAKNWLTEAALRMICNNLDPNVAEDPDSLIVYGGLGKAARNWECFDEIVHVLKLLNNDQTLLIQSGKPVGVFTTHEEAPRILIANSNLVPRWATWEHFNELDKKGLMMYGQMTAGSWIYIGSQGIVQGTYETFVAAAKKHYQGDLSGRWILTAGLGGMGGAQPLAGTMAGASVLAVECDRQRIEKRLQTKYLDRYTDNLSEALDWINESCRRKKPVSVAVLGNAAEIFPQLVKLGVQPSLVTDQTSAHDPLNGYLPLGWTLEQAVEMRKKSPEEVVDAAKKSMAVQVHAMLEFHNRGIPVFDYGNNIRQMAFEAGEKNAFSFEGFVPAYIRPLFCEGIGPFRWVALSGDPEDIYATDERVKQLIPDAPHLHHWLDMAREKISFQGLPARICWVGLKDRARLALAFNEMVKNKQVKAPIVIGRDHLDSGSVASPNRETEGMLDGSDAVSDWPLLNALLNCASGATWVSIHHGGGVGMGFSQHAGVVIVADGTEKAAKRLARVLHNDPATGVMRHADAGYQIAKQCAKENSLWLPMES

SEQ ID NO: 61263 - protein, 437 aa, Legionella pneumophila
MYNILLIFIAFLLVLLNAFFVSAEFGMVKLRATRIQAIKENYGLRGRILEQVHQNLDAYLSACQLGITLASLGLGWIGEPAFAELLGPLFVALGISSVHIVTISSFFIAFFLISFLHIVIGELMPKSIAIRQSELISIWTAVPLYWFYWIMYPAIWLLNTCSNFFLKLSGMDIKNEYEGFYSSEELKLILSGQHLQSELKEDEREILEHTLDLAELNVTEVMRPEDEMIIIDINEPFETIKDKILKYRYSRYPVYDSGTKEMIGVIHVKDLFADLLLQKNINTLKPYVRPVLKVSHKLPAMDLLRKFRAGMPHFALVYKHKSSLLGFVTLDNLLHILIGRIKDEFHKTHEDWVKNSDGTITTKGDCSLYSLERALDCDITLSPDEEELNTLYGLIITRHGKLPNEGEIIQFVEFDALIEKVQDSFITKIKVFPKIKN

SEQ ID NO: 61264 - protein, 545 aa, Legionella pneumophila
MLWGLLSLFSSLSFAEIKVELEPSQVTMGETFKLSITQEDQQGGGVPDLTELQKDFVILGTERHVNYSIINGQAQSQSQWIVLLRALKPGIFTIPPIKVGLEQSLPITINVQGSANTQALPDEAIQKQDVFLTAEVNEKNPYVNQQIIYTVKLYNSKRLLDADYQGPKVDDALLIPLGDAKRYHAVHNNINYVVEEQTYAIYPQKSGTLKIISPIFNALVYDYNPQRTKATDKAINLTIKPIPKKYQGKLWLPAKQVKLSEQYENSNQTLSQGSTLTRTVTLEGIGIPAQLLPTLTFQETDFFSVYPEKGAERNQVKQGELIGSVEIKVTYLFNKAGKTTIPELRLTWFNTETGKEEIAVLPPRSIDIIPSTAVKANTANTQVTGKEMSASSQLAPDSASVANESGGWAVKLAIFFGLAWLITLSLWIWQKRPRESSSKKEYKKALDALNKACSQCNPKKARDAVLKWASLQWPDAPMLNLTDLAQLVRDAHLRKQLHLLSQVLYRSQEKTLWRGDELLRAVQAVKRNESVKKRKNSNLPPINPF

SEQ ID NO: 61265 - protein, 215 aa, Legionella pneumophila
MSYQMVYDLLNATGETLYMVFFSTLFAVLLGLPLGILLYSSSRIKPNIKLNKILSALINIFRSIPFIILLVAIIPFTRLIVGTSIGINAAIVPLTVGATPFFARLVDNVLQSLPLGLIETGYSMGANTRQIILHIILPEAQSGLIHSITVTAITLINYSAMAGAVGAGGLGTLAINYGYQRFNAGIMIATVIVLIILVQLIQMVGDYLAKRCTHY

SEQ ID NO: 61266 - protein, 397 aa, Legionella pneumophila
MSQFPRIKRLPPYVFNTINQLKMEARARGEDIIDFGMGNPDQPTPPHIVNKLIEVAQRPDTHRYSMSKGIPRLRRAMATWYLRHYDVHLDSEKQILATIGSKEGLAHLALAISGPGDTVLVPDPAYPIHTYGFIIAGANVKQIPLIDEVQFLAAVEDAINRTWPKPKALVLNFPANPSTHCVEYEFFEKVVDLAKRNNIWIIHDLAYADIVFDGYKAPSILQVPGAIDIAIETYSMSKSYNMPGWRVGFACGNEELVAALTRIKSYLDYGTFTPIQVAAITALEGPDDCVLEIRNLYEKRRNLLCDGLNDIGWEVSKPKGTMFVWAPIPLNYRAMGSLEFSKYLLKEAQVAVSPGIGFGQQGDGYVRFGLIENKDRIRQALRNLKALFKRDGLLKAI

SEQ ID NO: 61267 - protein, 194 aa, Legionella pneumophila
MKEIILATSNPGKIKELEQLLAPTICIPQADLGISDAEETGLSFIENAILKARHASSLANKPALADDSGLVVPSLNGEPGIYSARYAGIKANDEDNIQQLLSKMADLSQEQRQAYFFCAIALMRHAKDPTPLIATGVFHGLISVKPSGTNGFGYDPVFYLNEYQCTAAELPAKIKNRISHRAKALNQLRALLPD

SEQ ID NO: 61268 - protein, 287 aa, Legionella pneumophila
MIDIRSLLEQALQQFKVKNQETKLEAELLLCHVLNKNRAYLFAHPDALVSPEQIETYLQMIKQRAEGLPIAYITGQREFWSLSLKVTPNVLIPRHETERLVELALELIPDKENVSVLDLGTGSGAIALALAKERPLWHIDACDFSKEALELARYNAKTLGLNNINFCHSYWFNNLPLKQYHAIVSNPPYIAENDPHLKHGDVRFEPTSALVSSQDGLADLQYIIQHSYEYLLPDGLLLVEHGFEQKNEISAILNQLGYKNIHCWQDLQGHDRVSGGQRPSNRNNKPL

SEQ ID NO: 61269 - protein, 205 aa, Legionella pneumophila
PSREGQKMRLCGFEAGLDKPLFLIAGPCVIESEELALETAGYLKEMCSQLNIPFIYKSSFDKANRSSISSYRGPGFEKGLSILEKVKSQIGVPVLTDVHEDTPLFEVSSVVDVLQTPAFLCRQTNFIQKVAAMNKPVNIKKGQFLAPWEMKHVIAKAKAQGNEQIMACERGVSFGYNNLVSDMRSLVIMRETGCPVVYDATHSVQ

SEQ ID NO: 61270 - protein, 425 aa, Legionella pneumophila
MSDYEVLLRHLDREIRARKEAEEISEKKISELYRFAQRLEESLKAQKEISKKLKEKTKALKQQIAKTEEERHAKSTLQTILESAIEYSIIAINLKGVILVWNEGARRNYGYEAQELVNKESIEILHTVEDIQSGKVRKFFQTVRREGKAEEIFQRVRKDGSQFTASVTMTIRYDSQGKKVGYVIISKDITEIKEFEEKLIKSNQNLEEFSYIISHDLKAPLRAIIQLATWIEEDCGNKLDSLSRKNLQLLRERTRRMSGMVDGLLQYARAGRVNMEVEWVDTKELIQEIIDILNHDEQFTIIVHESMPQLPTAKLLLSQVFSNLIANSMKHHHCKTGTIEIGVLDKGTFYEFFVADDGPGIEPVYFEKIFRIFQTLKSKDEAETTGIGLTIVKKIVESQNGKIEVDSELGKGARFSFTWPKVPHQ

SEQ ID NO: 61271 - protein, 399 aa, Legionella pneumophila
MIKKELPDEFGHFGPYGGMFVADTLVHALKQLEHAYTKYRNDQDFLSELHTELKDYVGRPNPLYHAVHLSKKIGGAQIYLKREDLNHTGAHKINNTIGQALLAKRMGKTRVIAETGAGQHGVATATVAAKFGFQCVVYMGSEDIKRQSSNVYRMKLLGAEVVPVTSGSKTLKDALNEALRDWVSHVDDTFYIIGTVAGPHPYPQMVRDFQAIIGVEARAQHMEKTGHLPDALVACVGGGSNAIGLFYPFLNDQSVMIYGVEAGGKGIETGEHSASLIAGKPGVLHGNRTYLLCDEYGQVKDTHSVSAGLDYPGVGPEHAYLKDTGRVIYKAINDSEAMDAFRLLTHTEGIIPALESSHAVAYAIQLAKTMSKEQSIIVNLSGRGDKDMHTVAAIDGITI

SEQ ID NO: 61272 - protein, 250 aa, Legionella pneumophila
MTKSLNGLRILNTRPREQAQVLNKKIIESGGIPIDCPTMEIMASETNWINNLPDLTSVNQAIFVSTNAVRYFMMELASKNINWPNSIRVTAIGKGTSRVLNEFNIQVSDVPELPDSEHLLTLNSLQQIRNQTILLVKGEGGRQLIEEYLMLKGAKLCLLSVYKRVMPAIDQEFINSLWRDDLVDIILLTSEQSIHNLFKMFSIEGQMWLQNKPCLVISDRLAKVASLFGIKKILISHPERMIGALFDYKD

SEQ ID NO: 61273 - protein, 942 aa, Legionella pneumophila
MSEILEPVKDIPLTNQLELTANVPGMLKTIKRNGKVVIYDDTKIKIAITKAFIADEGGTAPTSDRIHQQIEELTRQITQVFKRRLPSGGAIHIEEIQDQVELALMRSGHYKVARSYVLYREERRKARESESKQKQTKDSKHLLITMPNGEVQPLDMDRVNTIVKESCRDLSNVKAEPVIKDALRNLYNQAKYEDVHKALIMSARALVEKEPNYTYVSARLLLDSLRSEALTKLNIKSEATFDEMAQIYPVYFKSYIEQGIAQGMLDPKMADFDLDKLSQALLPERDMKFTYLSLQTLYDRYFIHERGVRYELPQAFFMRVAMGLALREQHKEEKAIEFYQLLSSFDYMSSTPTLFNSGTVRPQLSSCYLTTVPDHLDGIYSAIKDNALLSKYAGGLGNDWTPVRAMGAHIKGTNGKSQGVVPFLNVADATAVAVNQGGKRKGAVCAYLECWHRDVEEFLELRKNTGDDRRRTHDMNTALWVPDLFMKRVREDGNWTLFSPDEVPDLHDQYGKAFEALYVEYEEKARQGIIRNTKTISAVKLWRRMLSMLFETGHPWLTFKDPCNLRSPQQHAGVIHSSNLCTEITLNTSEEEIAVCNLGSINLPAHIKNGKLDEQKLKRTISTAVRMLDNVIDINYYSVPQARNSNLQHRPIGLGIMGFQDALYELKMDYASKEAIEFADSSMELISYYAIEASCDLAKERGSYSTYEGSLWSKGILPIDSINLLQQSRNKYLEQDRSQKLDWEPLRVKVRTQGMRNSNVMAIAPTATISNICGVSQSIEPTYQNLYVKSNLSGEFTVVNPYLVADLKALNLWDEVMVNDLKYFNGSVQPISRIPDELKRRYATSFEIDPMWLVEAASRRQKWIDQAQSLNIYMAQPSGKKLDQLYMHAWIRGLKTTYYLRSLGASNAEKSTVTDGALNAVKLIDTEPKACSITDPDCEACQ

SEQ ID NO: 61274 - protein, 193 aa, Legionella pneumophila
MSDQYKVALRNTIKQVRSKLSVPYRTASSNQICTRIRSLEQYRQAKRIALYFAVNGEVDLTFLWKSAPLQGKYCYFPVLNNDSTLSFLPATPSTPFKTNKYDIPEPDVDIELALPIDELDLIIMPLVAFDAHCTRLGMGSGYYDRTLANKSKAHLLGVAYQFQRVDYIEPRPWDVPLDAVITQKAIYWRNPLA

SEQ ID NO: 61275 - protein, 135 aa, Legionella pneumophila
MLKKHPGEVCFPGGFQEINDQDLYSTALRELNEELGVTSDRITLIRKLNIEKTLLGLVIHPWYASIDSIFPYTMNPQEVSELILVPMPLVKNQKNYKEIRIEKEGKHIVTCQFIANEELIWGATARIMRQLASQY

SEQ ID NO: 61276 - protein, 319 aa, Legionella pneumophila
KGVAESEEKKQRSISDIEAIYQQPFNDLLYQAHTIHRTYHDPNSLQFATLLSIKTGACPEDCGYCSQSGHYKTHVEKEKLMSVEEVLQCAKEAKEGGAKRFCMGAAWRCPPDKAIPQLKEMIEGVKSLGLETCMTLGMLTKEQASHLKEAGLDYYNHNIDTSPSYYDKVVTTRKFSDRLDTLNNVRSAGINVCCGGILGLGETREDRIEFLLTLANMETPPESVPINRLIPVEGTPLAQAERVEGIELVRTIATARILMPKSAIRLTAGRTEMSDELQALCYFAGANSVFIGDKLLTEDNPQRFKDKTLFNKLGLTEMV

SEQ ID NO: 61277 - protein, 301 aa, Legionella pneumophila
MRRWLGVQAFSYVELRSIQISTVFAFTIFVQEWLRYPRAGWTGFAVMMIYAGFDNGTTIFRTYHRFLGVLLGLFTGYLLWFVGHLDYRTLILIMPLMVFFAFFLVGRAYSVPTVFTVNVSVLGSGYFSTEDTLPVTYFIIDYTLCTLIAFTIILGFEYFWFRHYGLMQRFIKSTQAEVIDDLYRLVRLLNQGKIKKTEWFQACIKLTDSLFEVNKLITNSQFLISSEHAVGDEFNQFVELANRIFIGLKALYMAYYTKHYHTFDYYQLFQQVQKDLVRLKDFVAGEQTIDLSEGVKHATSG

SEQ ID NO: 61278 - protein, 467 aa, Legionella pneumophila
MINITGTYTDQYQLAMAQVCFLKGQHERIATFDYFFRALPFKGGYAIFAGLEDLLDVLEQLRFEQQDIEFLQHQNMHPDFIRYLQQFKFNGTVYTSLEGDVVFPTRPVVIIEANLIEAQIIETLLLNIINFQTLIATKARRIRQVAGERILIDFGLRRAQGAGGYFASRAAIVGGFDSTSNVRAGRDYSIPVSGTMAHSFIQSYDSEIQAFSDYAEAWPENCILLVDTYNTLQSGIPNAIKIAKEMEKRGHRLKGIRLDSGDLAWLAKRARHMLDEAGLNYVAITASNQLDEYVIKNLLEQDAPIDAFGVGTNLAIGAPDAALDGVYKLAFINGQPRIKLSDTPAKITIPYQKQVYRVFERDGTYRGADVVCLKTEKKIDMMHHPFEILKSLSIKHYKKEALLHKVMENGKRLLPKKSLGEIARFSQQCFDRLPLEYKRFINPHIYKVGLSTELKMKRDQLIAEHSR

SEQ ID NO: 61279 - protein, 139 aa, Legionella pneumophila
MEKLGQFIINHWQLWLAFVVVVFLIFINEILSQRKKAKEVSPQSLVDLMNNGNAIVIDIRDKESFKNGHIINSMNVNPDDFEQQKMSKYKDKPIILVCARGLQSPTLAMKIRNQGYQPLVLSGGIQAWQNADLPLVKGK

SEQ ID NO: 61280 - protein, 362 aa, Legionella pneumophila
MKKSLELKLQQMLERYEEVGRLLSEASIIADQNQFKSLSKEYAQLEPVSQCYESYLEAKNNLDSLNELLESDDKDLATMAEEEIDTVKKQIEELDEQLQWHLIPKDPDDERNIYLEVRAGTGGDEAAIFAGDLFRMYSRYAESQGWQIELISASHGEHGGYKEIIAKISGQAVYSQLKFESGAHRVQRVPETESQGRVHTSACTVAIMPEVDEINDIQINPDDLRIDTYRSSGAGGQHVNKTDSAIRITHIPTGVVVECQDERSQHKNRAKAMSLLKTRLLDAEVSKQKQEQAQTRKSLVGTGDRSERIRTYNFPQGRLTDHRINLTIYQLSDIMEGNLSLVIDPLKREYHAELLADLGRHD

SEQ ID NO: 61281 - protein, 593 aa, Legionella pneumophila
MRTHYCSAVNELSLDKQITVCGWVHNRRDHGGVIFLDIRDRSGLLQVVYEPENKEIFAIAEKLRSEFVVRVTGIVRKRPEGMINDKMETGRVEVIGTQLEILNQSPTPPFLPDDHQIINEDLRYKYRYIDLRRAVMQKKLTLRHKLNSCIRNYLNEQNFLDIETPMLTKATPEGARDYLVPSRVHPGQFYALPQSPQLFKQLLMMSGFDKYYQIVRCFRDEDLRADRQPEFTQLDIEMAFINEEDILQLIEGLLKIVFKEILNITLPDKLPRMSYKEAMTRYGSDKPDLRNPLELIDIADLVKDCDFNVFASAANDNSGRVVALKLPNGCDLSRKDLDNYGQFVTIYGAKGLAYIKVNDLSAGMAGLQSPILKFLSETAVHSILNRVEAQTGDVIFFGADKAHVVNESMGALRNKLGHDRNLINSGWQLLWVVDWPMFELDPQSNKLQPMHHPFTSPQELSAEALRSKPTQTLAKAYDIVINGYEIGGGSIRIHQPELQKTVFDLIGIDEQEAHEKFGFLLDALQYGAPPHGGIALGIDRLAMLLTDSTSIRDVIAFPKTQTASCPLTSAPSPAGNAQLTELGIRLAPTITTK

SEQ ID NO: 61282 - protein, 315 aa, Legionella pneumophila
MSTMMIFTGNANPELALKISSHLQIPIGKATVGTFSDGETMVEILENVRGKDVFVLQSTCAPANNNLMELLIMADALRRSSAGRITAVVPYFGYARQDRRVRSARVPITAKVVADMMASVGICRVLTVDLHADQIQGFFYMPVDNVYSTPVLLEDITKQKLNNIMIVSPDVGGVVRARAVAKRLNDAELSIIDKRRSGPNKSEVMHIIGEPANKNCIIVDDIVDTAGTLCTAAHELKKNGAKSVRAYITHPVLSGPAVNNIKHSGLDEVVVTDTIPLSAEAQNCEKIRVVSLADMLAQAIKRVNVEESVSSMFAE

SEQ ID NO: 61283 - protein, 112 aa, Legionella pneumophila
MRHYEIMFLVHPDQSEQVPGMVERYEGIITKHNGKIHRKEDLGRRQLAYSINKVHKAHYILMNVECNLDALNEIKNAFKFNDAILRHLITVQKQAITTESVLMKKEKETKVA

SEQ ID NO: 61284 - protein, 951 aa, Legionella pneumophila
MHTITIRGARTHNLKNLDLELPRDKLIVITGLSGSGKSSLAFDTLYAEGQRRYVESLSAYARQFLSMMEKPDVDSIEGLSPAISIEQKATSHNPRSTVGTITEIYDYLRLLYARVGEPRCPTHHTSLHAQTISQMVDQVLALPEDSKVMILAPVIRERKGEHVQFLQQLQAQGYVRARIDGELYELDSPPKLGLRTKHTIEVVIDRFKVRPDLAQRLSESFENALNLADGLVIVSSMDGHFNELLFSSRFACSECGYSLSELEPRLFSFNNPVGACSSCDGLGVDQFFDPSRVVHDATASLAEGAIRGWDRKTTYYFSMLESLARHYGFDTSTPFCDLSEAMQQIVLYGSGREIIEFQYHRPHGGYMVKRHSFEGIIPNMQRRYRESDSGMIREELAKYLSSRPCQSCQGARLREEARHVFIDNKNLPEITSYSIEQAYQFFKELKLSGYRGEIAAKINKEIVERLGFLVNVGLDYLSLARSAETLSGGEAQRIRLASQIGSGLVGVMYILDEPSIGLHQRDNDRLLSTLMHLRNQGNTVIVVEHDEDAIRSADFVLDIGPGAGVHGGEVVASGSPEEVMNNPASLTGQYLSGKKEIEIPKDRIPVNHDRMIHLKGVSCNNLQNVDVSIPLGLLTCITGVSGSGKSSLINDTLYPIAANALNRASLMTIGEVKDISGLHLCDKVIDIDQSPIGRTPRSNPATYTGLFTHIRDLFSGTPESRARGYQPGRFSFNVKGGRCEACQGDGLIKVEMHFLPDIYVSCDVCQGKRYNRETLEIHYKGKNIHEVLDMTVEDACAFFAAIPVIARKCLTLMDVGLSYIKLGQSATTLSGGEAQRIKLARELSKRDTGNTLYILDEPTTGLHFHDTKQLLTVLTRLREQGNTIVIIEHNLDVIKTADWIVDLGPEGGSKGGKIIATGTPEMVAENPQSFTGQFLRQILSKSNELLLQKCK

SEQ ID NO: 61285 - protein, 512 aa, Legionella pneumophila
MQKANAKIQNINEIMFSDRVMLLNKNLLVSIPANFLCALIIYIDFNKTTTDQEMLSVWFMVGVTVFVLHGGLFLFNYYRSLPSKYLLKWLISVTAIYGALWGIAGSVLIPQNDLLNQMIVIIIIIGIASGGLHILQPSFLASLLFFTLTLIPLCVWFFQQSTLNYWFLGTALLIYFCFLLIISWMGYGLLNKNFKLRYENLDLINKLYAINANLEESELRFRSAFNSAAIGMAIVSLEGMWLKVNQSLCQIVGYSEEELLETNFQSITHPEDLELDLGYVRQLLEGDIRFYHMEKRYIHKNGSVIWILLSASLIRDLDNKPLYFISQIQNIDAQKRAEQELQHIAYHDTLTGLGNRKLLELSFDQALAHAKRHQTQIAIMFMDLDYFKNVNDKLGHDIGDLLLVEIGKRLQTILRSTDLIVRHGGDEFIIALTELSNVNQVIEIANKILIAVSKPITIKRYGISITGSIGISIYPYDGDDSDTLIRKADEALYRVKIGGKNNFQLFNTVLHK

SEQ ID NO: 61286 - protein, 246 aa, Legionella pneumophila
MNESQPKLKYKRILLKFSGEALMGKSQFGIDPSVLDSLARDIAELIHMGVEVGLVLGGGNLFRGKALSQAGVGRVTGDHMGMLATVMNALALRDALERIDLPARIMSAIPMLGVVDPYHRRKAITHLRNGQVVIFAAGTGNPFFTTDTAACLRAIEIGADIVLKATKVDGVYSADPLKNSDAKRYDYLTYKEVLTKGLEVMDSTAICLCQDQGMPLQVFDMAAPKALKRIVTGERVGTIVGANHDQ

SEQ ID NO: 61287 - protein, 291 aa, Legionella pneumophila
MSVLVDKHTKVLCQGFTGKQGTYHTEQALAYGTKMVGGVTPGKGGQMHLGLPVFNTMREAVEETKADASVIYVPAPFCKDSIIEAAEAGIKLIVCITEGVPVLDMLQVKVYIENNTQARLIGPNCPGIITPGECKIGIMPGYIHLPGKVGIVSRSGTLTYEAVKQTTDKGFGQSTCIGIGGDPIPGTSFIDALSLFEKDPKTEAIIMVGEIGGSAEEEAAEFIKSHVKKPVVSYIAGVTAPAGKRMGHAGAIISGGKGTAAEKYAALEAAGVKTVRSPADLGDAIAEVTGW

SEQ ID NO: 61288 - protein, 147 aa, Legionella pneumophila
MEKQSIRGKRRARKFALQALYQWLMSGTDLHEIEAQFRTINNMDKVDGEYFCRLLYGIPTHVEALEASLLPYLDREINALNPIELTVLRIGSFELFHCPEIPYKVILDESVSLTKEFGSQEGYRYVNGVLNNLAKQVRSVEVSLDNE

SEQ ID NO: 61289 - protein, 473 aa, Legionella pneumophila
MKSWSSEKISVLALVLLITGAIDSIRNLPGTALFGSTLIFFFIFSAIIFLIPVALVAAELSSTWSDEEGGIYSWVKHAFGENIAFFAIWLQWINTLVWYPTILSFIAGTISYLINPELAQNKYYLISVILIIFWSLTLIGLSGLRASATFAGFCAIVGMIVPMGFIILLAFIWLIHGHPIAIDLSLSNLLPQWKNTQSWVSLTAIMTSFLGMELAAVHVRNVNNPQKNFPKAMFFSVILILFTMILGSLAIAFILPKDKISLVDGVMRAFSNFLQVYDLNWLMPVLILLLLLGTLGSMINWIISPAKGLLMAAKHDFLPASLCHVNKHGMPAKILILQAILVTVLCSGFLLFPTVNAIYWLFTALSTELYMMMYVMMFIAAWHLKSKFSDMERPFAIPGGKPGYYLTCLLGLIGCTVTLWVGFIPPTESINIGGTAHYRMVFSLGIVLMLLPAALIYLRKRHITKSKALNAPV

SEQ ID NO: 61290 - protein, 596 aa, Legionella pneumophila
MSKTFITDVTLRDAHQCLIATRMRTEDMLPICNKMDDVGFWAMEVWGGATFDACLRFLKEDPWSRLRQLRQMLPNTQLSMLLRGQNLLGYRNYADDVVRAFVKLAVNNGVDVFRVFDALNDARNLKVAIDAIKSHKKHAQGAICYTTSPVHTLDNFLELGKKLAEMGCDSIAIKDMAGLLTPTVTVELYAGLKQATGLPVHLHSHSTSGLASICHYEAVLAGCNHIDTAISSFSGGASHPPTEALVAALTDTPYDTELDLNILLEIDDYFKAVRKKYSQFESEAQNIDPRVQLYQVPGGMISNLYNQLREQNALDKMDAVHKEIPRVRKDLGYPPLVTPTSQVVGTQAVINVLTGERYKTITNEVKLYCQGKYGTPPGKISSALRKKAIGRTEVIEVRPGDLLPNELDQLQNEISDLALSDEDVLLYAMFPEIGRQFLEQRKNNQLIPEPLLTQSSAPDNSVMSEFDIILHGESYHVKVAGYGMIEHGQQSCFLWVDGVPEEVVVQHSELHDKIERSSVNNKIGPGDITVAIPGSIIAIHVSVGDEVKAGQAVLVIEAMKMETEIKAPANGVVAEILCQKGDKVTPGQVLIRVEVS

SEQ ID NO: 61291 - protein, 734 aa, Legionella pneumophila
MVRVKDTTPLTPDGSIDVEMWLHHLGSKGYLDNLELVRAACTLSQLAGQDHATETGQTCLQQGLSMADLLADLEVDQETLAAAIIFENVHYADLSIDDVEEQLGHNIAKLVKGIEKMSAMNNFQALNKYPQNKNQIDNIRKMLLAMVDDVRVVLIKLAECLCILRTAGHLSETVRKQLATEAMEIYAPLANRLGIGAIKWEMEDLAFRHLHPEEYKAIAKGLKAKRLERDSFVNRIVEQLEHQIRATGARHFAVYGRSKHIHSIYKKMKRKNVSLDEIYDATAVRILVDTEAQCYEVLGMVHTLWKQIPAEFDDYIINPKSNGYQSLHTAVEGPEGRVFEVQIRTFHMHDLAEMGVAAHWKYKEGAVSQKESHERKIEWLRDVLAWHQEMAANKGVAENVTTEFLEDRVYVFTPDGDVLDLPHGVTPLDFAYHVHSNLGHRCRGAKVNGHIVPLTYQLKTGDRVEVLTGKEIKPSRDWINPHLNYLKTARAKAKVLHWFKMQDYEDNVRDGRELLEKELKSLGIKSDKLNEVITALNYKKADDLYASLGRGDIKIGQIVNRLAPPDTSEQNLQKFVRQQQKPEVTGSDLRIEGVGNLLTFMARCCQPVPGDEIVGYITIGRGVSVHRKDCPNIIHASEKQKRRFIQVNWGTATRENYVVDVLIKAFDRSELLKDVTSLLSNEKAHVYALQTHSNKHENMAYITLTVEIDGLNSLSRLLTKLEQIPNVLEARRQL

SEQ ID NO: 61292 - protein, 1294 aa, Legionella pneumophila
MLIYQGKEIVRFKEKTGGKNKSDVDGFYKDNDGGKFFIKKPGDPRELFTELFAGLLLKEFMKRGLIDESYFPSLICADVIQFEDKSYGLIQPLVSFDELHKVIGTSSGDGKDRNTLKETLFGPGYYAGITKQNKYFGLSMALMFSLLLGAHSVHSGNIVVLNGEEKEKSKQFGRIDWGDAFRYFAHPNNNDNLLYAYENRGWFNYKSLTKDYFLNYKKINGLFPAMAEKARQLQSKLNPELLVKIVTSALKNIPADLIDEKTKIQLAAYMCMDSFKEATFGTEGNCKDFAIAMATLLENRLGKIAVLKDMSPLSNPEELYQSILELKPLTLLMTSSTSFSETINQWADILKTTDMEKFSFDSNPINLLELVKQFNLYVDELAITCEANNVWAKERIDSTPNLFALYDNSGGEAIHGHAFVPYYKESIVLRRLFTVDPNTFNLSRFAAFEGPCQLYCKEHKDSAWVKIQTLLTLGNGIINTLKIIKQAQAFGIDEAVTENLKALKEQFIAFQLAEADIKESLKAPSFAEPLPNKESEFFYPIDEKALAKMNGYQLATICLEELNSPKPSPLIERILSNKKFWKRINSAFESGVFKGRTDDPAGKIAKIREWHQLLQISGKKTAGQIDELQKIVISLQSKIKRQTIEFEELEATLIQIKEKYQLLEKMAEQSEHEKSSAQSIIRSLNLELSQLKLQLQEQEKLQFQLKELKEKIHEQTTLSKRLGEELQTQKKTNTHQEETIQRITKEKSLADSSLESLRKELHELAKKERSLHKTLEEKQLQVQQLEEQLAEKEKENLALKKADKQSQHEKSLDKSAIESLTSELNQLKLELQKQETLQLQLKSLRKQIQEQTLVVEGLKEELQKQKKSNTHQEETIERITKEKSLADSALESLRKEMYELTRKNEENQLKLTKQVHSLSEQLEEKQLQIREFEKQLQEKEKRVEQSEKGKASAKRTVASLREQVSNLKLQLQQLGEVIQEKEKGSSLISQQSKQIIALQEIIEDQKRQLEELKIKIQELVSANQELGKQNQSLSKENLHNKNTVEDLKKKLNELNVQLEQLHQSSNEKEQTIRKLREELIKKDSSLKQNEEMQLAQKHLQEEIDRLQKEIKQQQLNTNQLESIIAQSKEAEKRYQQALQQKKGIYFARMERVSPIYLQIQQIEQKAKELEERRETEASTAAKTLATKLRLEIKNYLDNNESDEKSALNSFKINAKRHIENSKETLNQHREEWKYLLANVTLGVFLLGIGYLAAILINKATTGNYTFFSQTNSGKKLDALEKAISSTHSETLVYG

SEQ ID NO: 61293 - protein, 303 aa, Legionella pneumophila
MDSSHVTESQGTLLFNEPLAEYTTWRVGGPAARLYKPANIDDLALFLSRLPFDEPLLWLGLGSNSLIRDGGFSGTVILTQGCLKEMTLLSDNCIRVEAGVSCASMARFSARNNLSGGEFWAGIPGTMGGALRMNAGCHGGETWQSVIEVQTINRRGEIRTRKPEEFEVAYRHVAGLGDEWFISAKLQLSPGNKETSLQLIKDLLAHRAKTQPTNEYNCGSVFRNPPGDFAARLIESCGLKGVSIGGAVVSEKHANFIINHQGTATAANIEALIHLVQTKVREQTSIELIREVHIIGDANVQTR

SEQ ID NO: 61294 - protein, 1051 aa, Legionella pneumophila
MKIALFFIDRPVFATVISIIIVMVGVLSYFNLPVEQYPQVVPPTIQVYASYPGANAKTVAETVATPIEQEVNGVENMLYMDSQSTDDGQMRLTITFKLGTDLDQAQVLVQNRVAVVEPKLPEEVRRLGITTNKNSPDLMLVVNMYSPNGQYDQTYIGNYAILHIRDKIRRIEGVGNVLVFGASEYAMRLWLNPDLMNTFNLTANDVLAAVRAQNVQVASGKLNLQPQKKQYGFEYHIETKGRLVKKEEFENIIVKSGESGRIVRLKDIGRVELGTQNYLTKGYLDKYPAVALPIYQRPGTNALATAQEIIKTMKTIAKDFPPGITYDMAYNPTLFVQQSIDAVFHTIYEAIALVVLVILIFLQTWRASAIPVVAIPVSLIGTFAVMQAIGFSLNYLTLFGLVLAIGIVVDDAIVVVENMERNIQAGMNPRDAARKTMTEVGSALVAMGLVLIAVFLPTVFLEGISGRFYQQFGTTLAVATAISVFVSLTLTPTMAVLLLRAHHGTIKQEGLAWWKKPIYGFLHGFNRLMEGFSRQYGKLVATLTRKTALMIIAYGIFISITLLLFVYVPRGFIPRQDQGYFIVAVQLPPGASLSRTDAVINKAVNKILAIPGIAHTVSFTGFSGATFTNSSNAGAIFTPLLSFQERQRMGINYNDILKRLRQELSTIKEALIVVIPPPPVRGIGNAGGFKMMLQDRGGRGLDVLMEAAATMVNAANQEKATTSVFTFFENSTPRLHLKLDREKVERLNVPYANVVEALEVYLGSVFINEFNYLGRTFRVIAQADSEYRHTEDDILRIKVKSNSGDMVPIGSVAQIENTVAPSRMPRFNLYPAIDLQGDVAPGYSSDEALVTMEKLAQNNLPDGIGYEWTEIAYQQKMVGNTALMAFTLGVIFIFLVLAAQYESWSLPLAVILIVPMCLFSSMLGVKILGMENNIMTQIGFLVLIGLASKNAILIVEFARQLENRGYNLWKAAIQAAKLRLRPILMTSFAFILGVFPLIISTGAGAEMRRALGVAVFSGMLGVTFFGLVFTPLFYVLISRLSRYKRKLKDLN

SEQ ID NO: 61295 - protein, 384 aa, Legionella pneumophila
MNSQNKQNLVKTVAIVFFGIVFVYLVYDHFTRAQVATPAPPDVIVQKPKLMKMGQYVTQTGNTVAFQSVDLVARIEGYLDAIKFTDGAFVKKNQELFIIEPEPYLEQLRAAEAKVAAQKANYAYAKSEYARQQRMYKQNATSLNSVEKWKAKVEEAQAEVDKSEADATNAAITYGYTHVSAPFDGRMGRHLVDVGNLVGHGAATDLATIEQIDPIYVYFNLNELDLIRIRNAARKRGYKPMELVKIPVEVALQDEKGFPHKGTLDFVNTGLNASTGTMEFRALLPNKGYPLVPGLFVQVRVPISEPSPKLTIPDTSVQYDQIGPYVLVVDKDNYVLTKRVTLGGLENGVRAITKGLDAQDSVIVSGLQNATPNHRVTPKTEQPE

SEQ ID NO: 61296 - protein, 238 aa, Legionella pneumophila
MYSSNYIYQHDDLELHGFLAHEEGIKQSRPAVIVAHDWSGRGEFACLKAKQLAEMGYIGFALDMYGQGQIGSNNDEKMALMQPLYSDRSLLRGRLYAALEAIKSISVVDNNRIAIIGFCFGGLCALDLARSGADIRGAVSFHGLLNKPENLASGRIKAKILALHGYDDPMAKPEQVHAFCQEMTEANVDWQMHMYGQVKHAFTNPQAHDEHLGLIYDEVAARRSWQAMSQFLQEIFNV

SEQ ID NO: 61297 - protein, 658 aa, Legionella pneumophila
MNYRPDIDGLRAIAILLVLIYHGGLSLFPSGFIGVDVFFVISGFLITTIIHESLNKNDFSFFDFYNRRLWRLQPVFVALIVVTTLLSVLFYLPDDLIEFSRSARKASLFISNLFFNKTTTGYFSPDTHQLPLLHTWSLSIEWQCYLVLPLAMYGLYRFLNKGQVIYIVHGLAILFFLLALYYSQAAPAQTYYQFSSRIFEFLIGSCIALSPRIEFSINKSILVILGLSALFFIIYTATLDNILLGYPNWRTLFVCLATGLLIALGTNFPSLAIVNALSFRPLVFIGVLSYSLYIWHWVVFSILRYQNIEERSEVLFIVYGIVFVLAYLSWRYIEKPTKKFRHIPFRYTVVILLLIPVLFSHLSSLVIKSHSGYPQRFNQELVRVYKQLKSYESPYRALCIDNTRADNAWKCKIGAKEQGGRTGLMIGDSFSNHYWGFMDVLGKAAGVSILAQGTSSCISLPGIYLYDWWHFKDKIYQDCYEQTEKYYRMIQKNHYDYVIIGQVWENYVSAHIINQRGDDYSAELTKKRLADALDRALGVIISSGAKPVLIESTAVTHGNLHQCFFKHIKLRQSYNSEECRFTLTSSDNETWLNQLFDNMRRKYPQLIIIDPKQVQCRDNVCYSDLNGIPVYRDEGHITDYASYQLGYLYLREFENPLI

SEQ ID NO: 61298 - protein, 219 aa, Legionella pneumophila
MAAGLEPQDRLKFRDSKKYKDRISQAQKATGEKEALIVVKGFLMQQPVVVSAFEFNFMGGSMGATVGEKFVRAVNVAATEKRPYICFTASGGARMQEGLFSLMQMAKTSAALAKFAETGLPFIVVLTDPTMGGVSASFGSLGDIIIAEPNALIGFAGPRVIEQTVRQTLPEGFQRSEFLLEHGHIDMIVERKHLRATISELVSKLTHKGAESFFARAME

SEQ ID NO: 61299 - protein, 387 aa, Legionella pneumophila
MSQHFDVLVIGGGIVGLTAALAMAQRHYTVAVIDAGTLMVNTDKSDLRVYAINKASKMLLSELEVWQHLNDARVAPYNKMHVWDGVSGAYIDFDSRSIAEPNLGAIIEESILKQALLRRISSESKISLFPQSVIDEVCHLERSIKISGQNTAWEGQLLMIADGANSPMRHKLKVDVTSWSYEQQALVATVSSEKSHQNTAFQVFHPDGPLAFLPLSNLNQCSIVWSTHADNAMRLKLLDDNEFSRELTKAFGGQLGQIKVVSSRHQFPLQMRHVKQYAGHRWLLLGDAAHTIHPLAGLGLNVGLADVKSWLTCLEMGKDELISKKVLGAYQRERKHSVWQIILLMEGFKRLFGTSASPVTSLRSLGLRACNEFIPIKRLFMRQASGL

SEQ ID NO: 61300 - protein, 100 aa, Legionella pneumophila
MAKKSMLMRESKRAKLVEKYRQRRNELKQLIKSSDDFQVIMESQAKLAKLPVNSNPVRYVTRCKQCGRPHAVYRKFNLCRICLRQQLMVGNIPGGRKSSW

SEQ ID NO: 61301 - protein, 393 aa, Legionella pneumophila
MGSKLHSMILWGPPGVGKTTIARLTAQAFDCEWIALSAVFSGVKDIRAAVEKAQEYLIHDKQTILFIDEIHRFNKAQQDALLPYTESGLITFIGATTENPSFEVNSALLSRAQVYVLKPLSEQELKLLFLRAHQRALSSLQFTEEAVDFLISCADGDARRLLNLLEQTKTACLTIKTAVVDVELLHNVIVQNSRRFDKGGEAFYDQISALHKSVRGSNPDAALYWLCRMLDGGVDPYYLARRIIRMSWEDIGLADPKAIQIANDAAATYERLGSPEGELALAQAVIYLSVAAKSNAGYVAFNQAMEFIKRDKSREVPIHLRNAPTQLMKKLGYGHEYRYAHDEPHGYAAGECYLPEGMPEVNWYNPVQRGLETKIAEKLAFLRQLDKDVKKKI

SEQ ID NO: 61302 - protein, 308 aa, Legionella pneumophila
MAKHQSVLLHESIKGLAIKADGIYFDGTFGRGGHSREILNHLSDKGRLFAIDKDLDAVQYAKDYFGLDKRFQIFHGSFAQIKEFASQAGVIGAVDGILLDLGVSSPQLDNPERGFSFMLQGPLDMRMDLTQSINAANFVNEAEVNELAHVFRAYGEERFAGRIAKAIVDARKLKPITTTLELAEIVKEANPKWEKHKHPATRVFQAIRIHVNQELTDLSNCLEQCLDVLGPGGRLAVISFHSLEDRIVKQFMRDKEQGNRPPVEVPIKYEELKTNFKKVGKAVKPQSSEIKENVRSRSAVLRIGEKLA

SEQ ID NO: 61303 - protein, 398 aa, Legionella pneumophila
MINSKLIGGILLIVGTSIGGGMLALPVSTAEVGFANSLFFLFFCWLVMTAGALLILEVNLRLPAGSNMISMAKSTLGLPGQVIAWITYLLLLYTLLAAYISGGSDVFSSLLHKAHIDLPNWITSVIFTAMFSLIVYSGIRSVDYVNRGLMFGKLGVYILLVIIISPHVSTAGLTGGSAKAFTGTLMILVTSFGFASIVPSLRDYFNDDIRSLRRVILFGSLIPLFCYIVWDAVIMGVISREGENGLLSLMNSDHATSGLTEALSQSVSSQWISGFFGFFTSICMVTAFLGVSLGLFDFLADGLKLKKSGNQGKYTLALTFIPPLAVVLFNPGIYLHALSYAGVCCVILLLLLPAIMAWKGRQTCSQSPSETHLIPGGNPALSLIGFIAIGLLIIAIMY

SEQ ID NO: 61304 - protein, 417 aa, Legionella pneumophila
MDYSIYLLFAALILCFLMTWGVGANDLANVMSTTMGSKAVTVRQAMLIAIIFEFAGAFLGGEGVTETMRDGIINTSQLSNEPLILIEGMLCVLFACTIWMNLASYLGVPVSITNALVGSMVGFGTIVLGPDAIHWNQVARIAIGWISSPLISGITAYALFISIQQTIFVKSNPLTKAKLYIPIYLFLIGFILSFITVFKGLNHFDIHLNLKQDLAVTLATSIIITILGMIFIKRIPEYHKIRRRERFIQVEKYFAVLMAMTACAMAFAHGSNDVALAVGPLSIVHSLVMHSNQIFDADNYPSWIILLGCVGVVTGFLMYGRKVIETVGSSITALTPSRAFAATLSAATTVVVATSTGIPVSATQTLVGAVLGVGLARGIGALNLIVIRNIFMSWVLTLPAASMLTILSYKLLHALLG

SEQ ID NO: 61305 - protein, 523 aa, Legionella pneumophila
MRRQWYIGFGVILLCLFALFAMLQDIVWFFAFLIPIVILWIYDVLQTKHTILRNFPVLGHVRYFLEFLRPEIQQYFIATDESELPFNRETRSMIYQRAKNVRDTIPFGTERDILSVGYTWALHSLSPKHSSEVEPRIDVGGPDCKKPYNASRLNVSAMSFGSLSANAIMALNKGAKLGGFYHNTGEGGLSPYHLQGGDIVFQIGTAYFGCRDDKGDFDENEFIKEASRDEVKMIEIKLSQGAKPSHGGILPAAKLTEEIAKVRKVPMGKDVLSPIAHTAFDNPVGLLHFVKRLRDLSGGKPIGFKLCLGRRHEFMAICKAMLKTNILPDFITIDGAEGGTGAAPVEYTNFIGTPLEAGLVFVHNALIGTGVRDKIRVICSGKVTNGFDLLTNIALGADICNSARAMMMAIGCIQSKQCNANTCPTGVATQKKRLQYGLVVDQKKFLVANFHNNTIKSFLEMVGALGLNNPSDLKPSHIMRRIGVDEVKSFDQIYTYVKPGQFLQGDIPEDYRIHWEHANPDKF

SEQ ID NO: 61306 - protein, 453 aa, Legionella pneumophila
MKLTFLGATETVTGSKYLLTIGSKKILIDCGLFQGYKELRLRNWAPLPIDPHDIDAVIITHAHIDHSGYLPLLVKNGFQGKIYTTPGTKALCSILLPDSGHLQEEEARLANKYGFSKHKPALPLYTEKEAQTALNYFETIDFDTPHQLFHDFSFEYHRAGHIVGAAMVKIKTQKGSIVFTGDIGRPYDPVMKAPAFIQETDYLVMESTYGDRLHDATDPLPQMAQVINQTVKRGGSVIIPAFAVGRAQSLLYFIYELKRQGAIPKNIPVFLDSPMAIDATHLLCTYKEDHHLTAEQCQGLCRIATYVNTPEESKEIDRHHMPQIIIAASGMAQGGRILHHLKVFAPDPKSTLLFTGFQAGGTRGARIVNGERQVKIHGSLIPIRAQVVVMSSTSAHADYQELLGWLKHFARPPKKVFITHGEPHSAQSLKEKIEKQFGFSCTIPSYLQTEDLL

SEQ ID NO: 61307 - protein, 673 aa, Legionella pneumophila
MNDQGIKESIETLKEQIRKYDYHYYVLDEPLVPDAEYDRCFKALQQYEEQYPQFLSPDSPTQRVSGTPSDAFMPVAHKQPMLSLSNVFTTDELKAFIKRAIEKLDEPNQQLVFACEPKLDGLAVNMTYEGGILTHAATRGDGAVGENITANIKTIASVPLRLRVSNPPKLIEVRGEVYIPKADFEAYNARARELGEKTFANPRNAAAGSLRQLNPEISASRPLAIYCYGIGACEDYKLPNSHLEQLNLLKEFGFRVSPETRRAVGVEGCLDYYQYMLAKRNQLPFEIDGVVYKIDSISLQQQLGYVSRAPRFACAHKFPATEEMTRLIAVDFQVGRTGAVTPVARLEPVSVGGVTVSNATLHNFDEITRKDIRIGDTVIIRRAGDVIPEVVSVILEKRPANARMIELPKNCPVCGSEVVREADEAIARCVGGLYCKAQLKRMMWHFASRKAMYIEGLGSVLIDQLVDEGIVHHLADLYELDLQTLANLPRMGEKSAKNLLSALEKSKKTTFNRFLYALGIREIGEAGARVLAEHYCDVESLKAATIEELMTLNDIGPVAASHIVHFFAQAHNLEVIDRLLELGIHWPKPEKIQVNQQNPFFGKTVVLTGTLSTMGREEAKAKLLALGAKVSGSVSSKTDYVVAGSEAGSKLIKATELGVAIIEEDEFLKWVNS

SEQ ID NO: 61308 - protein, 324 aa, Legionella pneumophila
MPDITLVEAVTQALAYELAHDENVVVFGEDVGKNGGVFRATVGLQDRFGENRVFDTPLAESMIAGLAVGMSIQGLKPVAEFQFMGFIYPAMNQIISHAARMRNRTRGRLHCPLVYRAPFGGGIRAPEHHSESTEALFAHIPGLQVVIPSSPKRAYGLLLAAIRNPDPVIFLEPKRIYRLVKQPVPDDGQALPLGKCFTLQQGDDLTLISWGASMHETLQAAKQLTDEGISCDVIDVATIKPLDIETILSSVEKTGRCVIVHEGAKTCGVGAEISAQIMEHCMADLLAPVQRVTGYDTVMPYFQLEKQYIPSIARIKNTVMSIME

SEQ ID NO: 61309 - protein, 260 aa, Legionella pneumophila
MVVVKKREETQKDERARAIENNPCSICRSLGLPFCRGHGGGSGGGGSDSASDDKVDDNDHQLLAPKNPANVTNIEQLLLHSGLWHLPEDEDFVFEFKDPLALVNMTLNMELGLLVLQGKRELGNEEQNALDELYEMIAKEFNLFKNSIKDPQVPLETITLAREGNSLTIKIPSPKYYDLFVQQLMDKNLLPSNTLALQHQNQSVKYPEKSKATMEKDLGRGRILNHPLAKSHFDYLARRALKINPGCGIIKFFSPKAKGD

SEQ ID NO: 61310 - protein, 70 aa, Legionella pneumophila
MEVWALEAYGAAYTLQEMLTVKSDDVGGRTKIYKNIVDGDHRMDPGMPESFNVLLKEIRALGIDIELEHD

SEQ ID NO: 61311 - protein, 338 aa, Legionella pneumophila
MLVLINTIQEQASEAIKQATDIVALEQIRVDFLGKKGKLTELLKGLANLSAEEKPKVGQLVNQAKQGISALIETKMIELKEKQLLAKLAAEQIDVTLPGRNHSTGSLHPVTQVKHRINDYFSRLGFDIVEGPEIETEFYNFEALNIPGHHPARAMHDTFYFGDGRLLRTHTSPVQIRTMEQRKPPFRLIAPGRVYRCDSDVTHTPMFHQVEGLLIDKQATLAGLKGLLQDFFAYFFGRELALRFRPSYFPFTEPSAEVDIECTQCNGKGCRSCKFTGWLEVLGCGMVHPNVLIAVNIDPNEYHGWAFGMGMDRLAMLYYGIDDLRMLFENDLTFLRQF

SEQ ID NO: 61312 - protein, 160 aa, Legionella pneumophila
MDIRKIRKLIELLEETGISEIEIKEGEESLRLSRHSNIVAETAPQIHYVAPSAVKQTASAPSSNTSTTESHVIENKQVTSASSGHKIRSPMVGTMYTAPSPESPPFVTVGQSVKAGDTLCIIEAMKMFNEIEADRAGKIVEILVKNGDPVEYDQALFIIE

SEQ ID NO: 61313 - protein, 305 aa, Legionella pneumophila
QKYKTSQGVTAIKDGIKSSGQDHERLPKPKWLRIVNHTTPAYSQVKEQVQKHRLATVCEEAKCPNISECWSHGTATIMLMGAVCTRACRFCSVDTGNPHGWLDAEEPENTAETVALMNLDYVVLTSVNRDDLPDGGANHYAKTIRAIKKRSPRTKVEALTPDFQGSERDVAVLLDSGVDVFAQNVETVERLTHPVRDNRAGYQQTLNVLAFAKKYRPDVLTKTSLMLGLGETDEEIIQTMDDLRTHHVDILTLGQYLQPTKNHLPIARYVTPETFSELRQIGLKKGFFEVASGPLVRSSYRADRV

SEQ ID NO: 61314 - protein, 145 aa, Legionella pneumophila
MEIKFLLWGAHRYPFILVDRVIDYKVMEYLIAIKNVTINENFFTGHFPGNPIMPGVLMLEALAQACAILASLSRQPKEGHEFLHYFAGIDNARFKQVVTPGDQLRLEVRLAGQKRDFWRMHGEAYIGDKLACSADLLSAAKEIKK

SEQ ID NO: 61315 - protein, 254 aa, Legionella pneumophila
MSLDKHFNDLLDKLLSNQDITSISNAQLMHCIDLTLLEADASLEALHQLQSQACQNNVAAICVLPKHLHVFKPNSKIKLATVINFPLGNDDLLVSLAEIDNAIQLGANEIDYVLPYQYYLRGNKQKALNHCDVIIQTCKKHQLTLKIILETGLFPDMESIYQLSSEIIALGGRFLKTSTGKTPQGATLAAVFAIVSAVMDSTYASSCGIKVSGGIKTPLQAQQYAQLAELLMGKAIHKDWFRIGASTLLEKLLS

SEQ ID NO: 61316 - protein, 164 aa, Legionella pneumophila
MMVAHTAQQLDLREKLLTNGVHSLSDIELLAVFISSGNNKKSCLQLAYELTKHLGNLRNILNADLQSFKSIHGLGEVRYAQLQAAKEICHRSDFIHLQKEIRLSNTQQTYAFLKKRLRDYKNETFAALFLDNQHRIIAYEELFSGTINTATVYPRPIVERVLQL

SEQ ID NO: 61317 - protein, 199 aa, Legionella pneumophila
SAFFLKYHMDWMMPVVAVMLVLGGLGGVSNWIIAPTKGLLVAAEEGNLPEVFQRTNGKGAPAMMLYTQATIVTVLSALFLFMPSVNGSYWLLTALAAQLYMLMYLIMFVAAIKLRISQPYHPRPFKIPGGMAGMLFVAGIGIIGVVTTLAVSFIPPEGINVGSATRYELTLIIGLLLMCAPPFIASWLQAKEADLEPAV

SEQ ID NO: 61318 - protein, 404 aa, Legionella pneumophila
MSALFTSNKRVVSGMRVSGRLHLGHYHGVLKNWIKLQHQYDCFFFAADWHGLTTQYEDPNFIEKHLWDMIIDWLACGVNPGLCKIFIQSWVPEHAELHLLLSMITPLGWLERVPTYKDQQEKLKEKDLSTYGFLGYPLLQSADVLLYHADYVPVGEDQVAHIELTREIARRFNYLYGREANFEELAAAAIKKMGKKNGKIYTELRRQFQEHGIHESIKTAQALLEDQPNLSIGDKERLLGYLEGSGKIILNEPQPLLTETAKMPGLDGQKMSKSYHNTIMLRDEPALVEKKILTMPTDPARVKRTDPGEPEKCPVWQFHKVYSNEEVKDWVQKGCRTAGIGCVDCKRPVIGAIHQELKPIQEAISDYEADLGSVKRIVAEGSEAAREEGNKTLNTVREVMGLDY

SEQ ID NO: 61319 - protein, 62 aa, Legionella pneumophila
PKLKSHRGAAKRFRKTASGAIKRRGAYRNHILTKKSTKQKRHLRVEAGTLKPCDARLAERML

SEQ ID NO: 61320 - protein, 365 aa, Legionella pneumophila
MDDYMLGKDNTPQPKELKEIQPKVKMAQSWTTPVGKAHKTNEYLNIKPAIRGDIIYTADASGLVQAVNRKDGQIKWSTALKNNIVSGPTVAAGYVAVGTNASTLVLLNQSDGKEIWQNKVSAEVLAPPAISHQKVIAKTIDGKVYAIDAVNGKQLWVADHGAPSLVLKASSSPIIVDNLVLVGFSDGKLDALELQTGRLIWQRSIAYGTGASDVERLVDIDSDPIISNNVAYLATYQGYVGALSLSDGQFIWRKPASVYKNMLLSHNNLYFTDSNDVLWSLNSSTGQVNWKQTSLKARGLTAPALVGGNLAVGDKTGYLHILSTQTGELLGRSQLSGGVTVSPSVSGKNMYVLTNNGMLNQLSVS

SEQ ID NO: 61321 - protein, 201 aa, Legionella pneumophila
MSVLVGRKAPDFTVAAVMGNGEIVDKFNLHEHLKGKYGLVFFYPLDFTFVCPSELIALDHRIEEFKRRNVEVVAVSIDSHFTHNAYRNTPVKNGGIGPVRFTLAADMTHSICQSYGVEHPVAGVAFRGAFVIDTNGMVRSQIVNDLPIGRNIDEILRIIDAVQFFEENGEVCPAGWQKGQAGMKASPKGVAEYLSEHSESL

SEQ ID NO: 61322 - protein, 624 aa, Legionella pneumophila
MNLEQLYDVIVVGGGHAGTEAALAAARLGVKTLLLTHNIDLLGQMSCNPAIGGIGKGHLVKEIDALDGAMAKAADQAGIQFRILNASKGPAVRATRAQADRVLYRKAIRTQLQSQANLTIFQQAVDDLKIEGGLVTGVVTQMGLTLKARAVVLTVGTFLGGKIHVGMNQYAGGRAGDPPSIALSKSLRDLDLPVGRLKTGTPPRIDRRTIDFSQMVEQPGDTPVPVFSYLGAASDHPQQVPCHITHTTEATHDIIRNNLDKSPMYAGVIEGVGPRYCPSIEDKIVRFADKTSHQIFVEPEGLTTEEIYPNGISTSLPFEVQVQFVRTIKGFENAHITRPGYAIEYDYFDPRGLTSFLQTKAIPNLFFAGQINGTTGYEEAAAQGIIAGMNAALQIKDQELWCPRRDEAYIGVLIDDLITCGTQEPYRMFTSRAEYRLLLREDNADLRLTEKGRQLGLVGDERWDSFSKKREAIESTQALLYNSWVRVHHNDLFKETLFNPMQHDCRAVEFLKRPEINYQHLLMMDDLNLPELPQEITEQIEIQNKYAGYIDRQQQEIEKLRKHENTLLPETLDYNDVVGLSSEVIQKLNRIKPTSLAQAGRISGVTPAALSLLLVHLKKSRLPV

SEQ ID NO: 61323 - protein, 931 aa, Legionella pneumophila
MAEYKDTLNLPNTSFPMKASLSVREPEMLADWQAKGIYQKIRKARVGSKRFILHDGPPYANGHLHCGHALNKILKDIIIKSKTFSGFDAPFVPGWDCHGLPIELNVEKKVGKAGSKISPREFRAKCREYAASQIDIQRDEFQRLGVLGDWYNPYVTMDYHYEANIVRALGLMIKNGHLQQGFKPVHWCIDCGSALAEAEVDYEDKTSPSIDVAFSAVNPSEFLNCFGTQPAVKPLILPIWTTTPWTLPANEAVCLHPEIDYALIDAGNSYYIVATDLVESVMARYGISHYKTSGSAKGRVFEHFKLQHPFYKRQVPVVLAEHVTTESGTGCVHTAPAHGPDDYLVGQSYQLPLINPVMANGCFAENVELFAGISVLKANETILTVLSERNVLLASESIRHSYPHCWRHKSPMIFLATPQWFVSMDKSNLRQAIINEIDKVNWVPDWGKARISNMVENRPDWCISRQRSWGTPMPLFVHKTTRELHPDTLELIEKVAVMIEKSGIDAWFDLDSSELLGDDAKHYDKITDTMDVWLDSGISHYSVLKHNNDLDFPADVYFEGSDQHRGWFNSSLTTAVAMYGVAAYKTVLTHGYTVDAEGKKLSKSKGNYVALDKLVNQHGADILRLWVASTDYRHEVSISEEIIKRNADAYRRIRNTARFLLANLFDFNPASDCIDAKELLELDRWALKRCQLLQEEIITAYENYHFHLIYQKIHNFCAVDMGSFYLDLIKDRQYTTAKDSIARRSCQTAMYHMVKAFTIWLAPILSFTAEEIWQTIPGNNSESIFIEHWYDAWPTIDAVNMEDWEQLHIVRDEVNKALEETRQRGEIGSALAAEVTVYADAKALPKLTRLGEELRFLFITSEAKACPISQSPKGLAVTDCGVSIQVTASVHEKCARCWHRREDVGQNQEHPELCLRCVGNISGYHEERLYI

SEQ ID NO: 61324 - protein, 864 aa, Legionella pneumophila
  MISC_FEATURE (178)..(178): X=any amino acid
  MISC_FEATURE (222)..(222): X=any amino acid
  MISC_FEATURE (234)..(234): X=any amino acid
EQRSQATDPAESFIVQAPAGSGKTEILTQRFLRLLSTVQSPEQIIALTFTRKAASEMRERIVQALHMAASNQPAVSAHQQSTLNFAKQALQRNNQYQWDLLEQPNRLKIITIDSLCQSINRAIPLLEKQVAYPDISETPDSHYISAARCCIQYAIATPEYQEAIKTLLLHVDNKQNDXFNYSRHFLAKEINGCRHYFWHVNKKSQLLSKLYALLNSMNSLVXEIACHRTWLKNXCFCRVELAVIENKPDSPRFILREWYEFQKCDQQIAGALSKLLLTSDNQLRKSFDHHVGLVKKNCAPNEFTRIKTASSDLFAKLQDCPDFLDALLKVNQLPTPEYDKEQWDVLQALFLLLPLLVGHLQVSFGEHNEVDFTAISQQALAALGDLDNPTDLALYLDHSIHHLLIDEFQDTSITQFELLTKLVQGWLPGEGKTLFLVGDPMQSIYRFRQAEVGLFFQAKEHGIGPVRLKSLELRCNFRSTETIVNWVNDHFSKIFSQQVDIESGAVSFHPSVHVIEKNESSTIQAVQFKNREQEARHLIEIINSELNRNPEQTIAVLVRTRTQLPEIISLLRQNNIPYQGTDIDLLANLVHLRDVWSLAHALLFPGNRLSWLSILHSPYVGLGLSDIHCIAQYNSRKSIYHNLLHLDKIQDISEEGRIRANFFIQIMNQALLCRSHSRLSDWIADTLKNLHVEKILDKAQLNDLEQLWMLLDQYEKEGRIPDMNEFLNEFNKLYAQQTTPSRLQIMTIHKSKGLEFDTVILPGLGSQANRGESPMLRWLKLPTQDHGNLLLVSPIKSANQDNCPLYDYLDQLDEEKSAYEAQRLLYVAVTRAKSRLYLLDHSAKSYKSSFRNLLKYQEFIADPD

SEQ ID NO: 61325 - protein, 350 aa, Legionella pneumophila
MHHLKLAERLGIQFPIIQAPMAGGATTPELVAAVSNSGGLGSLGAGYMRPDEIRQAIIKIRQLTSKPFAVNLFIPEAHHATPEQIQNACDDINLCCTELNIEISPVSKPYSLPFVDQMQILIEEKIPVFSYAFGTLEPMWIKQLKKNGTFLIGTATTIHEARILEASGIDAIVAQGSEAGGHRGTFIGNAEEDLIQLSELIPQLVETIRIPAIAAGGIMNGKGIVSAINAGASGVQMGTAFLSCFEAGITYKYKQTLLSQQQDNTVLTRAFSGKLARGIRNKFIICMDNRKINILDYPIQNALTQMMRQKAREKDNIDFMSLWAGQSAHLCRSMSASDLISTLVIEAEIR

SEQ ID NO: 61326 - protein, 52 aa, Legionella pneumophila
MITGINHITLAIKNLNKSFAFYAKILVLKQMLPTTILRLKSLIPELVNAGKA

SEQ ID NO: 61327 - protein, 250 aa, Legionella pneumophila
MALHLGVITLLPEIIQGIHYGVTGRAIEQGLVKIDCWNPRDWSSRPYKQVDDKPYGGGPGMVMMYEPLHAAIKHARSEMKENCKTIYLSPQGKVVRQNDLKQIAAQKQSLLFVAGRYEGIDERIISHHVDEEWSLGDFVLSGGELAAMVFIDAIIRLIPGSLGHLGSAEQDSFMNGLLDCPHYTRPATINGLDVPDVLLGGNHKEIERWRRKQSLGKTWLKRPDLLEKVQLSETDKQLLAEFKCEHGDSC

SEQ ID NO: 61328 - protein, 213 aa, Legionella pneumophila
YTNPISVPLYPSPVPYADVVTTTTHKTLRGPRGGLILCKENEEIEKKLNSSVFPGMQGGPLMHVIAAKAVAFAEALLPEFKTYQQQVLANARTMCSVLQSRGYDIVSGGTDNHLLLVDLINKGITGKEADAAVGRANITVNKNSVPNDPRSPFVTSGLRLGTPAATTRGFKEREITLLSNWVADVLDNVHDETNISRVKTQVLLLCREFPVYA

SEQ ID NO: 61329 - protein, 469 aa, Legionella pneumophila
MTKNVVLDAIKEHDAKFVDLRFTDIRGKEQHITIPVSAVDDDFLENGKMIDGSSFKGWQKIHQSDLALVPDLTSIKPDPFFQDNTLFIRCNVVDPQTMMGYDRCPRSIAQRAENYLQSTGIADGVNFGPEPEFFLFDNVQWETTISGSFYKIDSDEAHWNSGKEMEGGNIGHRPPLKGGYFPVPPVDSSHDIRSAICITLESLGMVVEAHHHEVATANQCEVATRFNTLTKKADELQILKYVIHNVAHNYGKTATFMPKPLVGDNGSGMHCHQSLYKDGYNLFSGDQYSGLSETALYYIGGIIKHARALNAFTNPSTNSYKRLVPGFEAPVLLAYSARNRSAAIRIPHVSNPKARRIEVRFPDPTANPYLAFSAMMMAGIDGIQKKIYPGQPMDKDLYDLPPEELVDVPTVCSSLEMAMDHLRADHEFLLQGDVFSRDFINNYIQMKEEEITKIRSLTHPYEFELYYSL

SEQ ID NO: 61330 - protein, 150 aa, Legionella pneumophila
MTKAFDSALRLLTRREYSAMELCDKLKQKGFSTNDVQNALYECQRLGYQSDVRFVENYIRVRIHQGYGPLKIRQELKNKGIDPDLIQSVLHQEKDNWVNYALRAWEKKFKRQDDFSYSEIQKQQRFLLYRGFDRDVISKVFKEVKSSYLI

SEQ ID NO: 61331 - protein, 197 aa, Legionella pneumophila
MKRIYRHFIAPILAVFVLSSYVYAEPQTLTLDNQHTYVLWKIKHLGFSTQAGKWYASGQLVLDKDNPQQSKVNVTIKVDDIVTGIPELDKHLKGKLFFDTKQFPTATFVSNRVEVMGKNKAKVYGMLTLHGVTKPIILNVILNKAGINLLNDRETAGFSATTSLKRSDYGIKALIPEVGDDVEIEIEAEAYLDKKYG

SEQ ID NO: 61332 - protein, 308 aa, Legionella pneumophila
MKNKIVLLAPVSLSFLFSFSTYAADYEFNGLSLSASLGILSGKAHEYVYHPETDTKLSQLDWRIKNAPIIKGELNYDVLDWLSMNGQGWTTLVKNKAAMDDYDWLNPYQDTWTHWSHHEDTHLNYANELDMSLRAWLMQKQNYKLGLATGYQWNSFDWKATGGCYQYNGGLYAGCFPGDQPGIGYQQKFRTPYVGLAGRYFINNFEFSGVLKFSDWVSARDHDEHYARNLTFNERGNSSRYYAATIHSGYFLKPNTKIFVEASYNHYPNGRADTEIIDNDTGERSYFGDSAGLSNKHYTVALGLQYLF

SEQ ID NO: 61333 - protein, 487 aa, Legionella pneumophila
MKTNIPTLSKPIKDSGYRRGLKDRHVQLIALGGIIGSGYFLGTGEVINLVGPSVFIAYLLGGLIIYLTMLCMGELAVAIPISGSFVTYTSDFISPTVACGVGWSYWITWVAYIPAECVAGGIIMELFTGVSGYIWVVCFGLIITYINLAKVDTFGEIEFWLALIKIISLLAFVFLAILIFFGLIHGSEPPGIIGFKYLLGDGGLLPNGAMSLLTAMVLLLVNYQGSEIIGLAAGESENPARMIPHAIRNVTFRILFLYIIPVFCLVLIFPWQKAGLSNSVFADALNFYGLKWAGAVTSFVTLSATLSCANSGFYGAVRSLNALARDGMAPHVLAKFNQNSVPQNAVIATLIGVWILLGVGYFFGQTKLYIALLLVSGFTGTLAWLSLCIAQISFRNRLYKAGYSIKDLRYVTPYSPYTGILAVILMVGSLFFLLLNKDPIYKLSFIIGVVSFIIPVIIYKVFDLSKVRKKALHVKSRVKFQDLFPPQ

SEQ ID NO: 61334 - protein, 699 aa, Legionella pneumophila
MQEKIINLGKGLKKVNEGIKKHISRAEEFLYLANQWEKENIKINDLLNGVQFTVNDKKMSGQEIKEELSNLIERYNNFLKKNLKGERSETLELKEIQQQLTNLYNAVNDIYTYLSINKTEFFLEAIKSCYKKDQRMGSTIQFVLKIADHLSKERLQFNLNLNSQFAEASESFQEVTTKFYREVATPRIESAQKLLELMNNFVDQYISQGASPEDAIKKLKPFEKYFTIEISHYEEFGHLVYKTNFNCNPALFDVNPIEFLNELFVQFYKDTTLSSRSKTALKQVLDKFEITYEVPKTWYGYIGWDIPIVTDKNSVLVTYDKQAYYRYHQESGQREMEFFETIERCLDKSKDIIIATKKENLKDQKEFSKLIDKAIKELEETKKKRIFQKEPHELVTSIINKSIKLLQDLKNNMPLRREDLVMVILSTENALNAAKSKLKPQEINLSEPEKCIKNFKKILAIKQKEELCFYKSDEEQSIFSKHINSELRELVESYQVQKRSEKELVIEPEKMNSPQRIEPKEEDKKIDLNKKMNLYRVQKIMKNFVFEYCGYKGGKKVKEGGATIEELKNKLKDFRDYFQIEIVMNDKSGSEELNIIFNYQNIKNKNPHDLFNELFKKFTEDIGYSGMGSRSIEALKRALAKNNITYTNGYYGKTATLTSLLWSKEPPVITDEKNIFKLSDEKHLSENKEDIRGKGITNI

SEQ ID NO: 61335 - protein, 249 aa, Legionella pneumophila
MPRLMLSDELWSKLKGIMLQHKIYDKPNLRMIVEGMLYHMRVGCPWRDLPAAFGCWNSIYQQFNRWSFKDKLMQIFKALVHAPDLEWEFIDGSIVRAHQHSTGACSTESEAIGKSRGGNTTKIHMAVDAFGLPIEFQLTGGKVHDAKAAPELIEQLPKSDYVIADKGYDSEDIREQIREKGSIPNIPRKSNSKTGNKDIDWYLYKYRHLVENMFACLKHFRAIATRYDKLKRNYASMIAIACSCMWLPM

SEQ ID NO: 61336 - protein, 247 aa, Legionella pneumophila
MVRLRIYLCSLLLVIPFYRAYALNLTIGTLSYNPPFETQVNDSSKKNEFYGFEIELMDEICERINAKCQYKPLLFEQILAEINSGAINLGIGSINITPERSERFLFSLPYKASYHQFLIPSNSNIKKIDDLKGKTIGIHLGSPTADYLKAYFNNNIQFKYYETFMDLLNGLTDPQVSAIVTNSDQAQYWASSTPDCKLLGDSFPFGVGFGVVARLDQAELIEKINQALIEIENDGTYLKIYNLFFQP

SEQ ID NO: 61337 - protein, 156 aa, Legionella pneumophila
MKIKNIPYYVATRVVKRIQSWLGLNTLGARAIVTNAEGHVLLVKHTYQPHWYLPGGGVKKGESTKAAVIRELHEEVGLVVAEQDVILFGIYHHKYLGVNDYPVIYIVKNFTSHVTHSGEIEQIGWFSLDALPEMVSPGTKRRLGEYFDNNPISEKW

SEQ ID NO: 61338 - protein, 403 aa, Legionella pneumophila
MFSQSQQKIVCVLYDDPKGGFPPNYARESIPELKQYPDGQSLPNPDSIDFIPGEMLGSVSGELGLRQFLESNGHQLVVTSDKDGSDSVFARELKEATVVISQPFWPAYLTRDRIESAPKLKLAITAGIGSDHVDLQAAMEHNITVCEVTYCNSISVAEHTVMMILALVRDFIPQYNTVIDGGWNIADCVSRSYDLEGMQVGCVAAGRIGLAVLRRLKPFAVKLHYTDRHRLPVQLEQELNLTYHPSVESMVKVCDVVSIHCPLHPETEYLFDERLIKQMKRGSYLINTARGRICDQHAVADALESGHLAGYAGDVWFPQPPAKNHPWRSMPNHAMTPHTSGTTLSAQARYAAGVREILECWLGNKPIREEYLIVSQGHLAGVGSHSYSAGNTTSGTEQAAELV

SEQ ID NO: 61339 - protein, 124 aa, Legionella pneumophila
MTHYLMKRTLLVIIPALLVGCSYNAKLTPEGEKVTILQSDQLSKGCTFLGEVRAYDRNGMSQSYQSHEHLIKDERNILRNEAALLGANTVLVSQHQQTYEGNPKNDFVADHWMVGRAYRCKIKQ

SEQ ID NO: 61340 - protein, 288 aa, Legionella pneumophila
MIHSMTAFSRIQKQFDVGDFCWEIRSVNHRYLDVSFRLPESFRFLEAELRTLLRDKIHRGKLECHLKYKDTSCDNRSMLINIGTINALLDLSSKLSASHHLANDMTVSQVLSWPGVVEANLLDMEELSQIALELFQKSIDKLCEVRAGEGRSLKAYVEDRLQALRQEVMKSKSIVVSMSAKTKDKLLTRLHELQMDVPEARVEQEIALLLAKLDVSEELDRLETHIAEVSRTLNAEKVTGRRLDFLMQELNREANTLSSKSDSAELTLCAVEMKVLIEQMREQIQNFE

SEQ ID NO: 61341 - protein, 75 aa, Legionella pneumophila
MSAYFRRKKMCRFSAEGGNEIDYKDINLLKNYITETGKIVPSRITGTQTRFQRQLAKAIKHARFIGLLPYCDSHR

SEQ ID NO: 61342 - protein, 800 aa, Legionella pneumophila
  MISC_FEATURE (732)..(732): X=any amino acid
  MISC_FEATURE (737)..(737): X=any amino acid
  MISC_FEATURE (747)..(747): X=any amino acid
  MISC_FEATURE (762)..(762): X=any amino acid
  MISC_FEATURE (777)..(777): X=any amino acid
VAIAFAQVSIHSRSKGHSAVAAAAYRSGARLYDDRIGRAYDFSKRDDVAFSEILLPDGTTDSFLERDYLWNEVERAENRSNSQLCKDFVLALPRELNLEQQIELAKRFARTHFVEKGLPADIAIHDHGDGNPHAHILIPTRRLENNRFSKYKARDLNPVFAKGFLVEQDYWGEQWREMQNEFFIENNLDLQVDANHLIAERHRGKHHNANAHYLLEENQLIQQARMELTRDNIDLVIDHLSTQYSVFTRRDVERLLFKTFQASDSPQEYLQFVERVLGHQDLVALGDNNKGEPSFTTRTHLMQEAQLLHDIEAMMVSKNHVVHQPIDSLAQQYRLSEEQYEAFRYITQSPDISVVIGRPGTGKSYLLKPLNEYYIQAGMEVIGAALSGKVAKALQAETGITSSTIKSLSYRLANDMMQLSDKHVLIIDEAGMVDFSSMGYLIKEAHKAGSKVVLIGDPDQLKPIQKGEIFRGIAARTGYIELENIKRQQDLGDRQASLNLAKGDIDKAIQHYQDKGAITITDTKLQAIEQVVADWKQDLESTNMADSIMLSYTRKAVNHLNDLAREALIVENKIGEENIVYQGLERSLKISTGERLLLRENNKVLGVRNGDTATVKEINVQQMKIQLDSGELLIIPKEYKALDYAYALTVHKSQGMTAKKVRVLIDSKYWDRNLSFVAMTRHKEQLNIYADKENHPTEQALKQTLSRSSTKDNVIDWPLDFASEQGLILIHXLVERXIILSEWGIRXSRLITLLLIMKPLFXKQGIRNGFRISDKQXLMLNRKHLKLILKSLRAMIAKHL

SEQ ID NO: 61343 - protein, 295 aa, Legionella pneumophila
MKQKFKRAILYARQHRANQEVNESLHRLVDFLSTQDIEIFQDSDTAASFELKAPVLPREKMGAKHDLIIVVGGDGSLLSASRMAIKVNTPVIGINRGRLGFLTDILPQDIESHLGPVLNGQYNEEERFLLHTKIYDKENSYFEGDALNDVVLGRGSETHLIEFDVYINQQLVSHYRSDGMILSTPTGSTAYALSAGGPIMHPQLNAIVLVPMFSHSLSSRPLVIDGEAEIELYISKSNETDLRISCDGHESRVVKPGQKVAVKKNGNRLRLLHPLDYHYYDTLRSKLGWESKHQG

SEQ ID NO: 61344 - protein, 149 aa, Legionella pneumophila
MIHIALYQPEIPPNTGNIIRLCANTGAQLHLIHPLGFTLEDKQMRRAGLDYHQWASILHYENWQTFLQSHSQRRLFCCSAKGKVKYSDVDYKADDILLFGPESCGLPQQILNQYSTIRIPMRENNRSLNLSNAVAIILYEAWRQMDFNM

SEQ ID NO: 61345 - protein, 295 aa, Legionella pneumophila
MADVTVKQLAQVVGIPVERLLNQLQEAGLSFTDDQQTVNEEQKRILLNHLKGSSNRDISAAPERITLRRKSMSQVTVGHDMHSGKTVNIEVRKKKTFIKRSAIPEQAEVEEPVVPPVVEEPVHEEITVVSEVSAETPELKETEEHPVIEPVAELDETVKEEEKINSEENTAESQDELTHANTDVIENLVDVVEETIPVSKKEEVKPEKVSKKKHLEQTDSDISEFKKGKKKPKYHTFEHDEEEQELHRRGGRSKFKKKKGTEKSDKYREAEETLTHGFALPTAPIVREVLIPETI

SEQ ID NO: 61346 - protein, 510 aa, Legionella pneumophila
MIPAAEVVDLSRLQFALTALYHFLFVPLTLGLSVMLAIMETVYVMTGRDLWKKMVKYWGVLFGINFVLGVATGLTMEFQFGTNWAYYSHYVGDVFGAPLAIEGLMAFFLEATFVGLFFFGWNRLSKLQHLTSTWLLALGTNLSALWILIANGWMQHPVGAYFDYQTMRMEVSSFYEMLFNPVAQAKFVHTISAGYVTGAMFVLSISAYFLLRGRNKAFAKRSMTVAVSFGLASALSVVVLGDESGYVANENQKMKLATMEAMWHTEKAPANLTVFGIPDEKTLTTKYAIDIPYALGIIATRSFNTPLQGIIELIEEGKLKIKDGMIAYDALKVLQKDPKNEQAKAVFTKHSENLGYALLLKKYTENVTDATEEQINQAANDLKPKVLPMFFSFRIMVACGIYFILLFATGFYLSVRHRLEKTSWYHRVAFYSLPLPWIAAELGWIVAEYGRQPWVVEGILPTFMGASSLTSGQVMTSIAGFVLFYTVLAIVEIYLMVKYIRLGPDGMNHH

SEQ ID NO: 61347 - protein, 448 aa, Legionella pneumophila
MTFELLWTDKCFLTLLAVVLFTVLLSLRKQHIKLSFAIILQRPLAISAGIVLLLFLAIGVLDSIHIKFINDKTEKTQSLLDRVLAPIGNTYEKTYSAPLALNQFMSETKLVNGVTTQVYPRLKYPPASIKNEKDKSLIIKSVLMKGITYSALVILGGCLLLALIKLSLGYKNTFILNSTQISAIATVAVLTFAVVIGYGLSRSFHVLGTGQIGQDIFYFSLKSVRTGLIIGFLTTLFMLPLALFLGIAAGYFGGLVDDIIQYVYTTLSSIPGVLLITASVLSLQTYIANHPEQFTTLAKSADARLLALCLILGVTSWTSLCRLLRAETLKLREIDYVLAARALGSSWFTIVRKHLVPNVMHIVIITLVLDFSFLVLAEAVLTYVGVGVSPMTISWGNMINGARLELARDPVVWWPMFAAFLLMFLLVLAMNLFADAVRDAFDPHQSHL

SEQ ID NO: 61348 - protein, 152 aa, Legionella pneumophila
MFRGINAITIDTKGRLAIPTRYRSALGAEDKIPLVVTIDTEETCLLLYTAAQWQIIEDNLQKLPSFNAAARRIQRLLIGHATDVEVDANGRVLLPTVLRNYAKLEKDVVMIGQGNKFEVWNKELWESKREQWLAEEASMTDGLPEEMKTFSL

SEQ ID NO: 61349 - protein, 427 aa, Legionella pneumophila
LVAGLGKTGLSIARYLKRNNKSFVVFDTRKEAPGLAEFQNEFPDVPIYLQQTPDEVISQVTDVITSPGLALDTPVLERARQAGASIYGDIECLAREISAPVIAITGTNGKSTVTTLVGEMAKAAGFRVAVAGNIGTPVLDMLDDEHHYDLWVLELSSFQLDLTYSLSPVVATILNVTPDHLDRHHTMEAYTQAKQRIYRGAKAVLFNREDVYTVPHQSCQADIKCISFGKDAPSMGNWGLIEQENTTYLAKGMERLLPVESILIKGVHNWMNALAACALAEAAGISMQHILNVLKTFPGLPHRCQWVREVDGVGWINDSKGTNIGATISAINGIGGSMQGKIVLIAGGQGKGADFQELAQPVSEFVRSIVLIGEDADKIESALAKVVPVVRASSLEGAVTIAKTCAKPGDVVLLSPACASLDMFRDF

SEQ ID NO: 61350 - protein, 1153 aa, Legionella pneumophila
MNTKTLLYQPTKNKQIWGQLYGSSLALALAEYCQQTPGIKLLITQDNLCASQLQDELQFFLNPNQNTQELLFFPDWETLPYDQFSPHQDIISERLYTLSRVQQITNGIIISSASTLMHRLSPPEFLNQYALMLKEGQKLDLNSFRNQLQQAGYHCVNKVLEHGEYALRGSIIDVYPMGSGLPFRIELFDDEIESLREFDPETQRTIEKINQIHLLPAREFPLNEQSQLHFRRAFRESFPGNPSHCPIYEAISNNQFPSGIEYYLPLFFDKTVTFFDYLPANAKICLIEEIQENAERFWRELNERYEQRRHDVSRPILPPDNCFINPTELLTKANHYEQVRLYHKPSEKKGALNFNIAKAPQLPIDRKNIEPLRQLSEYCSDPTRRYLIVVESAGRREVLLDLLKSSHIIPKTQNSWLDFIYDESPINITTGPLIYGCELTDKQIVIIVESQLFGEQSTPQRRSTQKSVDPDLIIRDMAELRLGAPVVHLQFGVGRYQGLQYIDSNGTPSEFLVLAYAGDDKIYVPVTSLHMISRYTGVDSEHAPLHKLGSEQWQKEKKKAAEKIHDVAIELLDLYAKREAQPGHQYDFNQSEYIKFASGFPFTETPDQLQAIEQIIKDMQSPRPMDRLICGDVGFGKTEVAMRAAFVAVQNGKQVCILAPTTLLAGQHFESFRDRFADFPVNIELLSRFRSNKESEAVLAALQSGKVDIVIGTHKLFQNNISFKNLGLLIIDEEHRFGVKQKEHIKSLRTHVDILSMTATPIPRTLNMAMAGIRDISLIATPPAKRLAIKTFWQEKNDLTIREAILREILRGGQVFYLHNNVQTIERVCQDLEALVPEAKIQSAHGQMRERQLERIMSDFYHHRFNVLVCTTIIETGIDIPTANTIIIDRADKFGLAQLHQLRGRVGRSHHQAYAYLLTPNEKLLTPDAVKRLEAIVSLEDLGAGFTLATHDLEIRGAGELLGEEQSGNMHAIGFNLFMEMLDRAVNDLKAGKTPELSAPMHQGPEIDLRISAIIPEDYIGDIHNRLIMYKRIANAKTTQQLRELQIELIDRFGLLPQPVKHLFLITELKLKAEQLGIQKISASAQQGKLDFSEKPSIDPGTLISLIQVHAKRYQMEGPQRLRFTLDSTSAEERIFEISSLLNKLSPHSQTID

SEQ ID NO: 61351 - protein, 238 aa, Legionella pneumophila
MLVTKEVEYEDGDTVCKGFIAYHSSASKPLPCVMVAHDWGGRGEGACNKARQLAGMGYIGFAIDMYGNAKLGKDKAEKRALMTPFRENRGKLITRINAAFNKVVQLPEVDSEKVAAIGYCFGGLCVLDLIRSGAPLKGVVSFHGVLLPLEGESNKSLNAKVLILHGYDDPLVPIEQVNQFAIEMTERKVDWQVHVYGQTAHSFTDPGANDDEMGLHYNKLADQRSWQSTQLFLQELFA

SEQ ID NO: 61352 - protein, 468 aa, Legionella pneumophila
MNNEFLENVTYEELTLGRRASLNRTLTQDDINLFAAMSGDINPSHVDPQFAKSDVFHGVVGHGMWSGALISTLLGTVLPGPGTIYLEQDIQFITPVRIGDNLTITIVVRDKHPGKSIVHFDCMGVNQKGETVIKGLAKVIAPTKKMKVPRTVLPLVQIHHNDHFNKIIEACSNLPSIKTAVVHPVTANVLEAVYDSVKAGLITPVLIGPMAKIKCAASEAKIDLSNWEMIDTEHSDAAAFKAVELAASGKVDSIMKGALHTDELMSAVVPATSGLRTKYRISHAYVMDVPTYHKPLIITDAAINIAPNAADKADICQNAINLWRILYGEEIKPKVAILAAVEIVNPKMQATVDAAVLCKMADRGQIINGILDGPLAFDNAINKQASKEKNIISPVAGDADILLVPDIESGNMLAKQLTFLGHADAAGIVLGARVPIILASRADSLRTRLLSCAVATKIAAARKAGKIK

SEQ ID NO: 61353 - protein, 218 aa, Legionella pneumophila
MRLMLLGGPGAGKGTQASLLINRYKIPQISTGDMLRAAIAKGTPLGLSAQKIMESGGLVSDDIIIGLVKERLKNPDCDRGFLFDGFPRTLVQAEALKDAEIHLDHVIEIAVDDEEIIERISGRRIHQPSGRVYHVVNQPPKNPGVDDITGEPLIQRDDDKEETIRKRLQVYHSQTAPLVQYYKEWAESGSKEAPKFHTISGTGTVEQIFDNIVTILET

SEQ ID NO: 61354 - protein, 464 aa, Legionella pneumophila
MNHSKKVLNVFSLVMINVIAVDSLRTLPISAKLGFSLVFYYIFAALTFFIPVALVAAELATAYPNTGGIYVWVREAFGRRAGFITIWLQWIYNVVWYPTMLAFIAATLSYLIAPHLGNNKFYLLGTALTLFWVFTFLNCFGMKLSSIVSIIGASIGTLLPMIVIIVLGAVWIFQDRPVAVNYPTTWLPDFSSLGNLSLFSAVLFGLIGMEMSAVHAEEVKNPQRDYPKALFYSALLIISTLSLGSLAIVIVVPNDSLSVVSGLVDAYAIFFNSYNMPWMTSVIAVLIILGGLSGVSAWIIGPTKGLLVSARDGSLPALFSRVNKYGSPVAILLTQGVIFTVLSTVFILLDSINAAYWVLSDLSAQMALLVYIMMFAAAIKLRYSKPEQPRGYTIPGGNLVMSLISGIGIICCIAAMIVGFIPPSQIPIKNVFLFECFLIGGLILFVFIPWLFAKKHDEQLCSEE

SEQ ID NO: 61355 - protein, 644 aa, Legionella pneumophila
MAKIIGIDLGTTNSCVAVMEGDKPKVIENSEGHRTTPSIVAFTDDNEILVGQSAKRQSVTNPEKTLFAIKRLIGRRFDDPIVQKDIKMVPYKIMKADNGDAWVRVKDQDKAPPQISAEVLRKMKKTAEDYLGEEVKEAVITVPAYFNDSQRQATKDAGRIAGLEVKRIINEPTAAALAYGMDKKRGDSVIAVYDLGGGTFDISIIEIAEVDGEHQFEVLATNGDTFLGGEDFDLALIEYLASEFKKDTGIDLHNDPLALQRLKEAAEKAKIELSSAQQTDVNLPYITADASGPKHLNIKLTRAKLESLVEKLVERTIEPCKTALKDAGLTVSQINEVILVGGQTRMPLVQKTVEEFFGKEPRKDVNPDEAVAVGAAIQAAVLSGEVKDILLLDVTPLSLGIETMGGVMTKLIEKNTTIPTKATQVFSTADDNQTAVTVHVLQGEREQASANKSLGRFDLRDIPPAPRGVPQIEVTFDIDANGILNVSAKDKATGKAQSIVIKASSGLSEEEVAAMVKDAQSHAEEDKKFKEMAELRNQADSLIHSCEKSMKDLADELSEDEKRGIETAISELKEAVQGTDKARIEDKLKVLTDASAKMAERIYAKKSSEGQAAQGQTQSQESTKPAEEGVVDAEFEEVKEEDKK

SEQ ID NO: 61356 - protein, 264 aa, Legionella pneumophila
MGVLNVTSDSFYDGGKYLSVDSACDQALKLIACGADLIDIGGESTKPGAPPVPLDVELSRVLPVIKQLRVLADVCISIDTNKPEVMEAAIDAGANVINDVYALRRDGALNVAAQLDVPVCLMHMKGEPRTMQENPSYPEGIMKELQHFFKERIDKCQKAGLNKNKLILDPGFGFGKRVKDNLKLIYHLNELRSFGLPILLGVSRKSTIGAVLNNEVEQRLIGSITLGIYAALKGTAIIRTHDVDETNQALTMINAIYQAAKEIG

SEQ ID NO: 61357 - protein, 210 aa, Legionella pneumophila
MNHTKSSFIKLALECQVLKFGEFTLKSGRISPYFFNAGLFYHGDSLRKLGQFYAKTLLEQEVSFEHLFGPAYKGIPLATATAVALAELGRDITVTFNRKEVKTHGEGGQLIGSPLTGRTVIIDDVITAGTAFRESQTLIKENGGILRGVIIALDRCERGLTEKSTLSEIREQGIEVYSIINLFDLIEFLKNDNQYEQVQKLESYQERYGA

SEQ ID NO: 61358 - protein, 538 aa, Legionella pneumophila
MPMNYEFGGSVPAVMLYGSETLNHKILGVTSGCHSRGHRFHHPQEIRINSAASYEDQMKNAFVIADFATRRQAIIHQVQELAAPLGASVIMPEELVDEVTSIVEWPQALIANFEQEFLEVPAEALIASMQSHQKCFALKNMHGELLPYFITVSNIASSNPKQVVLGNEKVMRARLSDAAFFFKQDKKQPLSAHIPSTEQVIFQVKLGSMYDKVQRIKAMMDHLSQSLNLPSHLAERATLLSKCDLMTGMVGEFPELQGIMGYYYALNDGEEAIVATALNEQYMPRFSGDNLPSTDLGKALSLADRMDTLVGIFAIGQKPTGVKDPFKLRRHALSVVRLLISISAPLNLSTLIKEALANYGDRLPQDKNLVAELKPFILERLQSYYQNQGISADLVHAVRARQDDWLYDLDKRLFALKSFITMPEATSLSAACKRVGNILAQAAYADKKVDIKEELIEEGAEKALFDHLNKITKTVETLYIAGDYQALLKLLASLKEPVDAFFDHVMVMVEEESLKQNRLAHLQRLQELLQGVADISML

SEQ ID NO: 61359 - protein, 506 aa, Legionella pneumophila
MSEQFILQPGQLSLLSIKQILDEELSCVLAENSFELIRASHQTVKKVIDEKKTVYGINTGFGSLANQTISSDCLKELQRNIVLSHACGTGKLLPDDVVALILLLKINNLSQGYSGVRLELINALIALFNHKVYPCIPSKGSVGASGDLVPLAHLSLPLLGEGEVRHQGQVISAEEGLKLAGLKPLELEAKEGLALLNGLQVSTALALSALFISETLFETAIISGSLSVDAASGSDVPFDDRIHQIRGHQAQISAASMYRNLLAGSQIRESHRHCNRVQDPYSLRCQPQIMGAILHQMQFVGQTLQVEANAISDNPLVFAEQGDILSGGNFHGEIIAMAADNLALALSEIGGSAERRIALLIDKNFSGLPAFLVRESGLNSGFMIAHVTAASCASDNKALAHPHSVDSLPTSANQEDHVSMATSAARRLHEMIDNTSTILAIELLAACQGLEFHKPLKTSPQLDKIYQSVRSVVKEYDKDRYFAPDIEKIKKKILDKEFSLLTLTNE

SEQ ID NO: 61360 - protein, 140 aa, Legionella pneumophila
MYTNILFATDLLNEHSHLTEKAANIAKQFNAKLYLLHVIELPTSILIAQGLGFTELANPSKEDAQTVLSLIGESLQIPQEQQFVEIGSVKEHILNKAKDLNCQLIIIGSHSATGLPSILGSTAHAVVNHSVCDVLTLKAD

SEQ ID NO: 61361 - protein, 999 aa, Legionella pneumophila
MFGSYYFALYFALNFFLMIVFYNAKVIFIQVCKYVRFLMKLLRFHELKSLPSMDEKALELLIKVLGNKGIRKLIKSADGKPISREIMIHEFGIDCQILFITTEASLKPIIVPTENKISGGGKSYCEQFKVYALDDGKTYFLKSVKINAESLTEFTNETDTLSKLGRLVGTFFNEQTQVHYILTTFIKGIDLSRYKNALPLNINLKHFWEVLGIMISVCHQVKQFHELGLIHRDLKPGNIMLDADMQCHLVDFGSSSSDKEPKPVSWGTASYLAPELNAQEDFIAFSQASDLFALAYSLDELFNPFRQVKFAKVDIGIKNKHLVLLHAEIEACITGLMSNETSVRTLYFSRILQLQRVPESFKSRPEAFTYMIMLLTQWKSCYEAPEMNKELDEIIAEIKVAYENHEQDVVKIITLLEQLSKADGLLNSHKALLSVLIKSLANVQQQELGQDDILPRRFESDVVSRLIKTPTAKMMAAIKQVSDAIVKILEQYEHSPAESFEHAVLQDFLEQMVQSDILFGAPKEKIEISDIIKILKANRPEDFVQIQHISFKFAQVALRDLALHDLPKHEPKGAFLEILKKYQAKYAPEETSLFELYHHMAGVRDHNPSKVKKGEGYRFRAFICDELFYGDEIFTTGDNRGREGKPNQRLQTNQVGLMKFEHSAHTKGLLTLNGQSWYADCKTQLPNYDSIHYLSALKTDCPYITGPSGMTSLFMNMMFLLLNPKDQDVILSYSLGVMTYVVGAGYHSIKEILIPMVKCVGIVPDYPQHKGTECLTAPPLYNHYFKAIEEFDKEFAEVHEKIWQEYLAYFRMTYMPVCMRSHCLPHQVPSMEDISSEVKEMLEIVSKSVKNCLEEHKVKRTGDMGLFLSTPCGQTKALEVLSHVCQQQVGLTAIFRQIQAYFKGTFETEEGIIINREMQLKFIAHFFDVLKESPTLLSQFNLTLRIENTIGVHQCELGSSKQKELFLEIKKTSIAANEEQMVANHEPRKENRNVIILPY

SEQ ID NO: 61362 - protein, 124 aa, Legionella pneumophila
MVACRLIEKAYTKGHTIFVFCDNQQQAEYLDELLWTFKDDSFIPHNLQGEGPEPPPPVQIGYQKEPRGFTDILLNLSTNIPIFYTRFKRVIELVSNVEHEKEVSRLHYKEYRHKGCELHTHSIE

SEQ ID NO: 61363 - protein, 800 aa, Legionella pneumophila; identical to SEQ ID NO: 61342
  MISC_FEATURE (732)..(732): X=any amino acid
  MISC_FEATURE (737)..(737): X=any amino acid
  MISC_FEATURE (747)..(747): X=any amino acid
  MISC_FEATURE (762)..(762): X=any amino acid
  MISC_FEATURE (777)..(777): X=any amino acid

SEQ ID NO: 61364 - protein, 360 aa, Legionella pneumophila
MTAKTPLHTTHLACGAKMVDFHGWDMPLHYGSQLNEHHAVRNDAGMFDVSHMTIVDILGAGGRQFLRKLLTNDVDQITHNGKALYSCMCNEHGGIIDDLIVYQRASDNYRVVLNSATRQNDVAWIRAKSEGFAVGLQERRELSMLAVQGPNAIAKTLSILAPAHVDAVSTLTSFECVDVDHWFFARTGYTGEDGLEIIVPNEFVTQLWNDLLHAGVTPCGLGARDTLRLEAGMLLYGQDMDETTTPLESGLAWTVKWEPEDRGFIGMGALVSQKQQGIKRKMVGLTLLDKGIMRHGQKVIIEGCPDGIITSGSYSPTLQQSIALARVPMETGEQVLVDIRGKLIPAKVGKPRFIKQGKPV

SEQ ID NO: 61365 - protein, 346 aa, Legionella pneumophila
  MISC_FEATURE (2)..(2): X=any amino acid
  MISC_FEATURE (3)..(3): X=any amino acid
  MISC_FEATURE (4)..(4): X=any amino acid
  MISC_FEATURE (5)..(5): X=any amino acid
  MISC_FEATURE (6)..(6): X=any amino acid
  MISC_FEATURE (7)..(7): X=any amino acid
  MISC_FEATURE (8)..(8): X=any amino acid
  MISC_FEATURE (9)..(9): X=any amino acid
  MISC_FEATURE (10)..(10): X=any amino acid
  MISC_FEATURE (11)..(11): X=any amino acid
  MISC_FEATURE (12)..(12): X=any amino acid
  MISC_FEATURE (13)..(13): X=any amino acid
  MISC_FEATURE (14)..(14): X=any amino acid
  MISC_FEATURE (15)..(15): X=any amino acid
MXXXXXXXXXXXXXXLYRVRVLALSNEQINSFDYKSLITHRIKQASLVRRCLDLPNEQTNAYRLFNSEADGLSGLTIDCFNDYCVIASSAYWVELNKSIIVHVLQELLPHNHIIWLPQNKPLSQDGWKEIHTEKSQGSTQVLEEGVLYHVEFAQTQKTGLFLDQRENHKRIAKLSRGKRVLDLYTFTGGFALHAAKAGALHVTAVDSSVQAIEQAKNNAVLNHLNTIEFIKADAREYLKMAGEYDVVILDPPKLVPSQKHLQQAKNYYRFLHREAFKYMKPGSLLMTCNCSSALSSQDFCSLVSAQAVAMGKQARILGVYGPASCHPTLAAFPEGNYLTAILLALV

SEQ ID NO: 61366 - protein, 759 aa, Legionella pneumophila
MSKHLVIVESPAKAKTIQKYLGNDYDVLASYGHVRDLPARKGSVNPEKHFSMTYVPIEKNARHIDTIAKTLKKSDSLLLATDPDREGEAISWHIFELMKERNLLKDKSVHRIFFNEITKAAIQDAINHPRSISMDLVNAQQARRALDYLVGFNLSPLLWKKIRRGLSAGRVQSPALRLIVEREEEIERFIAQEYWKIIAKCAHASTEFEARLTHYNEEKLQQFSVTQQEQAHEIKKQLIAQAQGFLTVAQIDKKQRKRKPSPPFITSTLQQEAARKLGFTARKTMMVAQQLYEGIDIGTGTVGLITYMRTDSVNLAKEAIDEIRDYITQRYKGDNCPNSPRIYKTKSKNAQEAHEAIRPTSIKRTPEMVQGSLTSDQLKLYSLIWKRTVASQMADAILDTVSVDFSCGKGNTFRANGSTIAFPGFLSVYEEGRDDSKDEDNEDKILPAFNVGEKIKVSDIETNQHFTEPPPRYSEATLVKALEEYDIGRPSTYASIIHTLQQREYVVVEKKRFLPTDVGRIVNRFLTNYFTRYVDYQFTAGLEDTLDAIARGEKDWIPVLEEFWQPFVQQIQNIDEQVQRKDVTTELLDEKCPKCQKPLSIRLGKRGRFIGCTGYPDCDYTQDISNPEGEKSEPEVVEGRSCPLCHGALHIKTGRYGKFIGCSNYPECKHMEPLEKPSDTGVTCPKCSQAKILQRKSRKGKIFYSCGNYPKCDYALWNEPLDLPCPKCAWPILTLKESKKFGRQILCPREGCDYSAKED

SEQ ID NO: 61367 - protein, 73 aa, Legionella pneumophila
MAKEDHIEMAGTVIDTLPNTMFRVELENGHIVTAHISGRMRKNYIRILTGDKVKVELTPYDLSKGRIIFRDKG

SEQ ID NO: 61368 - protein, 816 aa, Legionella pneumophila
MRRENTKSNIDFKSIFDSLPDLYLLLDRDFNIVGVSDAYLQATMVSRKQILGKNVFDAFPDNPNDPKATGAKNLYASLLRVLKNKSADTMAIQKYDIQRPADRGGGFEERYWSPINTPVLGADQEVEYIIHRVEDVTEFVHLKKTGSAQLKLMEELRTKAGEMEIEIYQRAQEIQEANKQLEEANKNLARLDQIKTQFFANVSHELRTPLMLILDPLEMLLAEKKLPSFVQNTLRRIQNNAQILLKHVNDLLNISKLDAGKMILHYANIDLVKLIQQTIALFEAQIPERKLVFSMDLPDELQAQIDPDKIQHVLINILSNAIKFTPQNAKVRIRLVQINPETCRLQIEDNGPGIPSDLCETIFERFFQIEESTTRTVGGTGLGLSIAKDFVELHGGSILAGNARNGGAIFTIELPLKAPQNAKVYSSYSQLLLGEKEISASLAEFRNKVKPIKEGAEEYFEQDYYDRPLILVVEDNQEMNHFICKILNTFYRTESAFDGREGLQKSLALHPDLIVSDIMMPHMSGVEMVHAIREHPLLLKTPIIILTAKADDELTARMLEEGAQDYVIKPFSAKEFKARVANLILVKKAEDELDQFVYHASHDLKAPLPAMEHLISWIEEDLGEMLSEQSKKYLLLLRQRASRMSKLLDGLLKYAQSGYVFDKVRTIHTDRLITDIIKKLNPPQTVTFQLEDTLPVLNTCELPLREVFTALLDNSIRHHHRKDGHIIIGTKEKDRFYEFFVADDGPGIEKKYQDRIFQLFQTLQPRDKLETSGVGLSIAKKIVEFQGGKISVESEKNKGSVFRFLWPKDKEIGDAC

SEQ ID NO: 61369 - protein, 1120 aa, Legionella pneumophila
MMTNSWKDKLQKQLTQQFGSPKGKQLIDKYTETMSMSYSEQHTPEEAIQDILQIEKLSKENPLVIDFYENTHSQYPLHIKLYRYETPIPLSDILPMLENMGLRTYTERPYKIKTRDGQLFWISDFNVTYSQTDSINITQVKDIFAEALISINLGICENDGFNKLVLCAGLSWQEITILRAYAKYLHQIGIRYSQSYIEKTIEMHAAIARELIHFFYLKFGLKRKSAIHKDILALEQKIQINIDAISSLDEDRIMRYFWSLMKATLRTNYFQKNHAGLSKDYLSFKLKSSEIPDLPPGQPLYEIFVYSTRFEGIHLRSTKVARGGIRWSDRPEDFRTEILGLMKAQKVKNAVIVPSGAKGGFVLKKPLHAASREQIQQEVISCYKSFINGLLDLTDNLINDKTIPPQNVICYDDPDPYLVVAADKGTATFSDIANSIAKEHGFWLGDAFASGGSAGYDHKKMGITARGAWESVKRHFRELDINIQQQDFTVVGIGDMSGDVFGNGMLYSKHIRLLAAFDHRHIFLDPNPDPVKSYEERLRLFNLPTSSWEDYNLQLISKGGGVYKRSSKSIPISPQVKKALAIDANALTPNELIRALLKAPVDLLFNGGIGTYVKATTESHADVGDKTNEFCRINGAELHCKVVGEGGNLGFTQLGRVEFALKGGLINTDAIDNSAGVNCSDHEVNIKILLDKEIREKKLTEKKRNQLLSRMTDEVADLVLQDNYNQALILSISAAHSSHYSGLYQDYMKELEKWVNLDRSVEFLPDDKKLLERKSTGAGLTRPELAVLMAHTKIHIANELLKSHLPDDSYFTTFLETGFPISLRKPYAKALPKHPLSREIIATQLSNKLVNNMGITFMYRMLMETGMSIADIACAYTISACIFQTDVLQNLIDSFQDKISLSTQYELLHHIRQLLNLATRWFLHNNRLTGGIEKNIKNYGKSVKKLELLIPKLMGGVTKEYLEKLISQFVSIGIEKDMAQKIAITRALYTSLNIIEVATQNEFDLSLTAETYFKVGSQFNLVWFRDQIANDSREGHWNTMARLSLRDELDNLQRRLTIAILTTNTKERTSEKLINYWLEQNHPIQKRWEKLLEMLLGSENIDYTIFFIALRELSSLIQVL

SEQ ID NO: 61370 - protein, 144 aa, Legionella pneumophila
MKTFSAKGNEVKRDWFVVDASEKVLGRLATEIARRLRGKHKAEYTPHVDTGDYIIVTNAEKVIVTGRKFKNKMYHHHTGFPGGIKSASFEKLQDKNPTKIIELAVKGMLPKNPLGREMYRKLKVYAGSEHPHTAQQPKQLEIEE

SEQ ID NO: 61371 - protein, 780 aa, Legionella pneumophila
MQNLTETLDFSSLNRGEIEKLLRDYNLNLSVDEALTIQNEFLKRPPTISECVLWSIQGSEHCSYKSSRIHLKQFNTSGPHVILGAKEDAGIVSVAQDKNGYRYGVIVSHESHNHPSQIVPYEGAATGVGGNVRDVCCMGGEVIAVADSLRFGDIKRARTHWIQEGVVSGIAGYGNPLGIPNIAGDVYYDPAYNENCLVTVVTLGIVREDHIIHSYAPPEAENYVFILVGKPTDNSGFGGASFASTVLEEDSQEKNKGAVQEPNAFLQRHLLKANYSLFQLLREKNLIDKVGFKDLGAGGVACASIELAEAGGSYGAEIDLDKVPTGMPGLMPSVILCSETQERFMWVVPPDLVDTILKHYNETFALPQVSEGACAAVIGKIRTDGLYVVNYKGRELVRAKVPDVTKGIVYNRPHASSQKQNTEPVFLPPDDYNQILLQLLAHENIASKEPIFEMYDKQVQGRTLIQAGWADAGVLQPFNESKYPEEIRKTGIALSLDQNPRYNKIDAYWGAVNAVVESVRNITAVGATPVAITDCLCFGNPEKPEQMREFVDSVRGISDACAAVHLKDHPQSTLPVIAGNVSLYNESVKGAIPPSPMISCLGTLPDIDFAITFDFKKSDSLLILIGERKDECGGSVYYQLHNELGSNVPKPDLSLFNREIHAVSSAIQHGLVNAAHDVSEGGVAVALAEMSFKNSLGVAVQINGELSADKLLFGETGGFILEIDKQHKAAFDKLVTQYQVPYMVIGHTTEQPVLQMNSVINLPVEEARQAWENGLRERLL

SEQ ID NO: 61372 - protein, 282 aa, Legionella pneumophila
MLSYQHGYHAGNFADVIKHITLTRLLAYLTHKDKPLFYLETHSGRGIYDLKDKQSLKTEEYKEGINPVWLDRENLPSLFLEYISVIKQINLNSTLSYYPGSPYFAINQLRSQDRLYLCELHPTEYNFLLKLPHFNKKVYVNHTDGVSKLNALLPPPEKRGLIFIDPSYERKEEYKEIPYAIKNAYSKFSTGLYCVWYPVVNKAWTEQFLRKMREISSKSVRIELHLNPLINEGMTGCGLWIINPPYTFPSEIKLVLETLTTYFNPGSSSYMIESGSKLCHEL

SEQ ID NO: 61373 - protein, 320 aa, Legionella pneumophila
MNKIRCAVIGVGYLGRFHAQKYQLIPNAELVAVCDVNSTVCEVVSSELNVPAYINYHDLFGKVDAVSIAATTNKHFEIAKFCIQHGIHVLIEKPITETVSQAEELIRLAKQHQVKLQVGHLERFNSARLALDEYLELPLFIESQRLAPFNPRGTDVNVILDLMIHDIDIIQNIVQSPIKSITAQGAPVLTKAIDIANARISFANHCVANVTASRISFKTERKTRIFQENSYISIDYQNKQLAVFKKGTGEMFPGIPDITRDQREFEKGDALLEEIRAFLNCIENDSVPLVTGEEGRDALKTAEQITALINNNLVERYAEC

SEQ ID NO: 61374 - protein, 228 aa, Legionella pneumophila
MSKTERLFHLLQILRRYRYPLSGQFLANELGVSTRTIYRDIAALQAQGADIEGEPGLGYVLKPGFMLPPLMFNEEEIEALVLGSRWVAKKTDTHLQQAAHNALAKIASVLPADLRQQLELSSLLIGPGEVISGEDESLALVRKAIRKELKLFIQYHDLKGNVSTRTIWPIGLGYFDQVRVLIAWCELKKDFRHFRADRIVDVENLGVCYAKRRSVLLHDWRKQNNIPG

SEQ ID NO: 61375 - protein, 329 aa, Legionella pneumophila
IHTSNVFHIKEQELLAAKLTSMARMEQVFFANSGAEANEAAIKLTRLFGHKKGIETPSIIVMEKAFHGRTMATLTASGSRKVQAGFEPLVPGFIRAPFNDLDAIHTIAANREDVVAVMVEPIQGEGGIYPAEEGYLRALANLCEQNDWMLILDEIQTGNGRTGKLYSCMHYDIQPDILTTAKGLGNGMPIGACLMSKRAKDLFKPGNHGSTFGGNPLACATALTVLEVIERDKLCERVTKNSALLMDKLISNLGEHPHVKAIRGKGYMIGIELDRPANDMRVLGLENQVLFNITAETVVRLLPPLIISEDEIDELVNRITRTINQFTNQ

SEQ ID NO: 61376 - protein, 319 aa, Legionella pneumophila
MGILIDGIWHDENNINTDKEGRFVRAESGFRQHITANGESGFKAEPDRYHLYLSYACPWACRTLIMRKLKGLEKIISVSFSDPVMGKNGWSYGESGNETADHINHIHYLKELYLVARKDYTGRVTVPVLWDKKKKTIVNNESSEIMRMLNSEFNAFSSTDHDYYPKQWRQKIDEINQLVYENINNGVYKCGFAKSQKAYEEAFDALFNTLNQIENLLATQRYLLGEQLTEADWRLFTTLIRFDAVYHGHFKCNLQRIADYPHLSNYLRELYHFPGIKETVNFNHIKQHYYRSHLSINPTGIVPKGPKLNLDEPHNRYEF

SEQ ID NO: 61377 - protein, 637 aa, Legionella pneumophila
MNIKTYLRKNNLTLRFVGWFFLINSFIFWLVGLGYLKSILLNASLFKNYIADYSSLSGKILILVFSVLNYFTYMMFLAFVPAIPIIIMAFFLPYKRIIWIISVVAAATSLIFLFVDSQVFSMFKFHLNKTILSFIFNSDWSVIFTFSRYELILSFFMIVFILFLESIVAWLVWKKIVLKERLKIGKTISLFWLGGALISYFILLLSIAQNNNLFAQQIPNLPLYNQLIAYTIPDKNADDILRRYSEHHFTQPLFPNYPLHYPLHPMQCKMPEKPYNIILIMVDSLRYDSLRAKYMPNTAQFAKRSWQFSQHMSAGNATQPGLFSLFYSIPSNYSTAVLEQKKSPVLIDLLLQHGFQTKIIWSGSMAPLPLDQTIYKKIANLNTNGAPIDDTGDKDRYSTKEAIQFLTDPKTNNPFFLHIFYNAPHDYCRYQSFPQLYKPAIEECVRIGMTNHVDPVPYYNRYLNAVTFIDQEISKVLGVIEKKGYLKNSIIIITSDHGQEFNDNRQNYWGHTSNFTPIQLHVPLIIHWPGELARRFNYLTSSYDIVPTILQRLFACKNPVSDYSIGYNLLIEGNRASFLLVGSYINMGIFEADRATALETSGRITITGMKAEPLDDAVPRVDVITQALDLMRKYYGK

SEQ ID NO: 61378 - protein, 357 aa, Legionella pneumophila
MYWRFAKSMSITNRLLLIFIGSTVLILSIITGLIYPPMKELLHHTHLNNEHYNYLLTRICIKNFFVGLWFSTLIIILASYLLAKKSMRPIKIFTKELASINASSLEKRLPYTGNPKELEELASTCNDMLFRIESAFSHIKQFSASIAHELRNPIHYLRTATEITLTKPQTIETYQHVLQTHLEEYQSLTQLIDNLIFLTRCEHGQLQLNLRTLSANHLISSIIEYYYSIAQEKGIEIQVFGEAQIEVDEHLFKRVISNLIDNSLTYTNKGGRILIIIEKRTDDSIQIRIKDNGIGISKEHLPLLYHGFYRVDYSTNKENAGLGLGLAIAKSIMEHHKGQLAVDSKIGLGTTVILTLP

SEQ ID NO: 61379 - protein, 209 aa, Legionella pneumophila
MRILAVIPARAGSKRLPGKNTRLLAGKPLIAHTIVAALQSSCCEEIVVSTDSKQIADVAVQYGASVPWLRSEDLATDTSDVIHTVIDLLFKFQQMDVFFDSVLLLQPTSPFRKPETIRHAVEIHKVTGKSVVSVSPISLKPSWCRSIDSQGNLVKPELFQDLEIYCNENPIYKLNGSIYIATAKQIIENKSFYSEPTKPLLLNSMTLEI

SEQ ID NO: 61380 - protein, 191 aa, Legionella pneumophila
MNSFTELANAVRMLSIDAVNQAQSGHPGMPLGMADIATVLWKKFLKFNPKNPHWFNRDRFVLSNGHGSMLLYSLLHLTGYNLDISELKNFRQLHSKTPGHPEHGHTPGVETTTGPLGQGLANSVGMALAERVLASTFNHDHFNLVDHYTYTFAGDGCLMEGISHEACSLAGTLNLGKLIVFYDDNGISIDV

SEQ ID NO: 61381 - protein, 411 aa, Legionella pneumophila
MDTKGILLAPFFFISFMFFIPISPTIKSICFICSLIAVLITPQYRKHIVYAYNTLWGRAAFCLFLFVVIASLWSPAPYSMQWMVIGKYCKLIYLPILATGFINPKVRNWSINSYLAAIFITCVISILKAKNIIASEDPGEVFYNHIITGFMVALAAYLAGLLAFQSSGWLRLIYIFMILLTSYQVLFINTGRTGYLVYFILMLLLLIQKLNFKQALAGIVLFSGIIALAYHHSPVMQTRIYDLIQDIKLLKQHNKNTSIGYRMQFHHYAKQLMLKHPFIGIGTGGFKYSYSQDVPVPSWGKELTDPHSQYWMTLAEQGLIGLVLLIIFLASLFITSFQLTSSRPILLGVLFSFCIGSISDTILCYSTAGYLLVVMSALCFGELIEKRRVKDAKEDHPALLSAHAPAAISQT

SEQ ID NO: 61382 - protein, 187 aa, Legionella pneumophila
MSTLTSLPNILTLMRISIIPVFIMVFYFPFKWAHPTAAVLFAIASITDWLDGYLARKLEMMSHFGAFLDPVADKLLVSTSLLLLVGAKDIDYITIPAIVIVGREIVISALREWMAEVGRRASVAVGYIGKVKTSLQMIALVLLLAFNPLVSWWGSLGFVLLYVSAILTIWSMVIYLAIAWPELMKKS

SEQ ID NO: 61383 - protein, 394 aa, Legionella pneumophila
MEHNDVVIVAAKRTPMGAMLGNLSALSSPELGAVAHMAALSQSGIAPAEIDEVISGCVLQAGIGQAPARQAAIKAGIPNSTGATTINKMCGSGMKAVMLAHDLIKAGTANVILASGMESMSNAPYLLSKARAGYRLGHGELKDHMFLDGLEDAYDKGQLMGCFAETTAKHFNFSREQQDEYALRSMTKALKAIENGAFREEIAPVTLTTRKGDITVDVDEGPETAKLAKIPQLKPAFQADGTVTAANSSSISDGAASLILMSASNAEKRGIKPLAKIIAHASHSQAPQWFTTAPVDAIRKVMNKASWKQDDVDLFEINEAFAVVAMAAITQLELNPEQVNIHGGACALGHPIGASGARILVTLMHALKHQGKKRGIASLCIGGGEATAMAIELI

SEQ ID NO: 61384 - protein, 61 aa, Legionella pneumophila
MGKKIKITLVKSTIGRKPKHVAIAKQLGLGKTNSSVVHSDTPAIRGLVNEINYLLLVEESA

SEQ ID NO: 61385 - protein, 330 aa, Legionella pneumophila
MTIRVAINGYGRIGRCILRSIFEYNRQNEFEVVAINDLSGIDVTAHLTRYDSTHGPFRSDVSIEGNMLIVDGHGIQVIAERDPAKLPWKQLDIDIVFECTGFFTSRDAAMGHINAGAKKVLISAPAKGVDTTVVYGVNHSVIKASDVIVSNASCTTNCLAPVVKVLNDAIGIESGLVNTVHAYTKDQMLLDGSHKDLRRARSATQSIIPTKTGAAAAVGLVLPELAGKLDGFAMRVPVLNVSVVDLTFQAKRATSVEEINDIMRKAKNRILQINEDPLVSCDFNHNPASAIFDTTETKVIGNLVKVVAWYDNEWGFSNRMIDTAHQMMNC

SEQ ID NO: 61386 - protein, 277 aa, Legionella pneumophila
MALFIFLILVGYLMGSINSAIIVCRTFGLPDPREEGSKNPGATNVLRLGGKQYGIMVMVFDALKGILPVILAKFLSAEPVTVAFTALAAVVGHMYPVFFHFRGGKGVATTIGALLAFHFIIGVMVAATWLLVANFWRYSSLASIASISLAPFYSLILVGNLNIFPPLFMITILVLYKHRDNFNRLIDGKEPKIKFKHSVIEEIMEASPATSAEQEFPGKEVIDTNIDETEKTEQAEAVKKPKVKKATTKAKKTTSKEETTKKPKSTKPKTKTVKEKE

SEQ ID NO: 61387 - protein, 199 aa, Legionella pneumophila
MSYDLIEDAPFVSISEAATALDASIDTIRRWEKKGLIKAHRSDTGHRLFQITELQRLKAKLFGAGDDHCYKILTAPSRTQFKVVELFAGAGGLALGFHNAGLDCSMLVEIDKNPVETLRHNCPSWNVIHDDIANVDFQGITADVVAGGFPCQAFSYPNKYFRLSPGAEVRLRHAYVIKCQEVIRNDQGEITELHCTYDE

SEQ ID NO: 61388 - protein, 705 aa, Legionella pneumophila
MGYHFLTEGNGIIACYDMYPTQFHSIKDMINYLPVLKQMGFNALWINPMQMPGDISGFFKTDKNNGVKTGNEVTRSLYAMSHPLLFNPQFSLGSPEDPMGTTQRLNSEALQLFTQNARNLGIVPMFDLVLNHVAIDSPLCQDKPHWFKGVHEDFKDVRGFNYDDESIRKEIITEFWQPYIKRYMIEYGFDGVRVDAVGYVHPAVRSEIYAYIHSLAAEYGKPKPVILDEALFSKRPLADEVNYLKLPGIGPTHITTEAYNVEFDLASADLPYEITLEEQLKASVVFQQKDGTWRENTKGGCINFCGNHDYRSLAMTILFQMAKKRLESDAFYNDLMSSYQDLYFKFNAEQEKPHELKEPLKTTLLYSYVDQIKKELEDNKDETTQEFKTLVLEKLALSALTASGGWFLLSGDETCDITAKTVFQRKGAVDKSYYPQREHRIFSEKPVIAHKILEKMAEENFFIENSENKWMQELYRSLSSFPEMQKRLLVSHIDNIKHQINAGIDHVQEKFSRLLASENLNIGFTSQDFLENPRTHENGWLGLQNNFLFIKQLNTLLKRLPASLPGFSSELVRLPEKPHLIIIVRKNGNELNAPIDVVVVNLEQEKRQTLTKEDFQLIAKNYCNQYFSKNRPSVCDSLREKLYSHVLKSAVNNRVHTDTSIKLNGIHLFEFKETSLNTFFTIEKEKNYSHGNEDNTALTGNTISH

SEQ ID NO: 61389 - protein, 635 aa, Legionella pneumophila
MESVFSGESKFLLHHVSIHMNISTYEFVNNTITEESRVMALSEIIINDIVQSQTNAVISESNYHILRQYLLERKPLSRVLNPINSLLSEHCNQDKQAIINHLTQLACESQRNHDLQEARSDEQEGINENSLMINYRSELLTLENTLKELDTKCYQQQRQYNQVSRQFNELKVNMTHINQSIDRVRYERQLLDQQLNHPYSDGNVYTNPPTHTGIYPDLSPPQDRHTRDRLLQEENRLIEERQKLMHLINSKETEKNKEEQNLNRLHKEKKEAEGRYSEVKHQIDVVLPNSEQQRQIRNQERLARENARASYDPHLLQLSHKNLEALKSQIETQIRELDERRNQLMGEATDISYKIYLTQLEQVLQESEKGPQITFNENNALKMILAMMKNMEEMAEKEKDISSSIDKERHNLHSLQKSLVGYTRQLERYLTSDPHLVKQNKALTEENTQLKQYSESADNWRTKAFYASLFSVGGSLISTGILNTFIISPVFFAIPGALAALGVVSLVIAVVSYCQKYFSDMQMEQNNQKIEKNELILMKQWKKANELSLSTIPSLNAKIEQSEKELYALEQKLQDQQHAMSLLLNKAQNVTSNYGGSSNFFGNTTGNVFYLPSAPLHEDSPLYPEIEGERVNYGY

SEQ ID NO: 61390 - protein, 190 aa, Legionella pneumophila
MLHNTKINKLAVFCGSNTGYSEVYKQSAENMADVLSSNGITLVYGGSKSGLMGIIANRMLKNGSNVIGVIPKSLVDTEKAHDGLTELHVVNSMYERKILMCKLSDGFILLPGGSGSLDEFFEMFTLVQLGYHKKPCCVLNASGYYDYLLQFLDYAVNQGFLRSKDRNALIVNQYPDTLIENLFEVINNRK

SEQ ID NO: 61391 - protein, 623 aa, Legionella pneumophila
MPMTMNDQDQQSSQITKVISLGKEQGYLTYSQINDLLPNIVDTEHFDVIISMLEGMNIKVFELPPSEDELALLLNTEEVPDIEEAAMVLASVDKETGRTTDPVRMYMREMGTVELLTREGEIRIAKRIEEGIYQVLKSLAHYPETVQLVLEDYDRFLAEEIRLNEIISGFADVDEEIAPATNIGSMLDEEQQEEILLDVDEEDEDGEGGISDVDDGPNPEQAKIYFDELREAFEKAMKALKEHGRTNKKTVELLDSMSESFLKLKLTSRQVDKLTRHFRQLRNHIREFERSIMRLCIEKARIPRKLFIDTFPGQETDLGWLETIISKHAKKLDLQRIEENREEILRLQSKLASFEIEYGLTISEIKDINRKMSIGEAKARRAKKEMVEANLRLVISIAKKYTNRGLQFLDLIQEGNIGLMKAVDKFEYRRGYKFSTYATWWIRQAITRSIADQARTIRIPVHMIETINKLNRISRQILQETGREATPEELAEKMELSEDKIRKVLKIAKEPISMETPVGDDDDSHLGDFIEDNNIESPIDMATAEGLREATLEILETLTPREAKVLRMRFGIEMNTDHTLEEVGKQFDVTRERIRQIEAKALRKLRHPSRSEKLRSFLEGDEG

SEQ ID NO: 61392 - protein, 247 aa, Legionella pneumophila
MELSWTTFSLELINFLILIWILKRFLYAPIQKTILERKKRVQEQLETAERLHRQATQLQTTYEHRLTDWQQEKATLQNEWHEAMEQWKSEERLRFEKQLHQEKEQIFSHEMQKAAAIIENNAKEAFLLAGKFAEKLLMPFADAHLEEKIIKKTIEELHHIPTEQWQWLHTVPEEETVSIQTAYPIKEHQKQDLLQVIEQLSPKKITVSFTENPKLLAGLTLQMGPMCLQANLRDELKFFIETKNELV

SEQ ID NO: 61393 - protein, 99 aa, Legionella pneumophila
MNVINILKALSNEKRLQIIRWLKEPDKHFSSSHCDVSKDGVCVGLIEKKSGLSQSTVSQYLSQLQQAGLIFTERRGQWTYCKANASLINEFINELKVMI

SEQ ID NO: 61394 - protein, 436 aa, Legionella pneumophila
MRARGAQATDIVILIVAADDGVKPQTIEAIQHAKAAKVPIIVAINKMDKPDADPERVMNELSVQEVIPEAWGGDTMFVNISAKSGMGIDDLLDAILLQSEVLELKAVTDGAAKGVVIESRLDKGRGPVATVLVQSGTLHKGDILLAGFQYGRVRALVSDNGDLVDSAGPSIPVEVLGLSAIPHAGDEAVVVPDEKKAREVALFRQGRFRDVKLARRQKTTIEGIMENMTATESKVLNIVLKADVQGSLEAISDALTKLSTDEVKVDVISSGVGGITESDVHLAIASNAILIGFNVRADGTAKRLAEQESVSIHYYSVIYDIVDQIKGALTGMLAPQFKEEIVGIAEVRDVFKSPKIGAIAGCMVIEGVVKRNNPIRVLRSNVVIYEGTLESLRRFKDDVLEVRQGFECGIGVKNYNDVKPGDLIEVFETVEIKRDL

SEQ ID NO: 61395 - protein, 397 aa, Legionella pneumophila
MVFKSRLVGIILLCFSSITGWCLSQSPEEDRIIVSNCLYEQLKDKARLIAQSDHFSFIAIPIDENITNTLQKMRPVCGNYLNAEPYIQQTSNRFLDSKKLLDKLTSYHSISTANPYPINHEAQVHSLFEQIDPAKIWQTNQHLTSYINRSAKSRTGVEAAQWFKQQFDTLAQDYGRKDVESYFVKTGNKFIQPSVVTVIGKDKPGEAIVIGAHIDTLDGNMPGADDDSSGISVELEMARVVFSSNFELNRPIYFIAYAAEERGLIGSGYVVQDFLQKKIPVKAVMQLDQAGYRANAKDQTIWLLKDYVDKGLTEFTAELLTRYVKTPVGYTKCGYACSDHVNWTNEGFKTTYPSATTLDDDNPYVHTSNDTLDILNLEHMVNFTKLGLAFIVELGLN

SEQ ID NO: 61396 - protein, 254 aa, Legionella pneumophila
MTSYYNRSATKDTGVDTANWLKSKFEQMAVEYGRTDTSTFFVKTGWYKQPSLVTVIGKDIKAPAIVIGAHMDTLDGRMPGAGDDGSGSSSIMEAARVILSSKTTFKRPIYFIWYAAEERGLVGSQHVVQHFQEQSIPVKAVVQFDMTGYRNDANDPTMWVFTDYTDRDLSNYLAKLIDHYIHVPVDYSRCGYGCSDHASWNEEDIPAAFPCETSFADHNPYIHTSSDKMDLLNLEHMTNFSKLAVAFAIELASE

SEQ ID NO: 61397 - protein, 250 aa, Legionella pneumophila
MLNIKELNVAVNGQSILKGINLEVKPGEVHAIMGPNGSGKSTLSKVLAGHPSYEVTRGDISYLGQDLLPMSPEERARAGIFMSFQYPVEIPGVTNINFLKASVNAVRKGQGKNTLDAIEFLSFIREKCQLLDMDESFLYRSINEGFSGGEKKRNEILQMAALEPKLAILDETDSGLDIDALRIISQGVNAMRSPERSIILVTHYQRLLDYIEPDFIHVLANGRIITSGDKSLALELEKKGYSWLEEVEQL

SEQ ID NO: 61398 - protein, 223 aa, Legionella pneumophila
  MISC_FEATURE (30)..(30): X=any amino acid
GQGQNILHDVNFVIEAGTSVALVGHSGSGXTTIASLLPRFYELSQGMITLDGMPIQQLSLESLRKQMSLVSQNVTLFNDTLANNIAYGRFDASREQIITAAKLAYADEFIKQLPDGYDTRVGENGVLLSGGQRQRIAIARAILKDAPILILDEATSALDSESEHYIQAALEQVMKGRTTLIIAHRLSTIKHAHKIIVLQHGRIVEQGSHQELLDMDGHYAQLY

SEQ ID NO: 61399 - protein, 67 aa, Legionella pneumophila; identical to SEQ ID NO: 61224

SEQ ID NO: 61400 - protein, 382 aa, Legionella pneumophila
MADEEQSQEKTEQPSSKRLKESRKKGQVARSKDFNATVILLFTGLGFFIFGKQLSLQIASIMQQAFDFDRDILVTGNNSLENLFQLTKSGLWSVVPLLLVIFILSLLAPLLMGGWVFSGQSIQPKFSRLNVLKGLKRMISLKGFVEMLKAFLKFVLVASASILVLRSQVPLLLELGKAPLEIAITSGVMILLKSFVLISASLILIAAIDVPFQLYEHSKSIKMTKQELKDEYKETEGKPEVKSAIRRAQQETARRRMMSEVPKADVILTNPTHYAVALSYQKKGKKAPVVIAKGKNLVAFQISKVAKEHKIPIISVPALARAIYFSTKLNAEIPRGLYVAVAQVLAYIFQLRDRQRYDYKPEILQNVPIPPELAREAEEEIE

SEQ ID NO: 61401 - protein, 709 aa, Legionella pneumophila
MNKTWHQTATGNRSILSNLRLSRTLLNIIFIIALSLLLIINIISYNQVKNLIFASNWVSHTHEVIQTIDTCLYDIVEIESRQRFYLIRGSSSQLMADIDDMKSTLQLNLDKLEQLTRDNPEQNKRIHRFIDLVKQRLNLLNQLVQLKGSGKLDTQEGYDLLNQSQDMSHQVKSLGQEIKSVELVLLSERNTGVVRWAVTSSFILISGGIASILFLTLAFILANIELSTRRKTELQNQNTQIRLKKIIESASDMIAAFGKDQRFITFNEAYQREFKRLFDKSISINMSLEEAFNNAPENKKKLVQSWKESLQRDEETKNIEVNTEQEKTIYEMTSKLIQNGDNEIKGVVHSVRNITKRVQEHTELQESYEKLANGMKELQEKNEQITLLVEMSDIMLACGSQEELSEVMAKYSQRLLQFSSGYLFIMHPSKNYLEKAASWGNPHPHDLTFTPEQCWAIRLGRIHYAGSSRIELMCSHMMFDEQPELSLLCVPLMAQNDIYGLLYLEVGLKFDENQQLLITAFAELTALALANVRLRENLRYQSIRDPLTGLYNRRYLEDFLFKQLHQAERTKASFAILMLDLDHFKKINDTFGHDAGDLVLKELGQILNNDIRLGDIAARYGGEEFVLLLYDINAQAAKMKAENLRSAISNLQVKYGAQPVGQITASIGISVYPDDAKSPAEVIEAADKALYQAKNKGRNKVILFSEISP

SEQ ID NO: 61402 - protein, 265 aa, Legionella pneumophila
MLRRFAVIGHPIAHSLSPVIHQMFAQQTQIELIYEKILGDDVKFEQQISDFFIQYGNGLNVTLPYKKRAYELAKIRTQRCTLAGAANTLWMEENQLHADNTDGIGLIRDLSRFLELKDKKILILGAGGAARGIIFPLLEAKPLQLIVANRTLEKAEELQRQFPQINVTSFAELTEFFDLIINATSTSLSGQVIVLPEEVLSHKPFCYDLAYNQKTSTAFVQYARNGGCEAVDGLGMLVEQAAEAFFTWNKVMPSTQKILEHLRSF

SEQ ID NO: 61403 - protein, 181 aa, Legionella pneumophila
SRLYRIPIPAVFNLLGPLINPAQVKRQVVGVFSTNWLKTIATVLANLGSERSLVISSQDGLDEISIAAKSEVVEYRDGNFKQWFISPEDYGLKHSSLDAIIVDSPEQSLHLIQSVLSGDSGPARDIVLLNSAAAIYCAKDGISFDAAIEEARIAIDSGKANLCFNKLRLLTQTLNKESNHE

SEQ ID NO: 61404 - protein, 525 aa, Legionella pneumophila
MNDLKKSPLLILDFGSQYTQLIARRVREMGVYCEIYPYHINHEQFKKLNPCGVILSGGPSTVTHDANPRAPQWLFDSGLPLLGICYGMQTMAVQLGGQVHSSALREFGYAELRLHGHSQLLNNIEDRILADGSALLDVWMSHGDKVTELPPGFKIICETRNAPIAGMADESRQMYGLQFHPEVTHTLQGLRILQRFVVDICKASTDWTPEHIIDEAINKIREQVGTEKVLLGLSGGVDSSVVAALLHRAIGEQLVCVFVDTGLLRLNEAEQVLSMFGRHMGIRIIAVNAEDKFLTALKGVTCPEEKRKIIGRTFIEVFDEEAQKLTEIKWLAQGTIYPDVIESAATSTNDAAVVIKSHHNVGGLPDTLNLKLLEPIRELFKDEVRQVGLELGLPHDMVYRHPFPGPGLGVRILAEVKKEYADILRKADAIFIEELHNAQLYHKISQAFAVFLPVKSVGVMGDGRRYDYVICLRAVETVDFMTAHWSQLPWDFLGKVSNRIINEVEGVSRVTYDISGKPPATIEWE

SEQ ID NO: 61405 - protein, 279 aa, Legionella pneumophila
MIDLHCHSSFSDGALTPEELIKRASTLQVECLSLTDHDTVAGYDALYDAAVHTNIKIVKGIELSTRWKKYDIHILGYQINHTAELKELIAHQNKSRIERAEKIGESLHSVGIDNAYEKASLLAGHKRVGRPHFAQVLINEGKAKDMKSAFKNYLGRGKCAYIPTLWISMHDAVKGISHSGGQAVIAHPLKYGLTRSKLRDLITEFKEAGGVGMEVVSGEMTTVQIQEMAGMCERFHLLASSGSDYHSDAQSCINLGRQRQLPIICTPIWQEWNMKQGTL

SEQ ID NO: 61406 - protein, 152 aa, Legionella pneumophila
MKAKAILVSGKQNTVLRGHPWIFPKAIAQYSGKLITGELAEIIGSEGESLGFGAYNEHSLYRVRVLALSDEQINSCDYQSLITHRIKHASLERRCLDLPNEQTNAYRLFNREADGLSGLTSDCFNDYSVIERSDYWVKLNKSDIVHVLQEPL

SEQ ID NO: 61407 - protein, 291 aa, Legionella pneumophila
MQEIDVLIIGAGAAGLMCAIEASKRKRKVLVLDHANKAGKKILMSGGGRCNFTNYYIEPNKYFSHNPHFFKSALSRYTQWDFIELVNKHKIPFHEKTLGQLFCDNKSKDIVDMLLKECEQYGVAIYLNTVIEKIQKTNDYSFKIGTTKGKFHCHSLVIATGGLSIPTMGASPFAYKVAEQFAIRVWPTRAGLVPFTLDVLEKDRLSILSGIGIDSLVNNERNQFREHILFTHRGLSGPAILQLSSYWNPGESICINLLPEHNLLESLKTARAEAPHKQLNSVLSMYLPKRV

SEQ ID NO: 61408 - protein, 86 aa, Legionella pneumophila
MVVIRLSRAGAKKRPFYHMVVTDSRKRRDGNYIERIGYFNPVARGQEVKLHIDMDKMTHWQKVGAQLSDRVSALLKEHSKKSETAA

SEQ ID NO: 61409 - protein, 140 aa, Legionella pneumophila
MSLISLIAAIDETGGLGINNQLLCYLPADLQHFKSITMGKPIIMGRKTYESIGKPLPGRLNIVISQSIQSIPGVVVVDSLGRAIKETADASEVMIIGGAKIYSQAISMANRLYITRIHHQFTADVFFPKINELAWWASSS

SEQ ID NO: 61410 - protein, 392 aa, Legionella pneumophila
MLSVLSYRLSLLPKLSKTCYLLLLFSFLECVAGGIAYYLSLYLGTSTPLTKLQIGQVGSIVGFGALAGALCSTYITDKLNNKNIIIASFLFLGLGFFCLPQSMSFLLISGCVFIIGFATSIFLTTNNTLLLQNAPQDQNSLRFIQSMKIVSENLGNSFSILLIMFFAAQYYGQIFEVIGLFFFLFALNTMKYLNVKQNSLEDSSYEEKETNQQGNNKRLYVTISAVFIVGIIYAQQRIAYPLFLHEAFSSFTITAILFWLDPIIVSLFQVKITKIVSPLKISHQLAIGGLLLGTGLFALLIVDSIGGAIMACLTFILGEMLFMPTSFVRCYESAGNKRKGMVAGAWRSAYSSGLIVGPVLSGFLMEYYSYNACWILAGILGFFLFILFSVKK

SEQ ID NO: 61411 - protein, 455 aa, Legionella pneumophila
MNSDRRFAIGIFYFADVEANALFSNTFVLLVNNDIVISLVRNHSKGYLMHQEHPGQTDTPKIDPWLIFVILMLMALMQTTTDQYIPSLPAITTALNSTEASIQLTISMFMLGLSLSHIFYGPLSDKIGRKPPLMFGVGLSILGSLVCFVAPNVSVLILGRFLQGFGIGCCNSVGRSLVRDLFTDRLLAKIGSYVGVVSIFIMAASPTLGGFIQEMAGWKANFMFLFVFGILVWLLAFCILPETNKHLNPEATKIKVMAKNYFTLLRSKIFVGYTMCACFAFAGMVSYLTIAPFLFQNTMGLSPLEFGRLTFFIAGAICFSGIVNSQLVMRKGISFMVCTGVLFMIVGGLSLLLITILGWSQIYFIMISMTLFSAGAGFTFINAFAGAFHPFPQMAGTVGALYASMQDLSAALTSGFIAGIKGYGQYSLAIILLILGLSSLVAWYYLGLQDDAISN

SEQ ID NO: 61412 - protein, 310 aa, Legionella pneumophila
MFISQLKDKLASYDRYKEHRINGLKAVFVLELMIIFYFFSSIDNPYFYYFYAPITCFTVEAAGTTLKEKYMLLLYTLLGSILSIFLFGIISVYNVLFIFFVFFYTLALYFLVLHHFKKMLVIVPLMLSLASYSLIYGVEADSNFYIAINNALYTLAAMAVIFAGLFIFPKKYYFDIWERAFLEVITGLESLSAKICKGEVKTIAIFSGIIVMERYSKMLPRNIKCYSILKITILSFELILTMSYLLSFQKQLRKEYVIVLHHYLERLCQSCKARQPLILSDQELPAFKETHELEILYQLILSWNYLCADG

SEQ ID NO: 61413 - protein, 214 aa, Legionella pneumophila
MDFNQVKVINHPLIQHKLTIMRKKETSTVKFRTLMHEVSMLLAYEVTRDLEIEYEEIETPLATMQSPVLKGKKLVFVSILRAGNGLLDGMLQLVPTARIGHIGLYRDPKTLEAVEYYFKLPEHTQDRDVIVVDPMLATGNSAIAAVKEVKALHPKSIKFLCLLASPEGISNFHGEHPDVPIFTAAIDEQLNDHGYIVPGLGDAGDRLYGTKLAH

SEQ ID NO: 61414 - protein, 117 aa, Legionella pneumophila
MSFKPAVELVKLQQNNREVAVIDGQKILIIWHDNQVHAIQSQCPHLKLPLTKGKITESCSIICPFHKSEFDLKTGEAKCWSPWPPVVGNLLGKVSSRKHLKIYPTQIENGQVLVDVG

SEQ ID NO: 61415 - protein, 128 aa, Legionella pneumophila
GPYFKPLREWHPVISRLNVILLDTRNDYEYELGTFKNAINPDIENFREFPDYVQRNLIDKKDKKIAMFCTGGIRCEKTTAYMKELGFEHVYQLHDGILNYLESIPESESLWEGKCFVFDDRVAVDQKL

SEQ ID NO: 61416 - protein, 122 aa, Legionella pneumophila
  MISC_FEATURE (19)..(19): X=any amino acid
MLSAVIPSELSYPAMPLAXQPVHQRFVHSGPLVLGAAPLNFPTPTADRDRTVSRRSKPSSRTTLNGEQPYPWDLLQPQDVMSRHRGAKHRRRYELLGGISLLSPEYLLSVERWPFHSEPPDH

SEQ ID NO: 61417 - protein, 271 aa, Legionella pneumophila
MKRYVFMLSDGTGITAETLGNSLITQFENIQFEKITIPYIDSTHRAESVVLRINQCFSEQGTKPLVFMTLVDPEIRQAIKKAHACVFDLFSIFIGPLENELEEKSSYTVGRTHGVANVKSYSHRIEAIDFALSHDDGIKTRGYDKADIILIGVSRCGKTPSCLYMALQYGILAANYPFTEEDLVGFRLPEVLRPYKQKLFGLTIDAQRLQQIRSERRPNSKYASAEQCRLEVTEVEAMYQRENIPYINSTKYSIEEISTKVLAIAGLQRKI

SEQ ID NO: 61418 - protein, 94 aa, Legionella pneumophila
MRASQWFLVTQKETPNDAEIASHQLMLRSGMIRKLGSGLYTWMPLGLRVLRKVENIVREEMNKTHAMELLMPSVQPAELWQETGRWETFGGQLL

SEQ ID NO: 61419 - protein, 356 aa, Legionella pneumophila
MKIIIKVGTQSILSVDGSPIYSVLNNLVNQIIYLKNLGHQVILVSSGAVGSGRKIAKNSLGKTYGDTVGEKQLLASIGQPELMNLYSSLFKNENILVSQLLLTKQDFHTRQHYLNIARLLTELLKHQNIIPIVNENDSVAIEELMFTDNDELAGLIAAQINADYLILLTNVDGVFTSHPNDPESKLINTIDPNSGWPNVSAVKSKLGRGGMVSKLDTARKMAGLGINTVIANVNVESIVPKILNREAVGTIILASKRKSSIKRWIAFSHRTSLPSIVINDNLITLLRNGNRVMSILPIGIEDFRGECKKGDLIDILNSNNEKIGVGIARYDFLRLKDYLRLQNKPAFIHYDQLHIL

SEQ ID NO: 61420 - protein, 476 aa, Legionella pneumophila
MSNKKHSLTIFSLTMITVGSVDSIRNLPATALFGSQLIFYFILGALFFLIPTALVSAELASGWARQGGVYIWVKEAFGKKSGFLAIWLQWIENVIWYPTILSFVAGTIGYLINPSLTTNPYFLWAVIVSCFWGATIVNLRGMKSSAMFSNICSLAGLLLPMSLIIGLGAVWIAQGNPLQISFDMPSIVPHLSDKGMWVSLTAIILSFCGIEIATVHANDVKDPQHAFPKALVYSVGIILSTLILGSLAIAVVLPQKDINLVAGIMQAFSAFFLKYHMDWMMPVVAVMLVLGGLGGVSNWIIAPTKGLLVAAEEGNLPEVFQRTNGKGAPAMMLYTQATIVTVLSALFLFMPSVNGSYWLLTALAAQLYMLMYLIMFVAAIKLRISQPYHPRPFKIPGGMAGMLFVAGIGIIGVVTTLAVSFIPPEGINVGSATRYELTLIIGLLLMCAPPFIASWLQAKEADLEPARDPLEACQQA

SEQ ID NO: 61421 - protein, 431 aa, Legionella pneumophila
MGKNVVVLGTQWGDEGKGKIVDLLTQDAQVVVRYQGGHNAGHTLKINGVKTVLRLIPSGMLRPNVTCYIANGVVLSPQALLSEIKELEGNGINVRERLRISLACPLILPYHIALDKARETHMGKSAIGTTGRGIGPAYEDKVARRALRVGDLFHRDRFANKLTELLDYHNFVLTQYFKQPAVDLESLLGESLQWAEELRPMVCDVSACLHEHRKQGENILFEGAQGVYLDIDHGTYPYVTSSNTCVGSVINGAGFGPRYIDYVLGITKAYTTRVGGGPFPTELLDDVGKRIAERGQEFGAVTGRPRRCGWFDAVLLKRSIELNSISGLCVTKLDVLDGLEVLRIAVAYKDRDGNILSRPPLAADDFNDLLPVYEELPGWQESTADVTVMSDLPANARAYLKRIEEILGIPIDMLSTGPERDSTITLRGPFL

SEQ ID NO: 61422 - protein, 410 aa, Legionella pneumophila
MKVYLVGGAVRDRLLGIPVQEQDWVVVGATPEELLKRKYRQVGRDFPVFLHPETKEEYALARTERKSAPGYYGFICDFSESVTLEEDLARRDLTINAMAMDEQGNLIDPYQGQRDLEEKLLRHVSSAFVEDPVRVLRVARFASRFHHLGFRIANETRLLMYSMVKQGELAHLIPERVWQEWQKSLEEKNPEQFILSLRSCDALRVILPEINSLFGVPNPHQYHQEIDTGIHSLMTLRASSELSEEPLVRFAALVHDLGKASTPIQAWPKHHGHEEEGTKLIRALCARLRIPNDYRDLAVTVARAHLNIHRLCELRPNTIVKLLEQVDAFRRPQLFHKILIACQADAESCGKTVVYRQTQLWNEILSECVKVTPQTFIVQGYEGKAIKEAMHQSRVACVERIMTSWKSNEK

SEQ ID NO: 61423 - protein, 225 aa, Legionella pneumophila
MTTNSVNGSNSAGGLGLNQIDSGKRQNLGQQDFLRLMVAQVQNQDPLQPQANGEFLSQLAQFSTNDGITKMQESLQQLASSLQSNQALQASALVGRKVLVNSNTLSLGTEGDVKAAIDMAPGVSNLRAAIYTESGELIKTIPLGQPEPGFFQFSWDGTDQSNQRLASGRYTIKVTGTYGGQEVALKTMTSANVDSVSLGQNGEDLKLNVAGVGSVYLSQVRQISV

SEQ ID NO: 61424 - protein, 640 aa, Legionella pneumophila
IPLGMADIATVLWKKFLKFNPKNPHWFNRDRFVLSNGHGSMLLYSLLHLTGYNLDISELKNFRQLHSKTPGHPEHGHTPGVETTTGPLGQGLANSVGMALAERVLASTFNHDHFNLVDHYTYTFAGDGCLMEGISHEACSLAGTLGLGKLIVFYDDNGISIDGKVESWFTDDTTSRFKAYNWQVIGPIDGHDADQIEQAISAARENTTQPSLIICKTVIGLGSSVAGSEKAHGSPLSAQDINNVREFFNWKHAPFEIPDSIYKQWDHREQGEKEEQQWLQLLHEYRQQHPSEHDEFLRRANGDLPDDWQEISAGFLKQCLNNEKAIATRKASQQCIEFFAPILPEMFGGSADLTGSNNTDWSGSKAITAHNFSGNYLYYGVREFAMAAIMNGLAVHGGFIPYGGTFLVFADYARNAIRLSALMKQRVIYVLTHDSIGLGEDGPTHQPIEHIAMLRMTPGMTVWRPADLMETAVAWQQSLEHHNGPSALLLSRQNLPALAHGTDAADLIKKGGYIIADCEGKPDAILIATGSEVQLAITAAEKAKARGLQVRVVSMPCAERFLAQSDDYKNQVLPGQVRTRIAIEAASSAYWHQFVGFDGAVIGLDCFGVSAPATDAFNYLGITVEKIINTLDTLTKQTMV

SEQ ID NO: 61425 - protein, 276 aa, Legionella pneumophila
MDLGFPTFIYGTAWKEKRTSELVELALTTGFQGIDTANQRKHYYEEGVGYALQQYYKKSGILRDDIFLQSKFTYTHGQDHRKPYDDTASLTIQVQQSFASSLEHLNTDYLNSYILHGPYYQYHFSDEDKEVWNKMESLHKDGKVKHLGISNVSYEQLVELISFASVKPKFVQNRCFARLLWDKQIRNYCQAHGIIYQGFSLLTANQYELRHPKLENLSKKHEKSIEQIIFRFSQQIGMLPLTGTTNLDHMKEDLAIHQFRLTDDEINFIENIAFIP

SEQ ID NO: 61426 - protein, 211 aa, Legionella pneumophila
MYFIMLKRLDSDLQTLNDFLKTKTPEAWLNHAAANIPLLLLDHAHCERKAAGTAINFISKYPEKAELVAIMAPLAREELLHFEKVIDIMKQKGIVYSPLQPSDYASNLHKHVTNKDGIERLCDQLIIGAIIEARSCERFSSIIPYIEDQDLARFYKTLVKSECRHFEEYLHLAKFYGGSVDDRISEFLTIENAFILSDDVVFRFHSGLPPA

SEQ ID NO: 61427 - protein, 469 aa, Legionella pneumophila
MNNSEQFLSPRMGRVEQIHFVGIGGAGMCGIAEVLHNQGYRITGSDLGESGTVQRLRSLGIQVYIGHRLENIKGADVVVRSSAVDFNNPEIVAARELMIPVIPRAAMLAELMRFRHGIAIAGTHGKTTTTSLVSSLLAEGGLDPSFVIGGKLNSCGANAQLGKSAYFVVEADESDASFLFLKPMMAVVTNIDADHMDTYEGDFEKLRTTFLEFLHHLPFYGLAVVCLEDEEICRILPAIQRPTLTYGFKEEAHYRAINWTQKGMLSEFVVVRPAPHKQLTIQFQYPGRHNVLNALASIAIATELGVDDDSIVRGLQKFQGVGRRFQMLGEKQFEKGAAIIVDDYGHHPQEILSTIDAFRRVWPERRLVHVFQPHRYTRTQSLHRQFVDVLSLSDELLLMDIYAAGETAIPGVTSENLANEIRSRDKRVTIVSEQSLKATLDEFIKDGDVILMQGAGSIGQIAVNLMKNM

SEQ ID NO: 61428 - protein, 462 aa, Legionella pneumophila
MRRLFAEGAFSQAFVPVLAEYQKTRSAEDVRTFIARISGYLSSILTLVTVVGIVASPVIIFLFAPGFHHDSVRAELATQMLRITFPYLMLISLTAMAGAILNTYGYFGVPAFTPVLLNISMILAAVYLCPDLPQPVVGLAWGVLIAGIVQLLFQLPFLYQRHLLIRPRVVRDDPGVNKVLKLMIPALFGVSIAQLNLMIDSIFASFLKVGSVSWLYYTDRLTDFPLGVFGVAIATVILPHLSRKHTEQNINQYSRALDWGLRSILLIGIPAGLGLSFFALPLIASCFAYGKFTAYDLLQTQKSLITLAMGVPAFMVVKVLASGFYARQDISTPVKVGAIAMVVNTLLCFIFVWHLAHAGLTLASALAGYVNCVILLFLLIKRGLFKPSPGWLKYSMQLLIANFAIGVYLYFMSGTATYWLGFSPLMRLSLLLAHVFVTVVIYLLVLGIIGLRPSHFRGQIKD

SEQ ID NO: 61429 - protein, 305 aa, Legionella pneumophila
MSKIAVVINPIAGGGRGKKVWKVLKPGLHALFEQTVYRISNRVNDLEAITDGLLAENPDSLLIIGGDGTLNHVLNGLIEKDKLKNPQTKIAFFNAGCGGDFTRQFPQQKMTEFLDRLSHNQFIKCDIGKITLANQLSRYFINIASCGLSGHVVLRVSKSKWLKKLGGTLNYLLHALTGLMTYRKTKVRVQIDDALPFDSSILLMAVCSGQYFGGGMHVAPMAKVNDGLFDVVSFNEFSKLNALLKLYKIYSGGHLLDNNVHYVQTKKIKIEPLEESKIEIEADGEIIGCLPAQFELIKETLPLII

SEQ ID NO: 61430 - protein, 214 aa, Legionella pneumophila
  MISC_FEATURE (51)..(51): X=any amino acid
  MISC_FEATURE (94)..(94): X=any amino acid
  MISC_FEATURE (96)..(96): X=any amino acid
  MISC_FEATURE (115)..(115): X=any amino acid
  MISC_FEATURE (142)..(142): X=any amino acid
ISLSLGWRQCGHRYAIRAGRNLPDKEFRYLRTVIVTAAVYRGFDQELLRRXPHQLTFRHRAGVTPYTSSYEFAECCVFNKQSQPPGLCGPLQLXKXIPSPERAYLLPKLRYHFAXFLHPSSLKRLSILYLSTCVGLRYGSLXVMASSFSWKPGINDFSVPKGQNHFAPQSYGKPDLPSLPPYMQVPGQPTPGSPSLLRPHFTTYKKSRNINLVP

SEQ ID NO: 61431 - protein, 143 aa, Legionella pneumophila
MAEMKQYYGTGRRKSSIARVFLRPGKGDIKVNDRTLQEYFCRETSCMIVMQPLETVDLLNKFDVYITVTGGGISGQAGAVRLGIARALVAYDEDGLAEGAEPSPDSFRRKLRARGLLTRDSRRVERKKVGLHKARRATQYSKR

SEQ ID NO: 61432 - protein, 483 aa, Legionella pneumophila
MNYGLTHTPSLTTSECLVLGVFSDLALPDFANAIDNEQQGLIKKLCQRVPEPGNTVWQTDVEGHSLLIIQCGKKEEFSANSLQKRVGEITEALIKQRFSSATVCLPRLTQESAEWQIEQMIVQIDNLRYQLLDFKTKNAKSHKLESVIFHLPGATEKSLEMAKAIVTGVEFCRDLANMPANICTPTYLGEQAILLSKQFDQISCQVMGPEEIKEMGMGALLAVAQGSDQPPRLIDVHYHGNKNSAPVILVGKGITFDSGGLSIKPANAMDEMKYDMSGAASVLGVIKACALLKLPINLIGIIASAENLISGSAVKSGDIVTTMSGQTVEIINTDAEGRLVLADALTYAERYNPDFVIDIATLTGAIIVALGNIATGYMTRDEQLAKSIERAANESQDKVWRMPLDEAYQDALESPLADMINAGFDRSAGSITAACFLSRFTEKYRWAHLDIAGTAWISGKKRNATGRPVPLLIQLLRHVANSR

SEQ ID NO: 61433 - protein, 337 aa, Legionella pneumophila
MKAIGYYHSLPITDNKALMDLDVSVPKATGHDILVEIKAVAVNPVDTKVRRNVQPEPHQPKILGWDASGVVTEIGSEVTMFKPGDEVWYAGDLTRPGSNCEFHLVDERIAAKKPKSLSFQEAAALPLTSLTAWELLFDRLQLSAEDKGILLITGAAGGVGSILVQLARQLTQLTIIGTGARPESIQWILDNGAHHVIDHTKDMKAQLQNLHYSEVDYVISLTHTDQHAKSLVEVLKPQGKFALIDDPQNLDIKLFKLKSISIHWEMMYTRSMFKTADMIKQHDILTEVARLVDAGKIKTTIAECLGLINADNLRRAHALLESGTSRGKIVLNGFKSI

SEQ ID NO: 61434 - protein, 1080 aa, Legionella pneumophila
  MISC_FEATURE (1064)..(1064): X=any amino acid
DNNGNNIYLYNIAGSVVGSTSATQAGITTGNTIFSLSVNSSSGVVTLTQHQEVDHGLPGASSNYAAQEAILNTGLVFLNATAVTTDGDGDTATASASLDLGGNVKFDDDGPSVTMAVSDNNAITLNTQDAETIGVLSDTDSASFAAAFAVTPNYGADGAGTTVTTYALSVSAQGVDSGLDNNGNNIYLYNIAGSVVGSTSATQAGITTGNTIFSLGVNSSSGVVTLTQHQEVDHGLPGASSNYAAQEAILNTGLVFLNATAVTTDGDGDTATASASLDLGGNVKFDDDGPSVTMAVSDNNAITLNTQDADTIGAASDSDSASFAAAFAVTPNYGADGAGTTVTTYALSVSAQGVDSGLDNNGNNIYLYNIAGSVVGSTSATQAGITTGNTIFSLGVNSSSGVVTLTQHQEVDHGLPGASSNYAAQEAILNTGLVFLNATAVTTDGDGDTATASASLDLGGNVKFDDDGPSVTMAVSDNNAITLNTQDADTIGAASDSDSASFAAAFAVTPNYGADGAGTTVTTYALSVSAQGVDSGLDNNGNNIYLYNIAGSVVGSTSATQAGITTGNTIFSLDVNSSSGVVTLTQHQEVDHGLPGASSNYAAQEAILNTGLVFLNATAVTTDGDGDTATASASLDLGGNVKFDDDGPSVTMAVSDNNAITLNTQDADTIGAASDSDSASFAAAFAVTPNYGADGAGTTVTTYALSVSAQGVDSGLDNNGNNIYLYNIAGSVVGSTSATQAGITTGNTIFSLDVNSSSGVVTLTQHQEVDHGLPGASSNYAAQEAILNTGLVFLNATAVTTDGDGDTATASASLDLGGNVKFDDDGPSVTMAVSDNNAITLNTQDADTIGAASDSDSASFAAAFAVTPNYGADGAGTTVTTYALSVSAQGVDSGLDNNGNNIYLYNIAGSVVGSTSATQAGITTGNTIFSLDVNSSSGVVTLTQHQEVDHGLPGASSNYAAQEAILNTGLVFLNATAVTTDGDGDTATASASLDLGGNVKFDDDSPSVTMAGSDNNAITLDTQDAETTGGIFDDNSASFEAPLGVTSNYRAHGGGPQGDNLHLXGGPPKGGDFGGLCTSG

SEQ ID NO: 61435 - protein, 343 aa, Legionella pneumophila
MSNYQFTKPAGPFRLFELAKISGATLYEGKGETFTVSGLAKLSEATSNDLVMLHQKKYVKELKHTAARVCIIGPDYVKYAPDSMYLLVHPNPYKAFALIAQAFYPSEKPPGFIATSAMIESSAIIGVDCFIAHGAYIGNQVKIGNRCKIGVNTYIGDTVTIGDDCLIEDNVSIRHAVIGNNVVIYSGARIGQDGFGFASDANGHYKIPHAGGVIIGNDVEIGANTCIDRGSLDNTVIEDWCRLDNLVQIGHNVKIGKGSVLVAQVGIAGSTELGEHVTLAGQVGVIGHLKIGKGATVLASAKVYKNVKSGDRVGGHPAVSISDWQKQIRFLKTAIKSKKSPKS

SEQ ID NO: 61436 - protein, 361 aa, Legionella pneumophila
MKAKVIVGMSGGVDSSVAAWLLKEQGYQVEGLFMKNWEQDDHNDYCPAAKDLADAQAVCNQLRIPLHTVNFSKEYWDRVFAYFLSEYEKGRTPNPDVLCNKEIKFNAFLNHALTLGADYIATGHYAKNTIEGSIGYLFKAKDREKDQTYFLHAVEPEALSKTIFPIGDFTKPQIREFAKQLGLVTHAKKDSTGICFIGEKRFKTFLNEFILAKPGEIKSTGGKTLGQHDGLMFYTLGQRQGLGIGGLQNSTDEPWYVVDKDIASNTLYVAQGSQHPMLYSQGLICGPIHWLADYENHLPLTCFAKTRYRQTDQACMISPPDNNQHYVMFSSPQRAITPGQFIVFYEKNQCLGGATIEQIIR

SEQ ID NO: 61437 - protein, 422 aa, Legionella pneumophila
MKIRIKSTRGQCVSTIDEAILSGLAGDGGLFVPDRFPNLTIKKFYEYGNLIDFSVNLLSPFFSDSKIDVNNAFFQKFLTFSFPLHHLFKKSYVLELFHGPTLSFKDLGTQFFSECLLHLIENKSAKVLVATSGDTGAAIAHALDGKRDLEGIILFPKDKLTFRQQSQITCWGENIRALAVNGSFDQCQQLVKLVFAKREHKGILTTANSMNIARLLPQIIFYAFTSIQLALRHNHSVNFIVPGGNLGNVTACYWAKMLGFPVEQILIANNINSALGEFLLTGAYQAKSVTKTLATAMDVGEPSNLDRLFVLFNNYSECKKQMNAESVSDEQIKQAILHCYNKYHYIICPHTATAYHRLSTINQDKPWVIVAPGHPAKFEEVLEPLLKKEIPVPEQLKVLLGRKQHYSIIEPNYHALYHFLVE

SEQ ID NO: 61438 - protein, 340 aa, Legionella pneumophila
MSRHLNVAIVGATGAVGETFLTVLEERNFPIKSLYPLASSRSVGKTVTFRDQELDVLDLAEFDFSKVDLALFSAGGAVSKEYAPKAVAAGCVVVDNTSCFRYEDDIPLVVPEVNPHRIADYTKRGIIANPNCSTIQMVVALKPIYDAVGISRINVATYQSVSGTGKKAISELVAQVGDLLNGRPANVQVYPQQIAFNALPHIDQFEDNGYTREEMKMVWETRKIMEDDSIMVNPTAVRVPVIYGHSEAVHLELKKPLTADDARALLAKAPGVTVVDNLSKASYPTAIKNAVGHDDVFVGRIRQDISHPCGLNLWIVADNIRKGAATNAVQIAEILQKEFL

SEQ ID NO: 61439 - protein, 149 aa, Legionella pneumophila
MSMELRELYQEIIIDHNRNPRNHHAMEDATTEAKGFNPLCGDKLTVYLKLQGDLIRDVSFIGCGCAISQASASLMTDALKGKSIKEAHELFHRVHRMLTQEEEDSLVSMDKLTVLAGVKAFPARVKCATLAWHTLEAALNKETEVVKTE

SEQ ID NO: 61440 - protein, 623 aa, Legionella pneumophila
MVSKQQTMGFQTEVKQMLHLVVHSLYSNKEIFLRELISNASDALDKLRFLALSNGSLFENDSDLKISIQINEKLQTITISDNGIGLSWEEAVENLGTIAKSGTKEFISQLTGEQAKDSQLIGQFGVGFYSAFIVADKVTVKSRRAGLQPEDGIVWESKGDGEFTIGYEKKSTRGTEITLHLKPENDEFLSDWRIRGIISKYSDHICWPIVMKKLSEEGKESKEFETVNKATALWTLQKSEISEEDYKQLYKHISHDYMDPLTWSHNHVEGKHEYITLLYIPAHAPFDLWQHEAKHGLKLYVKRVFIMDEATQFLPRYLRFVKGIVDASDLPLNISREILQDNKQVESIRAACTKRVLSMLEKMATNDKETYQKFWNEFGLVLKEGPIEDFANKEAIAKLLRFSTTASGSEKQEVSLEEYVSRMKEGQDKIYYITASSYNAAKNSPHLEIFRKKGIEVLLLSDKVDEWLVGYMNEFAGKKLQSISKGKVELGDDETSEQIKEQEKTLEPLIKHIKSVLNERVKDVLLTNRLTDSPACVVADEQDMGLEMQRILQAAGQQVPVSKPIFEINPDHALIKRLHDIQDDNQFELWVTMLFEQAVLAEGGQLDNPADFVNRVNRLLVSS

SEQ ID NO: 61441 - protein, 390 aa, Legionella pneumophila
ALAVLKKYFGFDSFRPPQEKIIEDVISGEDVLVLMPTGGGKSLCYQIPAIVRPGVGIVVSPLIALMEDQVTALKLQGIRAAYYNSSLTAEEARNVLNQLHHNELDLLYIAPERLISTSFLDRLSECTISLFAIDEAHCISQWGHDFRPEYACLGLLKTNFPDIPMIALTATADKQTREDIVTKLNYQPKKYVVSFNRPNIHYKVVPKTNAVKQLNLFLQSDTQQSGIIYCGTRHTVEHLTAKLQELGFKARAYHAGLPHAVRREVQNLFRYDRIDIVVATIAFGMGIDKPNVRFVVHHDLPKSIEGYYQETGRAGRDGLPAKALLLYDAADSARLRSWIMNIPLEEQRHIETNKLNHMLAFAEASHCRRQILLRYFDEPSHTECKNCDVC

SEQ ID NO: 61442 - protein, 378 aa, Legionella pneumophila
MNNKVMIKSMFVLSLLSLLPLITYAQNTTDMHGKMDMKQPTQKNEIVIDPVRLQAIGITSEPVRRQNIEKTIRTVGRVAVDERRVAHIHVRFDGWIEKLFINFTGEKVKAGQALFTVYSPDLVSTQQEYLLALNAQKILSQNTTSIAAQGAKDAFQAAHQRLLLWGISEKDIEQLKHTGKITRTMTIHSPIKGTVLKKMAFIGMRIEPGDELYTIADLSHLWVLGDIYEYELPYIRLGQTADLTITYLPNELFKAKLDFIYPTIDLKTRTVKVRFEVNNQKEQLKPGMYVNLELKIPFGERLVVPKNAVLLTGERAVVFIYHGKGKIEWRDVTLGVRAGDLLEIVQGVKEGDEIITSANFLIDSESQLKAAMGGMQHK

SEQ ID NO: 61443 - protein, 443 aa, Legionella pneumophila
MSSQLPILTVSQLNRQVKGFLENEIGLVHVEGEISNLSKPSSGHYYFTLKDSTAQIRCAFFKNRHSNSLLRNFNDGQQIVATGKLSLYEARGEYQLIVEEIVKAGMGILYQRFEELKIKLASEGLFNPERKKPLPRIPETIGIITSPTGAAIQDILSTLARRFPIARIIIYPSEVQGQTAPQQLVKALKLANAHKRCQVLILARGGGSIEDLWAFNDEYLARQIAISEIPVVSGIGHETDFTIADFVADYRAETPTAAATAVTPNCIELFNILDTAIYRLHDAIIRLVKGLQLKLNHLIDKIASPRQTISTYWQTLDYLERQLISAMTQFINLNINKVNIFSTQLQANNPKTQIERTKTQLRQLIMQLNQEIRIQVNQLKNQLSTNLSTLHAVSPLATLDRGYAIVSKNQRILFAAQQAQIGDTIDVRLAKGSLACEVTQIKD

SEQ ID NO: 61444 - protein, 339 aa, Legionella pneumophila
MLTIEELAKHLNGVWHGHANHAIFSVSSLARASSKDLVYFDNPLLRPVLNSTRAGAVLLKSEHKDWCPVNCVVVSNPSEAMFKAAKILPQPGVIVSGIHPTAQIHKSAQLGQNVSVGANSMIGEGVQIDDNVTVGPNTTIESSVLIGRGSQLGAGAIIHSGTVLGQSVIIGSGGIVGAAPFNCYKEHGVWQQGPIFGGVVIGQRTQIGANTVIHRGSIGDTYLGEGVCIDSLVLIAHDVYVGNNTAIAGSAAIGALVQIGMDCIIGGASCLAANIRLTNDVVITGMSTVTKSIMRSGIYSSGTTVHDHRKWRRNTARFRHLDDYITKLITIEKKLNNNN

SEQ ID NO: 61445 - protein, 533 aa, Legionella pneumophila
VTVAVFFSLILAILIWRMVDLTVLHRQFLQGQGDARSIRVIDIPAYRGMITDRNGTPLAVSTPVESVWVNPKEFSPDEEQFMQLAKYLNLAPKELSRKIVRAENREFVYLQRQLPPPLSKKIEALKIPGVNFQKEFKRYYPDSDSISPLIGFTNVDDQGLEGIELAYQDWLMGVVGKKRVIKDRLGRVVEDLGVLKEPRPGHELTLSIDRRLQYLAYSELGKTVEEFSAKSGSVVVIDAENGEILAVANVPSYNPNARGHYDKETYRNRAFTDTFEPGSVIKSFSIASALETGLFTPDTIIDTNPGWMTVHGRTVRDIHNYGVLDVTGILQHSSNVGVTKMVLSTPAEQLIGFLQKCGFGQRSELAYPGESEGGIVKAKDANPFVLATLGFGYGLSVTALQLAKANLIFANKGRLIPVTLIHNDTPSNGIQVMQPKTAENVLLMMEAVMNKGTGKGARVPGYRVAGKTGTARVAGKNGYKDRKYTASFIGIAPVSKPKFVVAVIIHEPSRKGYYAASVAGPLFAKVMSGALRL

SEQ ID NO: 61446 - protein, 141 aa, Legionella pneumophila
MNVCYLSLGSNQKNPERQIRQAINEIKQIPSTCLIKVSRLYWNKAWGFENQQEFCNVVIEIRTTLLPHKLLKWCQKIENRHKRVRRKFWGPRTLDIDIILYGYRLIRTKNLIVPHPCFHLRDFVLVPLRELNSNLKIPNYT

SEQ ID NO: 61447 - protein, 339 aa, Legionella pneumophila
MIVDFETHFITEACIDYLTQRQEVPKLVPDLNGAYTMCFTPDVSLFHTSALMEELLSLNEQRLAIMDQAGVTIQVLSLTTINGIDSCPGDENKSTALAREVNDQLYSAIQRHPERFKGFASISPYDVKEGVKELERAISQLGFVGWLTHSNFGQDNYLDDKTYWPLLEAAEGLNIPIYLHPNVPIMREFGKYGFALGGSALGFEFDTALCLMRMILGGVFDAFPKLKIMLGHLGETMPFLMERLDHLYRIPDLKAYRPSIQRIPSEVLRQNVYITTSGRFFVPALRYVLEVMGEDRVLFASDYPMESLLDATRFIQDSDLSNQTKQKIFSINAKNLNLI

SEQ ID NO: 61448 - protein, 114 aa, Legionella pneumophila
LMSLFFLLIVAGSLLYLYLESQLPNVDSLKTVQLQVPLQIFSKEGLLIQEYGEKKRIPVTYDEIPPTLIHALIATEDQRFFEHPGVDVMGLGRAAVSMLKTGTKSQGGSTITMQ

SEQ ID NO: 61449 - protein, 303 aa, Legionella pneumophila
MTTIESQCSIDGILLLNKPQGMTSNAALQKTKHLFGAKKAGHTGSLDPLATGMLPLCFGEATKICQYLLNADKSYETIGRLGIKTNTADCTGEVIFCIENYTVSHEEMIATLEKYKGKIKQIPSMFSALKHKGTPLYRLAREGIEIERKARDIVISQLNLEQFDGECFTLTVSCSKGTYIRNLVEDIGDTLKAGAHMTKLHRLYTAGFENNRMYTLDELQDMPLSQRLACLIPIDQAVQHLTPVILSDSEVTAIRQGKVISNKTGAVEGEDLRLYGEQSQFIGIGQALIHGDIKAKRLVSFAL

SEQ ID NO: 61450 - protein, 422 aa, Legionella pneumophila
MHIHKIQAREILDSRGNPTIEADVTLTTGIIGRASVPSGASTGSREACELRDNDPKRYAGKGVQKAVKHVNNEINQALQGLSVEDQENLDRILCQLDNTENKSHLGANAILATSLACARARALSLNQPLYMTLNQGDMMTMPVPMMNILNGGAHADNNVDIQEFMIMPIGAPDFPVALQMGTEIFHVLKSVLKKQGLNTAVGDEGGFAPNIQSNRQALDLLSEAIEKAGFRLGEDIVFALDVAASELFNEGFYHMYSENQKFDSHQLIEYYANLISSYPIVSIEDGLDEKDWSGWKQLTTHLGNKVQLVGDDLFVTNPKILREGIAQGIANAILIKVNQIGTLSETRQAIKLAYDNGYRCVMSHRSGETEDTFIADLAVASGCGQIKTGSLCRTDRTAKYNQLLRINELASLPYAGKNILKR

SEQ ID NO: 61451 - protein, 513 aa, Legionella pneumophila
MKLLGKILLAFTALMIFVSITLWILAKNIKPETIKQLVSNKITAITHKQSQIDGTISWQLFPRPGLKFNKIHIGNENLNDNYSLLIDTLLLNLKITPLLKGHFVFSEINIDGLKLFINQENNEKPLSSEKNANQYNTTTYPNEQFAIQKLLLSHGQIILNSKGHSTVLKNIQIGAEQFNLKNSPFSVQIKAKLTDAAFLQTAKANINFKGRVSLSPSIIDELNSGISKSSIEGQLQIQNILLNQFAIKKINTTLKTHKRDIQFNPLTLSLYNGESIGDMDYVIATQQLLINQTATNLDGKQLITSLLKHPAISGNLDYSIHASIPLKALSIESLVSKGTITLKDGEVYNINLDQLLNNLKVKLNSLMTETPDNIKKLAQSADWDQNKNTQGNTKFKLANFKFQLQTGAISSDSFLLQTDKLQVNGEGRINVLNQEIYSNIKATLNDNSTDNTLQKIQQALGGYFPLVVSGTVENPIVLPDFKAISPVLSSLAIKSALTKPLKIIQKPLKELIH

SEQ ID NO: 61452 - protein, 298 aa, Legionella pneumophila
MANIGFVGLGHMGFPMAINLLKAGHSVMGYDLQQSALEHFAEQGGTIAHNLQELAKGKDVIVTMLQTGQQVLHVCLGVDGIFSQLNAGSLYIDCSTIDVKSSRETHQIAKENHLLVVDAPVSGGVAGATAATLTFMVGGEAEAYNAAHPILSAMGKKIIHTGGAGSGQAAKICNNMILGTTMIAISEAFILAKELGLSDGKLFEVVNNSSGQCWAMSKYVPVPGILENVPANNDYKPGFAANMMLKDLLLSQNTAKSVHIETPLGAKTTEIYQQFVDQGLGDIDFSAIIKHIGKIQEV

SEQ ID NO: 61453 - protein, 283 aa, Legionella pneumophila
MTSYQERQVKIPGFTIALKIWNPKNPNPVLCLHGKMDNAASFDLLAPLLSNRQLVAVDYPGTGLSSHYPEGVVPHWKNDAFLMCHVIKALGWKSFDIIAHSLGSFLATVLAIAQPKQVNKLVFLDILGPTVHIIENSMAYLPLNIESYLISGKQPRTVFSSLDAAIKDRMNIGNISYQAAQALVQRGTKQDDEGWVWTFDPRLRCISATIPHEDEIRAMFRAIDVPVCLILANQGVSYPESVFKGRTQSIKNLTIHRVQGGHHVHMDDPASVAEIISQYLSSK

SEQ ID NO: 61454 - protein, 317 aa, Legionella pneumophila
MTSISEWWMWLGFLAFVLIMLFVDLFVFGGGKAHRVSTKEALSWTILWFTLAIIFNFLLWWYLVENFTFSVANEKALEFFTGYLIEKSLSFDNIFVFLILFEYFAIPAKYQHRVLIYGVIGAIVMRLILILLGIWIVNQFHWILYIFGFFLMITGIKMFIFADKKPELAKNPILHWMRSHLRITQELHGERFFLRKNQLVYVTPLFMVLVLIEISDLIFAVDSIPAIFAITNDPFIVFTSNIFAILGLRALYFLLVNMHKRFYFLKYGLAFILVFVGFKMLIAPWFKIPIFIALGIVMATLVFCILFSIWHRKNEVT

SEQ ID NO: 61455 - protein, 367 aa, Legionella pneumophila
MNYNDTQEIIVTPLMGATGLETLEMGAARIHVDDKQIINCRADLNQLVPFKYKWAWDKYLTACANHWMPNEISMSADVALWKDPYGLTEDERLIIKRNLGFFSTADSLVANNLVLAVYRHITNPECRQYLLRQAFEEALHTHAYQYIIESLGLDEAEVFNMYREIPSVSRKAVWALPFTQSLGDETFHTGTPENDQRLLRDLIAFYVVFEGIFFYVGFTQILSMGRRNKMVGTSEQFQYILRDESMHMNFGIDVINQIKIENPHLWTPEFKNEMIQLIREGVELEYQYARDTMPHGILGMNAEMFEEYLHFIANRRLNQIGLPDQYPGAENPFPWMSEMLDLKKEKNFFETRVIEYQAGGTLSWDDE

SEQ ID NO: 61456 - protein, 55 aa, Legionella pneumophila
MSKTERLFHLLQILRRYRYPLSGQFLANELGVSTRTIYRDIAALQAQGADIEGEP

SEQ ID NO: 61457 - protein, 76 aa, Legionella pneumophila
MSPSIVFTGGGTAGHVTPNIALIKEFRKEGWNVEYIGSVSGIEKEMIEPLDIPFHGVSSGKLRRYFSLKNLLDPFK

SEQ ID NO: 61458 - protein, 338 aa, Legionella pneumophila
MRQIIWLGFISLFLLSFTTYSDTTFTKRKDVQSFINMMVTNYHFNRNQLTTVMNQVKLQPQVIESMEKPYEKKNWDVYRELFLTQKRLKSGLQFWAENQKTLEKIQRRYGVSPEIIIAILGVETMYGERQGEYRVLDTLATLAFNYPKRSAFFTKELKEFFLLCREQHVSPTQYKGSYAGAIGKPQFMPSSYRYYAVDFNNNGRRDLVNDNGDSIASIANYLHKHGWNLNQGIAQPAKISGWRYKQLRMNPKTANYRYSQLISYGVKPITASQNHPPRAGVIELVTRKGKEYWIAYPNFFVITRYNSSPQYALAVYLLSQQLKQHWYTSATKKHRAYV

SEQ ID NO: 61459 - protein, 332 aa, Legionella pneumophila
MFKRIGLISIALSLNTISFTSEACSALVFNKNKPATVAVNLDWKYREGAFVIHPRNAMMVSSVDYHSMHPLIWKSQYGSVIFHGGNRFKAGPSADGMNEKGLTASILMLDSSIYPSNSELPALKTTEWVQYILDNFQTVQEVIDDSSNYQLVADTYRGITMNVHLMVSDAEGKSAVFEYLDGKLVIHTQDNLTTPVLTNTDYKLSLALLEEYQDHGGSKALPGGYDSKSRFVRAAHYLKKLPSFIAKEEHIAYAFNGLNVVTQAPGTSSPTQLSMVFDIPTKTIYFRSINEAALRVIPMDSIDFDYLYQPIALNVYQHLSGDVTDKFQPMIG

SEQ ID NO: 61460 - protein, 417 aa, Legionella pneumophila
MSLEIYTWKNGSKGLGFTKPVKSMLLGGNVGHAAVELTFPADAKGDELAKKYQDVPGLSISKRTEIVPEKQENGSYKPKEQVVYFVYFSWWPGHTNGHHINSHREDLESEWRHEPAPKIKPEIQEHLYGENIPTANKTNVTGLLISDKTITKVKEISHQSIKETTTIENDPAYQQLKAEEAALQTELQQLIDKRKIYEQELARSGLEQRQPNKELCLTDAEIARGYEISKELKRVAEQIKLCQIDFEERYLSVGEPPSSVIRIPTTLDHNAPTFALDAAGILDKMASLAQSTTAYSFYKFNCSTSATQVVKAGISDELKNIMKTDGFNVEKASQTTIATPTSFRHFSQQVQTELILLNTNQALVEQQRAKTENTSEAPTTSTQSFKQKFQDTVKEKSEKAVREQDESEENRIGLTIS

SEQ ID NO: 61461 - protein, 611 aa, Legionella pneumophila
MTLTKKMAVGVLIMLLFVFIGTYFITMNNARNFFIQQLESNAQDTATSLGLSLSQSLINHDVPTMDSMVKAVFDRGYFSSIKVQDIKGKVIILKKQLPQESDIPQWFVNLIKWPSTEKSSLIMDGWMQAGVVLVASDPSYVYASLWRNAVEMVNAYLIFALVALVLSYGFLKYLLQPLKRVTAQALAISEHEFPVETKIPKTPELRQVTLAMNQMVTKVKSLFQDQLKQTESLRTQVYQDSLTGMSNRRYFLQHLALILDNEDEFIPGYVMMLVIDGLDELNQKQGYQQGDQLVLTVAKICKSYWKQSSVSTLARINGTTFALISHERDPLVFEKECQEFEQILSQGINDIKICKIHMGAASYFLHQPVSNLLSTVDQAVKKARETGVFYCQKEHDTYKYPQLISGDEIRNSLQQKKISLYAQAVTDGKNCFHKEVFVRIRNQEGEELGAGYFIPVAEKLGLAYPIDQYVLNELTVMDIATHTHFALNISEDTLANKVNSTGYLRQLEDTPAAVLRNLSLEINEAHVLSHFSNSKFFIKQAKKLGVTVGIDRVGIKFSPLHYLSDLNIDYLKLHGSLVTDIDENESKQFFIHYFNEMAKTMDIAVVATQVE

SEQ ID NO: 61462 - protein, 345 aa, Legionella pneumophila
MSLVSAASVLKHLDSEKYHIIPIAMDKSGRFHRHDYNDLLACSDKLPVVTEKSTPLEGLLINGRLAVDAKIVFPVVHGPLYEDGCLQGLLELAGVAYVGCDVLSSAIGMDKDMARRLACINGLKSARYKLLSWHANASERQQFCHEVASEFGWPLFVKPCSLGSSVGIHKANNMDELNAAVADALRYDEEILVEEFIVGREIELAVLENSIPCGKPRVSMVGEIKVNHPDGYYSYTAKYLESSQTDLIIPAQLNNSLEEQLKQAAANIFSYLKCKGMARVDFFVNDKTEEIYFNEINTLPGFTSISMYPKLWQATGIAYPDLLDELINLAMVHHNCRQHLVTNYL

SEQ ID NO: 61463 - protein, 122 aa, Legionella pneumophila
MSVDASYDSNNIKVLKGLDAVRKRPGMYIGDTDDGTGLHHMVFEVVDNSIDESLASYCKEIFVTIHSDESITVKDDGRGIPVDIHKEEGKSAAEVIMTVLHAGGKFDDNLYKVIRGPNLGIG

SEQ ID NO: 61464 - protein, 846 aa, Legionella pneumophila
MMILKFIKKGFYYCLITAICLVSLIIFLISTTPGLYAVIKLTHLYLPGTLKIHHLKGQLLDQFSIGEMEYQHQDTKIKIFNLAVNWRFSSLLRKKLPIDSMSAEKIEINQKTPILILKNIKLSGYLNQQLIKLNTLQFNYWNQLITSQLEVSNSFPHAFSGKIRLNPHSTNKNIFSGGVDIGGNRNQTQWGGEFEGPGKITINGSLQQLKQIKQIIKWRDLHWQDNKNHNLKSSQGRIEVSGTIPNLAIDLKSKLGIDQLKNWQMNASIKGKLPWQWSVNATFSQPLDFSSKLDGLYTKFALKMETQSDHHANFLITIAPGHYQMTENNLMPLIQFTGGNIKGSLSPKQFSGQGVLFLDAYKKVNFNFKFPEFNVYQDIAQQTIDAKLSILFNSLDFLQNVSPYFMNPKGQLLASIHAKGTLNKPRIESKLTLNKGSVNIPTLGLNITDMGLAVFSKKDGWEATGSIHSSEKKLTLKGQGSFNKELGGTVSIEGSNFPVANTKEFQVNISPQLNVRFTPSLCQITGTIQIPNAHIKPQTFTNSLVATDDIVFTSKNTQPITPLFNTNMSVRVEMGEEVELTFKGLHAYLAGIVTINQLSQGPITANGELAVKKGEYKAYGQDLSIEQGQLIFTGGRIDNPEINLRASKNISNSFGSVSGSSELFNFNNYNNLNVGNNFNVGVEVSGRLQSPKIQLFSNPPTLSQADILSFLVIGRPANQADKAKGQLLLTAISSMNLGTGTNGTQLLEQLKQKLGFDFNVQTTTNFNQQTNKISESTGVVVGKSLSDRIYLSYNVGLSQTDPNVLTLKYILNKFLSIQVSSSDSGNGVDVLYTKSSSSPKKTKPDK

SEQ ID NO: 61465 - protein, 428 aa, Legionella pneumophila
MIISIHDYGQLDYFLAGVITLLFIMYLSLFPGIVGYSFKLLSTKCNLLTCMLLFSTLWCIAELIRSKLFTGFPWLLAGITQIDTPLRYIAPVVGVYGLGLICSFLGTLLVLIIKDNTIKRYYYLSVFILILIAPSLGKNIHWTEIKKEPISVGAIQPNLSMRDKWDETLFWDLLKYYENKTDKLLGKNLIVLPESAIPLPASYVEDYLQKLHEKALKAKSSLILGILQPTDNDETNFYNSIISLGEATGAYVKRQLVPFGEYIPKPFIPINRWLNLPEPNVVPGRSNQPLINIANHPIASLICYEIAYPNILRSQMPAAQWIVSISDNGWFGHSLASYQQLQMAQMLSLLTGRYQILVNNDGLSSVINHQGTIVEGLPAFNSGMLQTDIFPANGITPWIIWSDYPTFVFCFIFVLFVLFFNIKRFTEK

SEQ ID NO: 61466 - protein, 425 aa, Legionella pneumophila
MVELNQVCYRTFHLPESWSLSTYESIGGYSAWRKILKEQTSPQLIIEELKTSALRGRGGAGFPTGLKWSFMNRNSPVQKYVVCNSDEGEPGTCKDREILTLNPHQLIEGMAIAGYVMGATVGYNYIRGEFWLPFERTEAAIKEAYDAGLLGKNILGSGFDFDLYNHLGAGAYICGEETALLNSIEGKKGMPRFKPPFPANYGLYGKPTTINNTETFASVPVIMEKGGEWFLKLGKPNNGGAKCFSVSGHVNKPGNYEIPLGTPFKTLLDLAGGVIKGRKIKAVIPGGSSMPVLPGDVMLGLDMDYDSIQKAGSGLGSGAVIIMDETTCMVDALYRISEFYMDESCGQCTPCREGTGWLVRLLHRIINGHGEPGDVEKLVNVANNIEGRTICALGEAAAWPVQSFVKHFYDEFEYFIKHKRSIVAA

SEQ ID NO: 61467 - protein, 239 aa, Legionella pneumophila
KNSKGLPGRWKYFWQSVIALDAVSYLYWNASLPVHTQLTVPFFKTVTWDLGVFFPVLAYFVIVGSSNAVNLTDGLDGLAIMPIVMVAGALGVFAYASSNAVYSNYLRIPYVPNTGELTIFCSSIVGAGLGFLWYNSYPAQVFMGDVGSLALGAALGIVAVVVRQELVLLIMGGLFVIETLSVILQVGYFKYSGGKRLFRMAPLHHHFELKGWSEPKVIVRFWIITVVFVLCGLATLKLR

SEQ ID NO: 61468 - protein, 250 aa, Legionella pneumophila
MKFIQGLLLSFLFLVSPLHAQNEPVPLIVGVGGFYPPFIMQGTNNELFGYDIATMTELCKIMKRQCNFRVMRFRQLIPALINKQVDAAISAISITSERASLVNFSMPYLLSYSRFLTNNIHNTHQPFNLMLLKGKRIGVEENTVFSQEIRRMGIIDPVIVEFDRTEEMLEALNANEVDFVLMDNPAALYWSANSSGRLLVVGSPMLVGYGLGIAVNRENAELLKSLNDALIEYQRSEKYKENYNKYMMNF

SEQ ID NO: 61469 - protein, 456 aa, Legionella pneumophila
MLHLYNSLTRKKEPFVSLKPGTIGMYVCGITVYDHCHLGHARSMVAFDVMVRYLRSQGFDVTYVRNITDIDDKIIARASERGVSIDELTAQYIDAMNNDTHALNILPPDHEPRATGHIETIIRLIQRLLEKGNAYVSENGDVCYEVDTFPEYGKLSHKDIEGLVSGSRVEIVKEKRSPLDFVLWKKAKPGEPSWPSPWGEGRPGWHIECSAMAMHELGEQFDIHGGGLDLQFPHHENEIAQSEAATGKPFANYWLHVGMLQVNGEKMAKSIGNFYTIADVLKEHHPEVIRYFLLSSHYRSPLNYSEENLLNAKKALIRLYQAVKDVPPQTEDSKLDEYWQVQFNQAMNDDFNTPVALSVLFQLAHEVNKSNSPALAHTLKNLAGILGFLQKDPESFLQSGLAEEEKLVIEQLIAERLQARAERNWAKADQIRADLLSKGIELEDGATGTTWRRIAE

SEQ ID NO: 61470 - protein, 256 aa, Legionella pneumophila
MAKVIAIANQKGGVGKTTTAINLSASLAASKQQVLLIDLDPQGNATMGSGVDKRQLVHTTNDVLLRDCLAEQACLATTCGYDLIPGNEDLTVAEVSLMERNHRETFLFKALQPIQSNYDFILIDCPPALNTLTINAFVAADSVLIPMQCEYYALEGLAALLSTIEQVKSTVNSRLHIEGVLRTMYDARNRLCAEVSKQLLEHFPAKVYRTVVPRNVRLAEAPSHGMPALQYDKSSPGAAAYMVLAAEVISKQTVAS

SEQ ID NO: 61471 - protein, 79 aa, Legionella pneumophila
SITLPRVRDFRGLNPKSFDGTGNYSMGIHEQIVFPEIDYDKTDGIRGLDICITTSAKTNEEAKALLEAFNLPLKDKDRK

SEQ ID NO: 61472 - protein, 604 aa, Legionella pneumophila
MCGIMGAVSERDISKILLEGLRRLEYRGYDSAGIAVIDSQDRLKRVRIQGKVQNLADAMQETAIAGNTGIAHTRWATHGKPSEQNAHPHLSHGEIALVHNGIIENHEHLRQQLITYGYQFTSETDTEVAAHLIHYHYQQHENLLLAVQKAAAEMQGAFALGVIHQKRPEELVAIRKGSPLVLGFGIGENFIASDALALRSFAQSVIYMEEGDSACVTTQDIKVYDSNRILVQRAVHPLNSDSEIVNKGPYRHFMLKEIFEQSKVITDTLESRINSIDVLRASFGEKASHIFPVVKNIHIVACGTSYHAGMIAKYWLESLAGLPTQVEIASEYRYRDVVVPDNTLFITVSQSGETADTLAALFKAKQSNYLASLAICNVATSTLVREADCVFLTRAGIEIGVASTKAFTTQLAAFLMLAAALCKDNRAQEVLRQLQELPACCERVLQMNEEVESLASLFVNKVHALFLGRGVQYPVALEGALKLKEISYIHAEAYPAGELKHGPLALVDKDMPVIAVAPNDELLDKLKSNLHEVSARGGQLFVFVDDSQNWKANGARLIKVPSCGAWLAPIVYTIPLQLLAYHVAVAKGTDVDQPRNLAKSVTVE

SEQ ID NO: 61473 - protein, 842 aa, Legionella pneumophila
MQSMVFHKSSNSYYTAYYLTVAFATLTFIFGLSVLIGWHFNIEFLIQYQPNTVAIVYNTALCFIILSFSIFLFLNCYYKSAITLSTTVFILSGLALTQHVFSINLQIDEVFFHHYQSIENAYPGRMASNTAFCFLLITTALVLMNIRGYQSFNNSLAGALGLLVFCLALLFISGYFSDIQQAYKWGNKTPMSINTGIGFLLLSLAVMGLYWHNNTLYQLNSGIAMPYLSAFCIMFTFSLLSFEIFKKEKELNLSTNLSISTLALGVFFSILFGLIIRLWQLAKISAVTAKYALSEIKATLESTADGILVVDRAGKVMNYNKRFLNMWYQEERSLKTINYHDIKLIINKQLINRRETIQRINKILKNPNYQHAFELKFKGEIYYDCYTQPLKLDDEIIGRVWSFRDITIPKRLEIELSHQSTHDMLTNLPNKVLAINMLGYAMKTAVSSKKIVGVYLLDLDRFTQINDVFGHSKGDEIIKAISKRLIDCVPMNHMLGRLSGDQFIVIASINNSKEVVTGVTRLLSAFHEPVKMNGHSIKMSCSVGISFYPKDGNTVDTLLSKADIALSRTKVEGRNSFQFYTQEMHSYTLEHILLESELKNAVAKNEFVLYYQPILKLSSLNVIGFEALIRWNHPRNGLILPDKFIPLAEEIGIIGEIGDWVFVTVCKQIQAWQLQGFKNIKISINISPKQFKFQYIPKRINELLSEFQVKSESIELELTENILIDKSTDIIDTLSKLKEMGIQISIDDFGTGYSCLSYLKDLPIDILKIDQTFVKDLKNNQSNQTLIKAIIAMAKKFNLSLIAEGIENQYQLEFLKKLGCHYGQGYYFSHPKPTEKCMQFLQ

SEQ ID NO: 61474 - protein, 130 aa, Legionella pneumophila
MTEINKIIHKKTFDIAWGDMDALGHVNNARYFDYFQEARIDWLRELDIKMTGQTGPVVIHVACTFLKPIVYPATVTIHSKVNSLGNSSMIMDHDLYQEETLMAQGVSKIVWIDYTQNKSVPLPDIIRNLV

SEQ ID NO: 61475 - protein, 386 aa, Legionella pneumophila
MKKNALLIVLLTWFLGNMDIHFLTPALPSLVDYFSVTPNTVQLTISLFLLGKALSMILWGLLSERYGRKPIFIGGLLLFILSNFLIALNHSILPFLVCRFLQGISVGATLLMGRAMINDTHNEQNATKYFAWLFTLAGLFICFLPFFGGLINSYWNWQIASLIIAAYGLLLLPLCRGLKETKPHYVKFPRLGHSIMVVFNHPLFVSYLLISALMMAGESAFNTSASFILIKGENFTSAQYGTIKTTMAIMHLLGTACCGLIAKYYHSIQLTKLGVRFFIFAAFLMWLFVFSAENIYLTFIVPMVIYYFGTGFIVASATASAVRPFPQQMALALAITLFCQFNCSAFFSFITSMIGIQQVETFMFLLSLVSILSFLALLKLQRMEPC

SEQ ID NO: 61476 - protein, 258 aa, Legionella pneumophila
MNSILERIAKHKLEEVAVAKKNKPLHVLSKQQPGEMRDFITALKSNTSPAVIAEIKKASPSKGLIRKDFNVAEIAKIYTQNGARCLSVLTDIEFFQGHPDYLALAKSKTTLPVLRKDFIIDSYQIYESLVLGADCILLIVALLDDVQLMDFCQLAQELKMSVLVESHTQDELERALRLPTPLIGINNRSLHNFKTDIQLSIQLKQFVPKDKIIITESGINTREDIKLMQSHGINAFLIGESLMRADNIGKALQKLMTD

SEQ ID NO: 61477 - protein, 323 aa, Legionella pneumophila
MSLRILSLSDVKQSITMHQAISALESAFIQLANNTVKLPLRTGVTIEEENGLMLTMPGYLAQEKSLGLKVVSIFPENLTKNKPTITGFIMLLDATTGEAKVLMDAAYLTSLRTGAVSGLATKYFARDNATQVAIIGSGAQAKTQLEAVASVRDIQQVFVWSRNIKNAEKFANEFEDQFDMTICPSVAMAVKDADIICTATNSTEPLIHFGDISPHAHINAIGSHHPSMKEISHDVLSRAVVIADQLDAVLAESGEIISAVEHNHLKKELIIEIGHWLLQKNTDYKDKLTVFKSVGLAIQDLSVAEAVYQNALKNNLGEIFSIS

SEQ ID NO: 61478 - protein, 307 aa, Legionella pneumophila
MNILLAGGSGLIGQELVRGMGEEHHYTVLGRDKDAIQKIFTTKASSLSWDELNTQDASRFDAVINLCGVNIAISRWTPKIKEEIISSRVQTTENLLHWILQQNAKPRFYCANAVGIYGLQENGDATDLTEDTAINWEHPKDYLSEVGIRWQQALQKAEEAGLPVTSTRFGVVLKKGKGFLGKLYPSFICGLGSTIGDGRQYLSWIDSEDLVNAYRFLLNHPEITGPVNVTSPNPCMQREFAKAFAKSLHRPLLLWTPAFIIHLLFGEMGDCLINHGQKVKPKRLLEAGFEFKWPDIEKALKHQYSAI

SEQ ID NO: 61479 - protein, 977 aa, Legionella pneumophila
MIKKLLIKVEKLINNLPKEFKLSETVLFSIKEDINSLASRFDGSKGYINYYSPKVVQQINDKQKLLEKYKSYLTALLAVLICSKQSKDIRDNKKLQPVYEITDLKNLLERKDVEKIINEITQFDEDQRELQRIERQIQKDEEKEDNQKMHLGKRSKLELRRAELSKRVQLFNNKLKNIPQAEEIKAVLDYCQKYIEKHINLSKQLPKGMLDVKRALSLFDEINSTKTQIRKLSKDKLDSSGQIKLEGLKKELTKAELALQFSYSEEEDKTLKDMLNDLKRLMKMSIRDYQKLATSGGEINVFLHKTTGFYWESLFLYRNVLCEINEYLKKNKKKLSEQGMLVAECISKAFSQMPELDTIEKALEKVKRIDGDLHRQEEYNDKINGAWIRFYKKGPVKFVQKVLEQNLDEKIFYIPYNPHNYVLDHPAQSDFADTLGNCYGETQMFLKQINSKSPSINNICPERVLINYQLDQSRTIAKNTKKEKIGIFEADEKTKAQVTWDGIKDILTSKVTSTAFGDVCMITLTGAQVSGREKLVGHGIGLIKMKNPAPYKYVVYDYAFGGAMGFSSDTQLELFFKQILEGEGSYVPFKECLVEKVGEVSKECQQFINGNPGIASLAQKSLDKTCKRDFWDKDRISFLIRYHPIGTDESRILDLIEKLPLSKDRIELYEQLVKEPKIGIGNLVKCIIRSGKISYLANLLTTNLLTVDITNKIKFKLNEQVKKEIVALINNDQIEPNTTCKLFSNNQAIVLATYKKDKNSLQYADIDPVVTLLQGKNTIVPSDACRAFPKAEKIVIAAYKSDPLSLQFADLGLVQQLLRKGSINLEHASKAFTESSQFKEANEAYQLLKSLKLLPKNEKETEKAKRIELLKSIDQKLEITNLRQELYPLISNMCIRLLDDIRILSLEDTIIKNTRLSKLISSKQCDINTLKTLENKKMELTKTCSLAKSNFTLFGATDNKVDGGNANTHNHITPENK

SEQ ID NO: 61480 - protein, 432 aa, Legionella pneumophila
MKILVTGASGFIASQFVTDLLIAGHEIICCVRNTKHTQRIFPGAQVIFCDFINDTKPEIWSKRLQGIDVVINCVGILYHPDERIIWNVHYETPKALFDACINSGVKKIIQISALGIDKVDVSYATSKKAIDDYLLTLSIPSVIVRPSYVYGKGSYGGSSLFRGIAGTPFFTAIPGQGTQKFQPISLNDLSQAIVRLVSTPVTETIILHAVSKKIITLEEIIIKLRSWLGFTKTRIIHIPLTFIRLLTRLGDLLPYSTINTVSYKMLASDNITTQEETQRFANYVNFTPRDYEEGLYSQPSSVQDHWHAQLYFLKLPLRLGISFVWIWTALCCLFFYPKSDSLTLFAQIGFSSLWQLFLFYASALWDGLLGIAMLFNYRFKLTSILQLITILVYTVIITIKLPYLWLDPFAPIAKNIPLLIAILIGLGLESDK

SEQ ID NO: 61481 - protein, 370 aa, Legionella pneumophila
MNIFNLPDLGEGLPDAEIHEWFVKEGDTVKADQPLVSMETAKAVVDVPCPQSGTIAKLYGKPGDVIKTGEPLVAFVSTTEKPADKGTVVGNLEESTDVSEDNFIIGSQRSSHRVKTTPAVRLLAKKLGVDLSSLKGSGDNGVITREDVQNQANINSQPPAGFEHLRGVRRAMLNSMVQSHAEIVPVSIFDEADIHIWKPNTDITVRLIRAIIHASKKEPALNAWFDTKHAARRCFKEVHLGIAMDNEEGLFVPVIHDAEKYSDSELRKIIDEFKESVRNRAVSADKLKGATITLSNFGKFSGRFASPIIVPPMVAILAVGRLYKAAVINDEDKIEAHKMLPLSLSFDHRAITGGEATRFLGAVIESLQQA

SEQ ID NO: 61482 - protein, 844 aa, Legionella pneumophila
MRMDKLTSKFQMALADAQSLALGRDNGFIEPEHLMKALLDQQGGSCRPLLSKAGVNIPLLRTLIDQALDKLPKVSGTGGDIHISNALNRLLNLTDKLSQQRKDNFISSELFILAAINEDSNLAKILKQAGGDNKAIEKAIDELRGGETVNDPNAEEQRQALEKYTLDLTERAEQGKLDPVIGRDDEIRRTIQVLQRRTKNNPVLIGEPGVGKTAIVEGLAQRIINGEVPEGLKNKRLLALDMGALIAGAKYRGEFEERLKGVLNDLAKQEGQIILFIDELHTMVGAGKAEGAMDAGNMLKPALARGELHCIGATTLDEYRQYIEKDAALERRFQKVLVDEPSVEDTIAILRGLKERYEVHHGVEITDPALVAAATLSHRYISDRQLPDKAIDLIDEAASLIRMEIDSKPESMDKLERRLIQLKIEREALKKENDEASKKRLVDLQKSIDELEQNYSDLEEIWKAEKATMQGSTQIKEALEQAKLEMETARRAGDLSRMSELQYGRIPELEKRLSQVSSVDAMETKLVRNKVTEDEIAEVVSKWTGIPVSKMMEGEKEKLLKMEEALHSRLIGQNEAVDAVSNAIRRSRAGLSDPNRPIGSFLFLGPTGVGKTELCKALASFLFDTEEAMVRIDMSEFMEKHSVARLIGAPPGYVGYEEGGYLTEAVRRRPYSVILLDEVEKAHTDVFNILLQVMDDGRLTDGQGRTVDFRNTVIVMTSNLGSQLIQEMSSKFNYDEIKAAVMDLVSQHFRPEFINRIDESVVFHSLTKEQIAKIAAIQINYLHHRLKQQNITIEVTSEALSHLAEAGFDPVYGARPLKRTIQQKLENPLAQSLLTGKLNPGIPL

SEQ ID NO: 61483 - protein, 348 aa, Legionella pneumophila
MSETIGYAAHKAGAPLKPFTFERRPVGAHDVAIDILFCGICHSDLHQVNNDWAGAFYPMVPGHEIIGRVKEVGHQVRRFKAGDLVGVGCMVDSCRQCTYCHQHEEQYCKSGATFTYNSQDNHLGGVTYGGYSKHIVVTEDFVLKIDESLDPAAAAPLLCAGITTYSPLKRAKVGKMSKVGIVGLGGLGHMAVKLARAMGAYVTVFTTSINKIKAGKDLGAHDVVLSTDNNVMQTLANQYDFILDTVSAKHDLGQYLNLLKVDGQLTQVGLPSDPLEVTMFPVILKRLSINGSLIGGIKETQEVLDFCARHGITADIELIKMHEVNSAYERLLKGDVKYRFVIDMSTLD

SEQ ID NO: 61484 - protein, 887 aa, Legionella pneumophila
MLAESVIGIVRAVNGLLEKVNVQGQASLVKSGARLEEGDVLTLLSGEAYIQFIHGFPEALALEKPVKLDGVSPTLQYGAEDLKEQMVQEAIAKGIDPSVILDVLGSAAAGAVAVGSGGDAFIIDPLFGFGHVTAGYPTGPISFAYEADTQQLFWFVPEETGAIAESELTTEPEFTPQIPQFTTNQAVLTVFEDALPSGIPDSAGQARTASSSLSTLLTSSPDVAASFAFNTNLSVLPTLKSGGIDLDYNLSPDKRTLTASIPGGGDVMQFELTADGRLTQTLMDSIDHPTTDSDDGEWMRLDLSPLIYVTFTRTSDGTVLESRTLPANAVVAGIQDDVPIARAQLTNNEILLDETVGVKVGDADAANDDFNPTITTDPFNNTYGIPIGLVQNANLLDNGTSEMGGDYKNATMTHLLKITDAVSGLQTTDGTSINLFLESNGDITGRAGDIGEPAVFAIRMNPNTGSITVAQYGSIKQFDTNSHDEAVDLTGRISAVVTAKDSDGDVSNVEIPIGQLIIFADDGPSVTMAVSDNNAITLNTQDADTIGAASDSDSASFAAAFAVTPNYGADGAGTTVTTYALSVSAQGVDSGLDNNGNNIYLYNIAGSVVGSTSATQAGITTGNTIFSLDVNSSSGVVTLTQHQEVDHGLPGASSNYAAQEAILNTGLVFLNATAVTTDGDGDTATASASLDLGGNVKFDDDGPSVTMAVSDNNAITLNTQDAETIGVLSDTDSASFAAAFAVTPNYGADGAGTTVTTYALSVSAQGVDSGLDNNGNNIYLYNIAGSVVGSTSATQAGITTGNTIFSLGVNSSSGVVTLTQHQEVDHGLPGASSNYAAQEAILNTGLVFLNATAVTTDGDGDTGTGSAVFDFGGNVEFDDDGSSRTMA

SEQ ID NO: 61485 - protein, 272 aa, Legionella pneumophila
MIDFIGKHLDEELSLESLSEIFCISKFHFHRLFTAFTGLSLQQYIKWLRLKRAAHQLIVDKDQSVINIAINAGFESHEAFSRAFKKACGFSPSQFRQGFGRSYWEQPPYCLPGQSRTDMKVDIKSIDKIRLAVIEHKGDPKLLGESINKLVSWAKSQSINLKPRAGEAFALAYDDPKTTPPSDFRIDLGIKVPENLKLDGVIEKFLPSGRYAVTVHKGSRNNIGDVVYYLYRDWLPNTSEQLGDLPCIFCYYNFDHEVAETELLTECWLLLK

SEQ ID NO: 61486 - protein, 477 aa, Legionella pneumophila
MEWDTVIGLEVHAQLKTKSKLFSGASTAFGATPNSQTSFIDAGLPGVLPVLNEQAIIMAIQFGLAIHGTINDLSVFERKNYFYPDLPKGYQISQYQKPIVTNGYLNIQLGNNLEKTVHIARAHLEEDAGKSLHDAHTDYTGIDLNRAGTPLLEIVTTPCLYSAEEAINYLKTLHQLVRFLGICDGNMQEGSFRCDVNLSIKPKGSSVLGTRTELKNLNSFRFIEKAIAFEQARHQDILESGLSVIQETRLYNPDNNTTQAMRGKENENDYRYFPDPDLLPIHIDKEQVEEIKNNLPDLPEAISKELKNTPSLNDEDINFILSSPDTYQYYKKIKSLCPAADKTIINWLKGQYAAFLNEHNLTFETPPISAKTMAAFLSKIHEKKISSSIAKNIFSMLCTGEKDIDAIIEREGYQQQNDNSALEEIVEQIIKQYPEQVTEYKAGKEKLLAFFIGQAMKQTKGKANPEQINLLLKKHLG

SEQ ID NO: 61487 - protein, 558 aa, Legionella pneumophila
MSESFKELFEQSIAGAQFYPGAIITAKVIDIDDDFVTLNAGLKSEGIVAVEEFYDKNGELEVKVGDTVEVALDSVEDGHGETLLSREKAKRQEAWRKLSKCHENNETVTGLISGKVKGGFTVEIGSIRAFLPGSLVDVRPVRDPSYLEGKELEFKVIKMDLKRNNIVVSRRAVVEEESSADRQALLESLHDGQELHGIVKNLTDYGAFIDLGGIDGLLHITDISWKRVKHPSEVLSVGQDVKVKVLSFDSERNRVSLGMKQLGNDPWVDLVERYPIGKRLQGKVTNITDYGCFVEIEEGVEGLVHMSEMDWTNKNVHPSKVVSLGDVVDVMVLEIDEERRRISLGMKQCVGNPWQQFASTHNKGEKVKGKIRSITDFGIFIGLDGDIDGLVHLSDISWTVPGEEAVKQFKKGQELEAVILAIDPERERISLGLKQLEGDSFASFAETYTKGSIVKGTVTAVEPKTVTVALAEDVSGTIRVSELSDERVDDATTIVKVGDEVEAKITNIDRKNRTISLSVKAKDAQDEADAIKKYSRTEAASTTLGDLLKEKMASKEGE

SEQ ID NO: 61488 - protein, 874 aa, Legionella pneumophila
MGHGFQHTIMDALTRYHRMLGDKTLWQPGTDHAGISTQLVVERQLEAQGVSRKDLTREQFLDKVWQWKEESGNTITQQMRRLGASVDWSRERFTMDEGLSAAVQKVFVQLYEEGLIYRGTRLVNWDPKLGTAVSDLEVLSEEEDGFLWHIRYPVVDSEEFLIVATTRPETLLGDCAVAIHPDDSRFRHLIGKQVHLPLCDRTIPVIADDYVDKEFGSGCVKITPAHDFNDHEVGKRHQLPQINILTKKGTINKNAPLKYQGMDRFVAREQIIKDLEKEGLLAKTEPHKLKVPRGEKSNVIIEPLLTDQWYVKTKPLAEPAIAAVKKGDIRFIPETWDKTYFQWMDNIEDWCISRQLWWGHRIPAWYDNHGNIYVGYSENDVRFKHKIDQSTPLKQDEDVLDTWFSSALWPFSTLGWPERTPELEQFYPTSVLVTGFDIIFFWVARMIMMGLKFTGKIPFKEVFITGLIRDSEGHKMSKSKGNVLDPLDIVDGIDLDSLIAKRTSNLMLNSVRDRITKATRKEFPEGISAYGTDALRFTYCSLASTGRNVRFDLGRVEGYRNFCNKLWNAARYVLLNTDEEQIDFGDGAFQYSPADQWILSRLQNTVSKVHHYFETYRFDLLANTLYEFVWHEYCDWYLELSKPILQDDQALSAMKRGTRRTLIHVLDQILKLLHPLMPFITEEIWQKTTKFTSENGISIMLSTYPKVNEEFINPAIEEELDWLKSAIQSLRTIRSEMSISPAKLIPLYIRNITPELKERIAKYEKILKTLSKIDKINYLAPDEKVPVSATAVLGEIELLIPMADLIDKEAELSRLNKELAKLNKDIELAQGKLNNPKFTDKAPEEIIAKEKDKLAQAQVAKDKLLQHKNRIESL

SEQ ID NO: 61489 - protein, 280 aa, Legionella pneumophila
MNIKQNDTSTTPPILYGTAWKEDDTKRLVLQALNSGFRGIDTANQRRHYFEEAVGDAIDQFLTTSQKTRSDLFLQTKFTSVHGQDHRKPYDEFDSLTNQVKQSFASSLEHLQTDYIDAYILHGPSLSHGIIDADLEIWQAMEELVCSRKVKFLGISNVNMVQVEELYRKVSIKPSFIQNRCFAITQWDQDVRTFSQKNKIIYQGFSLLTANQRYLLNPHMQSLAVKYDKTIPQIIFRFANQVGILPLTGTTNQQHMDNDLNIYDFELTQEEIQYIENIGL

SEQ ID NO: 61490 - protein, 295 aa, Legionella pneumophila
MKHSLATIEEAVATLKAGKMIILMDDEDRENEGDLVIAAEHATPEAINFMSRLGCGLICLPMAEELIDKLQLPMMARHNKSPYGTAFTVSIEAANGVSTGISARDRARTIQVAIDPKSGPSDIISPGHVFPLRARKRGVLERPGQTEGSVDLVKLAGLTPAAVICEIINEDGTMSRRDELALFSKKHQIPLVTIKDLIQYRVRHENLIHPVATTQIPLEENGVFTMTVFENQIDSCEHFVLVKPPLYGNQVPLVRIHSECITGDVFGSRKCDCGKQLELSLSQIGAEGGILIYLR

SEQ ID NO: 61491 - protein, 629 aa, Legionella pneumophila
MPSTRNIETHNDSNPTLRALSLSALGIVYGDIGTSPLYTFKTVILLAGGGTPAVNTIMGSVSLIIWTLIIIASVKYIHFALRIDNDGEGGILALMSLLSLKLKQRPFIIAVGLMGAALIYGDGTITPAISVLSAVEGLEILSPSLKYYVLPIAITILITLFAIQSKGTATIGKAFGPVMAFWFLTIGILGARGVIQHPSVLAAINPIYGLSFLFSNGATGFFILCGVFLCVTGAEALYADLGHFGTAPIRCAWFGLAFPSLIFNYLGQAALVLEGASTEHNIFYMLCPGDFLLPLIILSTVATIIASQAIITGAFSMTRQAMQLGWLPRLRVTQTSSEGYGQIYIGVVNWLLMLATLGLTIGFGSSEKLAAAYGIAVSATMLCTTLLLFIALHKLWKWDIITSGLVAGLFMIVDASFFAANLTKFINGGYIPITLAIIIYSMMYIWHKGYQTIAIKQKEKNITVASFLDSIQKERVVRVPKTAVFLTSKEQDIPPILVWHVKKNHVLQDKVIILKINNLSIPRCKPGDRLQIVETGTGIWHAVANYGFMEQPHIPKLLKKLEAQGYDINIKDITYYIGHETIFVRNVRHTLSKYIKILFVFMHRNALPMSNYFHLPPESVFEIGRQIEI

SEQ ID NO: 61492 - protein, 1148 aa, Legionella pneumophila
MRQRFVHLRVHTEFSLVDGLVQIKPLMKALPARGMSAVAVTDFCNLFAAVKVFKSATEAGIKPIIGSDLPCHDLETPDNIFSLVLLCQDTAGYKNLTCLVSKAYQEGQYHGQPRVQLQWIQEFSQGLIALSGGKFGDIGQALLANDDTLARKRALHWMNLFPNRFYLEIQRTGRADELHYNEKLIALADELQLPLVATNDVRFIDEDDFDAHEARVCIHEGYTLADPRRVQQYSSQQYLRSADEMELLFSDLPSALQNTVEISKRCNVKLELGHNYLPNFPIPDGTTVEAYLSHLSEIGLEERLKQLFRDKSEGELLAARGEYDKRLKIELDVINNMGFAGYFLIVADFIQWAKQNGVPVGPGRGSGAGSLVAYALKITDLDPLEYELLFERFLNPERVSMPDFDIDFCMEGRDRVIEYVAEKYGRQSVSQIITFGTMAAKAVVRDVGRVLGHPYGFVDKLAKLIPFELGITLSKAMEQEEELRRRYEEEEEVKELFDLALKLEGITRNAGKHAGGVVIAPSQLTDFTAIYCEEGSTQIVSQFDKDDVEAVGLVKFDFLGLRTLTIIDWALATVNKQCENAGLSPIDISQIPTSDDSTFELLKACKTTAVFQLESRGMKELISRLQPDCFEDIIALVALFRPGPLQSGMVDDFIDRKHGRARVDYPHPDLEPILKPTYGVILYQEQVMQIAQVLANYTLGAADLLRRAMGKKKPEEMAKQREIFTQGAVARGVDEQVATHIFDLMEKFAGYGFNKSHSAAYALVAYQTAWLKAHYPAAFMAAVMSSDMDNTDKVVTFIDECAHMKLQVLPPSINNSMYHFTVSDEKTIIYGLGAIKGVGESAIECIIQERNQNGPFLDLFGFCQRLDLRKVNRRVIEALIKSGAFDIWKVERAVLTASLEKALKVAEKEHQNQSSGQFDLFSLLEDKADEQNYVESKSWSEAQRLEGEREVLGFYLTGHPADQYRRELGDFIVPVSQLNPSLHKKAIICAQVVAIRKIITKRGKKLVIIGMDDATARIDAVVFGEIFEQYSDPLATGNMLVIEGEVAIDDYNGGVKMTANQLLSIASARTKFARCLELRLNQNNAAVLPSIQSLLKTYSGRCAVQLAYANGVAKANLNLGQQWCVTPSDELIGLLSNLLGEEQVIMRY

SEQ ID NO: 61493 - protein, 243 aa, Legionella pneumophila
MKISRLKTFWIITRLFYYTGVACTRSIFKYLFSTPTRPWVDKVIHHWVDQLLNAVKVEYKVINPHNVQPQPGKATILMCNHSSAYDIPLGFKAFPNNSIRMLAKRELSKIPLLGKGMAAAEFPFIDRKNRFQAIKDLEFAQQLMESGIILWIAPEGTRSKDGKLAPFKKGGFITAIQAKATIIPIGIRGAFDILPARTFNIHLNQKAEIHIGEPIDAAQYSIENKEELIEKTHQSIKKLVGEN

SEQ ID NO: 61494 - protein, 1273 aa, Legionella pneumophila
MTDNNLLANKFFKKIWMVLAVLIIVAAVFSSVFRALTPWAKQYKGEVEQHLTSLLGQPVTVQTMETGWYWFEPVVKLKHIRIHDGHNKSIYLDRLIVGVNLFKSLWNWRIQPGVLYIDDMHLVFREKDGHWCIEGISRNAMKDTDITPEKTREILDWLAQQEKLIVRHVSAHLHFNDGSLIPVNELNLSIVNKGGNYKIKGEARLEQTNATVFQLLGNVQFDPSQIKNTNGRFYFSAINVLPAQWQNLLPKSSMQLEGGKGNVSLWVDLEKGNISSIQAELRLKRLAWKLLNKKNSKLIQSFYANMGWKLDKQGWQFQADHMKLRVAGVTWPENQLSIRFNKNQNTYQIFTKSLIVESLLSEAINWPPAIQNVLQLKPHGILSDVQVLIKENQINYILTRFDQLGWRAKDNIPGVSNLSGVLNWQPTEGRLELDSENSTFDIKGYPAQKLTIFNGAFDWKELNDGLRLSIERLVASQPELTISLEGAIDQLTQNSVGNIRLVGNFSGKNLQKWMPYLPKKHMKAKLFAWLNNDIKRLGQATGKITINGMAKDFPFDNGNGEFSIVSHVVGGDILITPEWRLIKDLEGYIKLKNRNLDIDIIDGDAQGTLLKQMNLRIDDIGKDRETLLIHGIVHGKAQQMLNFVMNSPLKKKLSALKILLIKGMLSLNLRLEIPLYPENDDNLARGELTFENNIINIKHQMGDFSVRDVTGNLLFNEKGIQDSALTARAFGYPLNIKIQSEKSPQPLTAISIEGECTVESLKKKWHLPIFSVLKGNILAKALLKITDDPNDLDNMKLSSDLIGLAVDLPAPLGKTYKEKTPLQVNLDFNPQKTLRLRVNYNGRLSTDLLMQKQKGVFKLKSGQIRLGSAQAVNQDHPGLGIAGTLDGFDLQAWKEVINRFSKENVNPSLLSLVNIIDVKMGKLNFLNQQFDNMSLYAKKRPDNDWSINLKQKKVDADLTYHSATNSLSGFVKYLHLSEIGSSKNNKDTPSHTTPGQIPNLNLRVDNFSIGKIQIGNITLKSHSTSEQWKIDYCRIDSPYYQANFEGEWLQKGKFNQTKLQSKMYLKDLAKSLDRWAINPAVDAGKGYIEFHGGWQGSLYDFSLSKLNGSMYLQLKNGRITHLSPETEEKLGLGKLLSILSLQTIPRRLKLDFSDLSNDGYSFDIFKGNFNVNNGIMSTNNSYIDGPVAYASMKGDLDLVRRLYDLDLNISPHITASLPVVATIAGGPIAGLAAWIANKIINQSMQKIAGYSYKISGPWDQPIVQQLNIVKKLP

SEQ ID NO: 61495 - protein, 447 aa, Legionella pneumophila
MLSKIVIANRGEIALRILRACKELGIQTVAVHSDVDKDLLHVRLADETVCIGPAPAQKSYLNIPAIISAAEITDAVAIHPGYGFLSENADFADIVEQSGFRFIGPRGDSIRLMGDKVSAIAAMKAAGVPCVPGSDGPLGDDDNKNLELARKIGYPIIIKAAGGGGGRGMRVVHSESNLLSAIALTRSEAKAAFNNPIVYMEKFLENPRHVEFQVLGDGKGHAIHLGERDCSMQRRHQKVVEEAPAPGITPELREEIGASVIKACKELQYRGAGTFEFLFQDGCFYFIEMNTRIQVEHPVTEMITGIDLIKEQIKIASDIPLTLTQKDIKLRGHAIECRINAEDPRNFMPSPGTIKLLHQPGGPGIRFDSHIYSSYVVPPNYDSMIGKLISYGATRAEAIARMRNALDEIIIDGIKTNIELHQRILHDKSFMEGGTNIHYLEKMLKDS

SEQ ID NO: 61496 - protein, 227 aa, Legionella pneumophila
MIPEKLLTYTKTIFEYSHSTVYIKDKNFHYQYMNNRGLKQLQLQEKDIMGMPDKALPFGKYAHFYNSHDYSAMEEIIYFQLDDCITKNGEKIFALSHKLPLKDEDGKTHGVIGFTKFMNLHQLMNNLNSKNTFLTPNLKINVNVDDWLKTTINLSRREMEVLYYFLQGKSIKLIAPLLHITERTVIFHLNNIKSKWGCYNKEDIYTKSFEKGLKNLTIIWDLLAMRS

SEQ ID NO: 61497 - protein, 412 aa, Legionella pneumophila
MAKKIEKNIITGLDIGTSKIIALIGEVTSDGTIEIIGIGRHPSRGLKRGVVVDIETTVNSIQRAVQEAELMAGCEVRTVYAGIAGSHIRSLNSHGIVAIRDQEVSQADVERVIDAAKAVAIPADQKILHILPQEFIIDHQGSIREPIGMAGVRLESRVHIVTGSVSAAQNIVKCVRRCGLDVIDIILEQLASSHAVLTEDEKELGVCLIDIGGGTTDIAIFCEGAIQHTSVIPIAGDQVTNDIAMALRTPTKAAEAIKVNHACALPELANPNQMLEVTSVNDRPGRKISAKALADVVSARYEELFSLVRNELRRSGFEDRLAAGIVLTGGASNVRGAIELAELCFEMPVRKGCAHYVSGLTEATENPSFATGVGLLLHGFQQQYESGYNVPAMNDNGKSIWSRMKEWFQGNF

SEQ ID NO: 61498 - protein, 474 aa, Legionella pneumophila
METKRVLVVGAGQAGEGLVRDLKRSSYYRPIGFVDDNKSKRGLEVHGVRVLGTTNQITELVNQYDVDLIFIAIPSAKSATMRRIVTLCEQSHVPFSTLPSISALAAGRVEVNALRPVNIEDLLGRDQVTLEWEKIARSIAGRRILITGGGGSIGSELCRQVMALEPASIAIVENSEFNLYRIEQELLKSFPGIPVELSLISVTDEIAINHLFRRFQPEIVFHAAAYKHVPMLQHQVRVAVFNNVIGTQVVAKASVTFGAEKFILISTDKAVNPTNIMGTTKRVAEIYCQNLNTRVKTQFITVRFGNVLGSAGSVVPLFQKQLQEGGPLTVTHPDMQRYFMTIPEACQLILQAMVNGEGGEIFVLDMGEPVKISYLAEQMIRLAGKEPGRDIMIEYTGLRPGEKMYEELFHETEQLTSTKHEKLFKARFRELDWNDLTQTMRMLQAACIEHQDEELLVLLKSLVPEFQLEPMVEA

SEQ ID NO: 61499 - protein, 422 aa, Legionella pneumophila
MDKLLINGGKALHGEVVISGAKNAALPIMAASLLASDHVTISNVPHLKDITTMMELLGQLGAHLIVDEKMNVQVDSSQVNEFVAPYDLVKTMRASILVLGPMLARFGKADVSLPGGCAIGTRPVDLHLKALRAMGADITVKNGYINARCKKGCLQGKRLMFDTVTVTGTENVLMAAVLAEGITTIKNAAREPEVVDLANFLIQMGAKIRGAGTSTIEVEGVESLNGGTYSVMSDRIEAGTYLAAGALTRGQVTVKKVRPDTLLSQLCKFEEAGAELTIGEDWVSLNMHNKRPQAVNISTAPYPAFATDMQAQFMAMNSVAEGSSTIIETIFENRFMHVQELQRMGANIQLNGNTAIVHGVEKLTGAPVMATDLRASASLILAGLVAEGETVVERIYHVDRGYERIEEKLSLLGADIKRVSDR

SEQ ID NO: 61500 - protein, 639 aa, Legionella pneumophila
MNDMVKNLFLWLIIAIVLVSVFSNFGPRNSVAEKISYSQFLQEVDQGMINSVTIEDNKIIKGVTKNNKRFVTYMPMQDNALLGELLKSKVDVSGQEKQQESFLLHLFINWFPMLLLIGVWIFFMRQMQGGGGRGAMSFGRSRARLLGEDQVKVTFADVAGVDEAKEEVKELVDFLRDPTKFQNLGGRIPRGVLLVGSPGTGKTLLARAVAGEAKVPFFTISGSDFVEMFVGVGASRVRDMFEQAKKHAPCIIFIDEIDAVGRHRGAGLGGGHDEREQTLNQLLVEMDGFEGNEGVIVVAATNRPDVLDPALLRPGRFDRQVVVPLPDIRGREQILKVHLQKVPVDSHVEVKAIARGTPGFSGADLANLVNEAALFAARANKRKVGMIELDKAKDKIMMGAERRSMVMDDNEKKLTAYHEAGHAIVGLSVPEHDPVYKVSIIPRGRALGVTMFLPEQDRYSHSKRRLESQLCSLFGGRIAEELIFGPESVTTGASNDIMRSTEIARKMVTTWGLSALGPLTFGEEEEEIFLGRSVNKHKEMSDRTAQQIDDEVRAIIDRNYQRAKEILETNIDKLHLMAQSLIKYETIDTNQIQEIMSGKEPTPPEDWGSTKPMDKAESVNDAPAKPINGETIENPAEGH

SEQ ID NO: 61501 - protein, 482 aa, Legionella pneumophila
LKFDFVAAIVVFLVAIPLCLGIALASGAPLFSGILSGIIGGIVVGIFSGSQVSVSGPAAGMAAVVLAAISQLGDFNTFLLALTIAGLLQMIIGALRAGFVADYVPSNVVQGLLCSIGILLIIKQLPLAFTLSSDFDELKTHLLETTEGFTVSPLLALSQHINEGALIITTLSLAILIYFDITKNKILKEIPAPILVVLAGILLNELFIWTNSSLAQNSPQLVNIPDTNGFFQFFSHLEYPDWSAWTNPKVYLYALVICIVASLETLLNLKASERLDKKRRHSPTNQELVAQGLGNITSGLVGGIPVTSVIVRTSINIHAGSKTKFSAVLHGFFILFAVMLIPGALNKIPLSSLAAILIYTGYKLNKPAIYINIFSQGSDRFIPFIVTVISIIAFNLLAGILIGLAISLFYILKSNSQARIDIIKEIYPNGSTYRLMLPQQMTFLNKAALVAELDTLPRRSQLIIDARHSQYIDKEILDLFNE

SEQ ID NO: 61502 - protein, 270 aa, Legionella pneumophila
MILFWGIKVLVDSHCHLNFIDLTHFNHDLAQVINQARENGVEYFLSVCVELSDYPQLERLAKDYPDISISVGVHPNSEMNYPVTAQMLCELAQNPACIAIGETGLDYYRNPTEEAQSLQRDRFREHIKAALITSKPLIIHTRQAAEDTLLMMAKEGASQIGGVMHCFAEDFDIAQRAIDLNFYISFSGIVTFKNAVSLQDVARQIPLERILIETDSPYLAPVPHRGKQNHPALVKHVAETIAQLRGMDFQEIAEITTNNFYNCFNIKRQG

SEQ ID NO: 61503 - protein, 423 aa, Legionella pneumophila
MAYIIPRNKHNISKADISNNALKVLNRLISHGFQAYIVGGSVRDLLLHKAPKDFDIATNATPNEVKNLFKNARIIGRRFKLVHILFHREIIEVATFRGHNSSDASHQFNERGMLVRDNVYGSLDEDAWRRDFTINSLYYNISDSSIIDFTGGVEDVKQKLIRIIGDPVTRYQEDPVRMLRAVRFSAKLQFNLSPETKAPFPKISHLITHVSSSRLFDEITKLYQCGEAESVQKLLVEYGLFNYLFPQTAALFDSHYPVNPLLGIALENTDTRIRDGKPVTPAFLIAVLLWFPMIECSRKLQESGLPPLPSIEKAMSIVLSEQNAIISIPKRYSQVIREIWLLQYRFEKRFGGRAFNLLLHPRFRAAYDFMALRALSGDESMELAQWWATFQEVDNVEKNNMVTQLAATTPGRPKKRRKRKIAK

SEQ ID NO: 61504 - protein, 219 aa, Legionella pneumophila
AIGYEQFVELLAGAHDVDTHVQFTDFKNNIPVLMALIGIWNNNFLNIHNLLILTYSKKLEYFVPYVQQLDMESNGKSIDVNGSMVDYATGPIVWGGLGNQAQHSYFQLLCQGTHRCVGDFITLKTNDEHEINSMCHYKMKVLSEGIQTIENPYGYIPGNMPMNHLILSDCSPYTLGALVALYEHKIFVQSVIWNINPFDQPGIESAKSAHREITLSSES

SEQ ID NO: 61505 - protein, 431 aa, Legionella pneumophila
MSSNESAAIVSPIVNQKLSQWKKQDTIWMLSLYGTAIGAGTLFLPIDAGLNGILPLIIMTILAFPMTYYSHRALCRFVLSGSSSHNDITDVVEEHFGSFAGKMLTILYFFAIYPILLMYSVAITNTTESFLINQMGITPPPRALLAIILILGLMGIVRLGQEIIVKSMSVLVYPFATILFLLSLYLIPNWNNAIFIQSNSLHANGGHGLLMTLWLIIPVMVFSFNHSPIISSFAVNQKQQYGSQADEKSSLIMKYSHLMMVFSVMFFVFSCVLSLSPQDLLQAKQQNISILSYLANHFNTPIMAYIAPVIAFIAISKSFLGHYLGAKEGLSGIIVKSLKSTTGKTINKNSLHRIIEIFMILTCWVVATINPNILKMIETLGGPIIAVLLFIMPMYAIAKVPAMKKYNNQISNVFVTVMGIISISAIIYGLI

SEQ ID NO: 61506 - protein, 589 aa, Legionella pneumophila
MNQEISNFSTFNFSNALNKALEDMKFITPSPIQAQTIPLILQGRDAIALAQTGTGKTAAFALPILQNLSPEISTTQALILAPTRELAIQVAEQFELLSKYQRNVTIAVLCGGQEYGRQLKQLRSGAQVVVGTPGRILDHIDKGTLLLNNLKTFILDEADEMLRMGFIEDVETILEKLPEKKQMALFSATMPYRIRQIANTYLNDPASIEIRMETATVKSIEQRFLFASVHQKPDALIRVLEVEDYQGVIVFVRTKSSTEEVAELLQQHGLRAMAIHGDITQSLRERIIAQFKQGAIDILVATDVAARGLDVERVTHVINYDMPHDNETYVHRIGRTGRAGRSGVTILFVTPKESRLISSIERHTRQRIEKVQVPNDHMIQMARQQRFMSNITTRLNHEHVYSYKRIVEEYIKEHDVSAVDVAAALALLLHKDMPWRKELNMPKAASAFKEERARAGEKGLDLRGRFKEDRKSSFADRKGARGSKKDFAKDFSNERKKFNDGRKAVNQESVAQDLFRIDVGKIHGVKPGNIVGAIANEAGLQSRYITGLKIHEDHSTVRLPKGMPKEVMKDLTKAWVCGRQLNLTLIGSA

SEQ ID NO: 61507 - protein, 318 aa, Legionella pneumophila
MSTVRFNNQSFALTPDESLLQCFLRHGVEYPNSCQAGICQSCLIKAKDGKINPDWQEGLPETLKSQGYFLACLAKPSTSLYVTSPDNAECETQAQIMSLQRLNHNVIQVKLNVEHPAPWLPGQYLSLINPEGTMRNYSIANIPADDGYIELHIKIYPQGKMGQWLLQRAAINTFITIRGPFGQCYYHNPHNLAFDILLAGTGTGLAPLIGIIRSALTQKHEGTITLVHGGVTDEDIYYKEELEMLSLLFSNFRYDPCVLQSQGLYPEGSIEKRVLTHLHSPNNTKVYVCGPKETTNKLKTRIFLAGVPSTNIYSDVFL

SEQ ID NO: 61508 - protein, 487 aa, Legionella pneumophila
MAGTVKGRKADRHATSDWMEMEKERGISITTSVMQFIHNQHVINLLDTPGHEDFSEDTYRTLTAVDSALMVIDVAKGVEERTVKLMEVCRLRDTPIMTFINKLDREGREPIDLLDEVESVLGIQCAPITWPVGMGKRFKGIYHRYQDIIYLYQQGSNAKKVEAMQIKGLDNPQLDELIGDSADELREEIELVKGASHEFNLEAYLAGKMTPVYFGSAINNFGIKELLDDFVEYAPGPQPRATQERVVSPHEETFSGFVFKIQANMDPKHRDRIAFVRVCSGSYKKGMKLNHLRIGKEVQISNALTFMAGDRSHTELALAGDIIGLHNHGTIRIGDTFTQGEHLKFTGIPNFAPELFRLVRLRDPLKSKALLKGLIELSEEGATQVFRPLNSNQLILGAVGILQFDVVAHRLKHEYKVDCIYESVNIACARWVYSEDDKAMSEFRTKAYDYLALDGGDMLMYLAPTKVNLTMAEERYPKIKFCATREH

SEQ ID NO: 61509 - protein, 204 aa, Legionella pneumophila
MFTGLIENTGKVLMNRQGENSSRLVVSSSYQDLKPGESIAVNGVCLTLLPADFPELCFDISPETLHVTTLSKLSSGDMVNLERAMLASTRFGGHYVSGHVDTRAKVKSIRAVNEFIAMDLDGFIPEHNHYLIPKGSITVDGVSLTINTVSEQTVGLMLVPHTLSMTNLGSLRVGQQVNIEFDYLTRIVAHQLQIIGKLNLEEVS

SEQ ID NO: 61510 - protein, 131 aa, Legionella pneumophila
MQQILLRPEDYSVIATLNLNGDYISDALAAQVGGIGIAPGANISDQMAVFEATHGTAPKYAGQNKVNPGSIILSAEMMLRHMGWYEAADLIIRGMEGAIEAKTVTYDFERGMQGATLVSSSGFADAMIKHM

SEQ ID NO: 61511 - protein, 248 aa, Legionella pneumophila
MINLEGKIALVTGASRGIGRAVAEKLARNGAFVFGTATTEQGAASINSFFEKEKLAGKGIVLDVTSTEQVENLMSTLSDNDQCPSILVNNAGITADNLLLRMDDDEWYKVIETNLNSIYRMTKACLKPMFRARWGRIISIGSVVGASGNSGQVNYTAAKAGVIGFSKSLAQEIGSRGITVNVVAPGFIDTDMTTALPDMVKEEMLKRIPMRKLGQPEDVADAVAFLASDSAKYITGETIHVNGGMYMS

SEQ ID NO: 61512 - protein, 603 aa, Legionella pneumophila
MPKRTDIKSILILGAGPIVIGQACEFDYSGTQAVRALKEEGYRVILVNSNPATIMTDPELADATYIEPVQWKEVARIIEIERPDALLPTMGGQTALNCALDLVREGVLAKYSVEMIGATREAIDRAEDREKFRQLMIKIGLDMPRSAIAHSLEEAIQVQARLGFPAIIRPSFTMGGSGGGIAYNREEFEEICIRGLELSPTHELLIDESVLGWKEYEMEVVRDKNDNCIIVCTIENFDPMGVHTGDSITVAPAQTLTDKEYQRMRDAAIKVLRAVGVDTGGSNVQFAINPEDGRMLVVEMNPRVSRSSALASKATGFPIAKVAAKLAVGYTLDELKNEITGGKTPASFEPSIDYVVTKVPRFNFDKFPQTPDTLTTQMKSVGEVMAIGSNFQESLQKAIRGLEIGAVGLHSLFQKEDMARLRGHLREPTPDRLWYIADAFRQNLSLEEIHLESRVDPWFLAQIQELVLLERSIIGKTIRDLDKTALHLMKHRGFADAYLAKLLGCTEAEVRARRVELEILPVYKRIDSCAGEFPSDTAYMYSCYEGSCEARPESNKKKIMILGGGPNRIGQGIEFDYCCVHAALSLRSAGYQTIMVNCNPEAV

SEQ ID NO: 61513 - protein, 158 aa, Legionella pneumophila
MTGQLIDKTKERLYNVKNDAIGNMGIAPYQETEGEEYMNEKQLAHIEKILLAWRQSLMEEVDRTVSHMKDEAANFPDPSDRASQEEEFSIELRTRDRERKLIKKIEDALERLRNEDFGYCEACGIEIGLKRLEARPTATLCIDCKTLSEIKERQNQGA

SEQ ID NO: 61514 - protein, 493 aa, Legionella pneumophila
MSFQTDKEIQQKFFNYTLFVLVVLLICRLIANYFFPLFDTTESRYAEIARKMLETGNWVTLQQDYGVPFWAKPPLSIWLSAFFMQLLGVNEFAVRLPGLLLSIGVLWLVWGVAKKQSGSMAALFSLLTLAGSLYFFLDAGTVMTDPALLFCITLASVSFWHAMVYENKIWSYAFFAGLGLGLLAKGPIAVVLVGMAVFFWVLLRNEWLNLWKRLPWVKGTLLLLLIAVPWYVLAELRTPGFLNYFILGEHFHRFLTPGWSGDKYGIVHHVPKGTIWLYATAGVFPWNIIAGGWLVKHGKMLPSLCQSGDGWLSYLTLWMITTLLFFTFASNIIYPYVFPSLPAFALFFAEILNRLNLELKHLKWIFISSLLCGVLFLAVAFVFSVKPNVVPNTHKPIITAWLNQNPTAGSYLVYWGYKTDFSAEFYSEGQVKAVKNSNDLCKLISNRLENYLVINSKETQQIREGLLARFTLIDTFRVHRDTLILFYAPVLTC

SEQ ID NO: 61515 - protein, 250 aa, Legionella pneumophila
MTNQKQTTHFGFKSVDWNEKEKKVAEVFHSVAKNYDRMNDLMSLGIHHLWKRYTIELSHVRPGQSVLDLAGGSGDLTRLLLQKVGDSGQVILADINAAMLHVGRDRLLDEGLFKNIRYVQGNAQCLPFADNSFHCITMGFGLRNVTDKDEALQSMYRVCKPGGKLMVLEFSTPVFPGLKPVYDWYSFNILPKIGKFVANDEASYQYLAESIRMHPDQETLKAMIERVGFEDCHYHNLSGGIVALHIAYKY

SEQ ID NO: 61516 - protein, 474 aa, Legionella pneumophila
MSWSIRIENLSKQYRIGSTTTTAAELINEKLRKFLLLLDFKKRNRFSSDKPLPSSIAQEGRTVVDASQISPEYPNHFWALRDINLEIEAGERLGIVGQNGCGKSTLLKILSRIVSPTEGLFRFRGRLISLLEIGTGFHGELTGRENIFLNGTIMGMKTHEIKNRLNQIIEFSELGSMIDTPVKRYSSGMYIRLAFAVAAHLESEILIVDEVLAVGDAAFQRKCTEKMLDLANQGRTLLFVSHDMETVNRICNRAIRMSHGRIVGDSKFDTSAASKSSVMDITRDYLRSGAKYKSEQVWPSDKPMIFLNSLKLNRVRLIDYDNKVRSNFNLNETIVVEIDFTIIKETYPFNIHLYLKDSSGRVIFVSMDNHAWQSKKVRPLGNYTERCTLYSPLLNIGDYHIDIEFWPGNALENRLVVNSVVSFELKDGAVNEGVRGNWASDWPNSLIRPQLDWSISTNKKQHLVLKEHELVTEK

SEQ ID NO: 61517 - protein, 331 aa, Legionella pneumophila
MDYNTIFILFVIFIAFVFDFINGFHDAANSIATIVTTGVLTPRQAVLWAAFFNFIAFLIFNLTVAQTIGYGLIDTDLVDTYFILAALMGAIFWNLVTWYYGLPSSSSHALIGGLAGAAIAKGGLSSLKITGFAKVAAGIFISPVLGLLIGLLFTHIFSLFLRHKNEEELNTLFKSFQLISSALLSITHGGNDAQKTMGIIAVLLFSASWLDGVFYVPFWVVISCHGVISLGTLAGGWRIVHTMGTKITKLNTLKGCAAETGAAITIFAATEFGVPVSTTHTVTGSIAGVGLISGIGGAHWKVLRRIFYSWLLTIPAAALVAAAIVNIAPTA

SEQ ID NO: 61518 - protein, 335 aa, Legionella pneumophila
MDLVIAANYLSTLEKCLEQFGINHFLEKIGFDLIRVHDPDAYLTQDEFNQVILEAYKLSNCPELGLVFGQNLSIVNHGFLGYAAMSSPTFGTAIQTVLSYLNTRTNLLSLELRQFNTENSAYIKLLPHTKEMVLSRFITELAITHLIKMRNFLISCNDPLLKIELNYDEPPYAKYYQTIFQTKIIFNTEATRVWFKAEELNYPIHFADDVSYQLAKRQLQELEKKMSLKEDMASKIKSILINQNLNHVSMDEIASRLCMTSRTLRRHLQRLDVTYQELLDEVREQKAKTFLLNNNISMTEICFLLGFQDTSNFSKAFKRWTGITPTEYREKHEVQ

SEQ ID NO: 61519 - protein, 124 aa, Legionella pneumophila
MTESLFERLGGQNAVNTAVDIFYRKMLMDDRVNYFFDDVDMEQQILKQKGFLTMVFGGPNQYTGKSMREGHQHLLARGLNDSHVDIVIEHLGETLKELGANEEDIQKVAAIANSVRGDVLGRSS

SEQ ID NO: 61520 - protein, 111 aa, Legionella pneumophila
MGDTKNETFPAFFLDNHPGIIALEKFFSGPFTRETVYPRPIVERVLQLNAAALILAHNHPSGLSDASQQDLAITERIRDALDLVDARLLDHIVIGDNEVYSIFAENKWVCN

SEQ ID NO: 61521 - protein, 860 aa, Legionella pneumophila
MKSSEIRQAFLNYFVQRGHQIVASSSLVPSNDPTLLFTNAGMVQFKDLFLGLETRSYQRAATAQRCVRAGGKHNDLENVGYTARHHTFFEMLGNFSFGDYFKREAIQYAWEFLTEVLHIPAERLWVTVYKEDLEAEDIWLKEMKVSPERFSRCGEKDNFWSMGDTGPCGPCTEIFYDHGPEVAGGPPGSPDEDGDRYIEIWNLVFMQFNRDREGHLHPLPKPSVDTGMGLERLAAVIQGVHSNYEIDSFQYLIKAIAQLGQDIDLNHTSLKVIADHIRSCSFLIVDGVLPSNEGRGYVLRRIIRRAVRHGNKLGLPSPFFSKLVQPLIDVMGDAYPELINSKAHIERILQQEENQFTRTLEQGLRLLQDHIKNLQGQELSGEVAFKLYDTYGFPIDLTADIIREQGLHIDMEAFNQLMQQQREQSQAASQFTTDYHAVSQLDHQSEFHGYEKESMEAKIIGLLQEGNEVKSINKGAKGAVILDHTPFYAESGGQVGDKGLLIGKEFTFQVDDTQKVGQAVVHYGKVIKGELTLDLLIHAQVDNIRRDAIRLNHTATHLLHAALKKIVGQHVQQRGSLVDAERARFDFSHFEALTPQQIQQIEEVVNAQIRANNEVITQVMDIESAKQSGAVALFGEKYSDAVRVLSMGDFSKELCGGTHARRTGDIGLFKIVAEYGIASGIRRIEMVTGRYALAWVNEQLGFMNNLAATLKTTPNSLQEKVSQLLLDNKNQEKMIAKLLSEKAQKSGADILGEIEEIKGINLLIKQLEGMDSQTMRHTMDQLKSRIDSAVIILFTIEQNKMNVIAGVSKNIIGKAPSAAQLVRHLCGKGGGRDDMAQGGGGVPEDLNSKIKEIKEMIEKI

SEQ ID NO: 61522 - protein, 480 aa, Legionella pneumophila
MKIRHKPLRTLVSTAVLGVLATGTLNAGGFSLYTEGAGYTTGNFAAGVAAEAADASTGWYNPAGLVLIRDQQAVFAGVGVFPTAKLSGVSTYSTINPPPFPSFVYSEVFNNINGAEDAFVPSFHYALPLGENATFGLSVVSPFGLATDWGPDSPVRYQATFTELITTNISPEIGGRLTEHVALGAGLDLQYARVKYNRILGVPNILNVLPPFNPMLADSLTYNKGHSFGVGFHVGVLGMFNDNHTRLGANYQSSMRHEFYGYSRLTGPLASPGNILAPFLFPAPGIFQSDDLFSNSIDFPDVVTISAYHDVNDKLALLGSLVYTAWSSYKTVQLSNAAAGRPADNGNVSQAKAISISPQNYNDTLRVAIGANYHVNDKLMLRVGGGYDPTPTNNIDRDVRLPDTDRWALSAGAHYQATNNIGLDIGYTHLFTSSDPVINRTDAFTATTRYNVTASGTAGANLVGVQATWTIDKEPPAPTK

SEQ ID NO: 61523 - protein, 315 aa, Legionella pneumophila
MVKSAFVFPGQGSQSIGMLSDFMPQYTVVTDAFAEASDALGYDLWDLVQNGPETKLNQTEYTQAAMLTADVAIYRLLMQLGVPQPQVMAGHSLGEYAALVCANSLSLKDAAQLVARRGQVMQNAIPLGEGAMAAIVGLSDEQVRSLCEQASTANHLVTPANYNALGQIVVAGHRVAVDKLIQLAEEAGARLAMIIPVSVPCHCPLLKNAAELFAEDLAQIEFQVPSVDVISNVDLSIYHSTQHIRDKLKEQLYSPVRWVETVQLIQQRGIDLVVECGPGKVLNGLIKRIERNLTTISVYDTISLDQVIERLHIPV

SEQ ID NO: 61524 - protein, 89 aa, Legionella pneumophila
MIKTKIKIINRLGLHARASAKFVSTAAKFQSHIDVTKDTQTVNGKSIMGVMMLAANKGSELTLEIDGPDEERMNEALVELINNRFGESE

SEQ ID NO: 61525 - protein, 549 aa, Legionella pneumophila
MMKRYSKRLLTYIYLLMKSIPLVFTMQQLSYSTDKIPIPTNKLPDDLNKVMNKSIYKKALWGLRVVDLDTGNVLLNLNSSTQFYIGSVRKIFSVGELLNERGADYQSVTRVHYDGVVHNGNLNGNLVLVASGDLTMGGRTLPDGHVAITEYDHNEANSLGNAIITQTNLLAGYQYLAKQVYKAGIRSISGDIVIDDRLFEPFNFRGEFDVTPIFINDDVVDIVILPSLINENANVSWLPHSSAFTVINQLLTVNPHEKYNLELESKLPACIGKPGCSGIIKGHLPINFIPPLTHNYPLVQTFRITKPSNYARTIFIEALQEAGINVSSIDKTKENPKKLLKSTNLYNKNNKIAALKSLPLGEHVKYILKVSYNIGADTSLVLYGLTKGARSMIESLNVEKKILDKKYGISPSEYHFIDGSGGGETKATNTAIIKWLTIMSKRPVFNIFYNSLPILAVDGSLGSINNFQSDPSLSGATGRVHAKTGTYVLGNESGMLVKGRSLAGYIISKKNHRLAFALVVNNIPIQSLEDLFAVAQDQGIIASILWRDY

SEQ ID NO: 61526 - protein, 412 aa, Legionella pneumophila
MNSILFKNANVILGESTELKKKFDVLVQNNLISQVSQTPLQPFEGMRIIDVKGKTLMPGLIDAHAHITGLTLSPKNIFYSEAEIFLAAATYLKNSLFYGFTTLREAGGADFRIAQLLDNKSIPGPRLFYSGRALTQTGGGADFRKPNEQIDPCGHVGSFSTMSVIADGIDEVRKAAREELRKGATQLKVFASGGVVFPSLSNPTLYEYSEEELSTIVEEARARNTYVMAHAYSDESVRKCIKSGVRSIEHANFVSEPTVELMSESGVFYDPTFISLVQRIESAEQNRLSEAIVANLKNTIEKGKKVYEYALKYKIPIAFGTDLWGPEAQRDQLREFEMLKELDSAANIIRSATVVNAELLMQKGKLGVISEGAYADLLVVDGNPLVNLNVLLRPDENLKLIMKDGVIYKNEL

SEQ ID NO: 61527 - protein, 209 aa, Legionella pneumophila
  MISC_FEATURE (9)..(9): X=any amino acid
LVCGFARLXGYPIGIIANKGILFSERAQKASHFIELCCQRKIPLVFLQNITGFMVGSKYEASGIAKHGAKMVTAVANANVPKFTIIVGGSFGAGNYAMCGRAYAPRFLWAWPNARISVMGGEQAANVLAQITREKYAKQGKEWSLEEEEQFKTQMRSQYETQGNPYYASARLWDDGVIAPQDTRKILGLGLSAALNAPIEDTRFGVFRM

SEQ ID NO: 61528 - protein, 423 aa, Legionella pneumophila
MTQKTAKLSIDGQETIDLPIYTPTLGNDVIDITQLGSHGVFTFDQGFLSTASCESKITYIDGDKGILLYRGYPIEQLAEKKDFLDVSYLLLNGELPNKEEKKAFVSLINNHTMVHQQMYQFLNGFRRDAHPMAIMVGIVGALSAFYHESMDLNNAQDRFISAIRLVAKMPTLAAMSYKYSIGMPYMYPKNKMSYAENFLHMMFGVPSEDTTPDPVLVRAMDTIFILHADHEQNASTSTVRLAGSTGANPFACISAGIGALWGPAHGGANEACLNMLKEIGDVSRIDHYIKRAKDKNDPFRLMGFGHRVYKSYDPRAKVMRKTCYDVLEAVGAKDAPLFKLAMELERIALEDEYFIEKKLYPNVDFYSGLTLSAIGIPTNMFTVIFALARTVGWMSHWMEMVATKSRIGRPRQLYTGEKIRDVK

SEQ ID NO: 61529 - protein, 506 aa, Legionella pneumophila
MTDNLLSGAPDAFILNTKWDQLDWPSIEKNVYRLQVRIAKAVSNKQHGKVKSLQWLLVNSISAKLLAVRRVTTAKGSKTPGIDGVVWTTSEEKCEAVRNLKARGYKATPLRRIYIPKKNGKERPLSIPTLKDRAMQALYLLALEPVGETTADLNSYGFRPKRSTHDAIYQCYATLARKNCAQWILEGDIKACFDEIDHGWLKSNIIIDQRVLTQWLQAGYMEKNQLFETARGTPQGGPASPLLANMVLDGLEREIHSGCGQGNKINYIRFADDFIVTANSPDILKEKVMPIISNFLAQRGLSLSQEKTKIVHIEEGFDFLGFNVRKYKGKFLTTPSKDSIKSVQMKIKETVKKGYGWKGSELISALNPIIKGWANYHRKVVSKATFSELDNYIYQETFRWTMRKFSGHNRYKAMDRYFRNRSLTRRWIFSDVVKAKDGTKKYVCINKMMDIKIQRHVKIRSSANPYLPEYVKYFEDRKKWAKDCSFVQRIKDKQLNVIGSEYLLGE

SEQ ID NO: 61530 - protein, 468 aa, Legionella pneumophila
MTQSEHNDQHLSFSQFPLRQELIKSLASSNYENMTPIQMQSLPIILRNEDMIAQAKTGSGKTAAFALCLLNNLKISFFVVQALVLCPTRELAEQVSQAIRRLACLMPNVKIINLSGGIPMQPQLDSLRHGAHIIVGTPGRILKHLKNASLDLSQVKALVLDEADRMLDMGFFDDIKNIISVCPKQRQTLLFSATYPEEIKRLSKQFMKDPKEVHVVTPPEEIDIEQHFYEVSRHAQKFPLLKSLLLHYQPVSVLIFCNTKQQTIEVTDQLINEGFSAIALNGDMEQIERDLAVLRFANQSCSILVATDVAARGLDIKELSAVINFDLAFDHDVHIHRIGRTGRAGSKGIALSIVTPADAQRICAIEDNYPLPIHWGNINELENHNTARLVPEMVTLCIASGKKDKIRPGDILGALTKDAGLAGNTIGKINITAMYSYVAIHHSQADKAYQYLQSGKLKGRKVNVRKIN

SEQ ID NO: 61531 - protein, 42 aa, Legionella pneumophila
MPELPEVETTKQGIKPHLEGRMITAVQVRNPKLRLPVPLNLN

SEQ ID NO: 61532 - protein, 209 aa, Legionella pneumophila
MAKLYFYYAAMNAGKSTVLLQSSYNYRERGMQTLLFTPAIDTRFQYGTICSRIGLSEQAYAFNNSDNLYVLTQEFQLQTQKYSCVLIDEAQFLTREQVYQLTEITDQMSIPVLAYGLRTDFRGELFPGSQFLLAWADELIELKTICHCGRKAIMNMRIDENGQAVVEGEQVLIGGNESYVATCRLHYKRGEAEVTFPRNKLFNKDTNAF

SEQ ID NO: 61533 - protein, 789 aa, Legionella pneumophila
MQEPFFIKKVAVLGAGVMGAQIAAHCVNAGIETLLFDLAGKEGPKNSLVDKAIANLGKLKPTPLATPQTNELLQAKNYAENLEELSSCDLVIEAIAERVDWKEDLYKRISPYLSDKTILVSNTSGLSINKLCEVLPAQHRSNFCGVHFFNPPRYMHLAELIPANTTSSDLLDYLETWLTEYLGKGVVRAKDTPNFIANRIGVFSLLTTLHHTLAMNMGIDEVDALTGPLLGRPKSATFRTMDVVGLDTMQHVINTMQSQLTGDPWHKMFILPDWLNGLIKEGHLGQKSGQGIYRKAGKVIEVYDIQTGQYRPSRAEVSDELKAIMDIKDPEARMKNLMASNNKQAQFLSACFRDLFHYCAYHLEEIADNARDVDLAIRWGFGWSQGPFETWQLSDLHSVTRQIDESIQDNTALSSAKLPEWLYEIKEFYTREGAYSPGKNNYHARSQLPVYHKQFFHDRVLKESHHPVHVIYENEGVCLWYLKDDVAVISFKSKANTIGQSVLDGIETALDIAERDYQGLIIYQQDASNFSSGADLRGVSKLLTDGTIQALEHMVEQFQRVAMRLKYSSIPTVAALRGRALGGGCELMMHCDSIVAAFESYPGLVEAGVGVIPAGGGCKELAMRSAHHAQQADLLTFILPVFQQIATAKVAASAVEARNMGYLRAADSILMHADEVLYASLEKIKAMRAANYLPPMKKQRFKVAGIEGHARLQSGLVNWLEGGFISQHDYFLANELAKVLCGGDVNHGTLVDEQWMLKLEREAFIKLANTSLTQARISHLLETGKPLRN

SEQ ID NO: 61534 - protein, 623 aa, Legionella pneumophila
MKIKLTMAQALLRFLANQYVVLDNNEYRFINGVFGIFGHGNVTGLGEALEYDAQGLIYYQGHNEQGMAHAATAYAKQKNRLGIMACTSSIGPGATNMITAAATATTNRIPLLLLPGDVFSCRQPDPVLQQLEVPYDYTISVNDCFKPVSKFWDRITRPEQLMTACMHAMRVLTDPVETGTVTLCLPQDVQSEAYEYEESFFKKRLWRIERERISDAMLTEAIRHIRTAKQPLIIAGGGVHYSLATETLSEFALKHRIPVAETQAGKSSLTAKHPMNVGGIGVTGSEIANSLAAQADVILVIGSRLQDFTTASKWAFKNQDCQIIHLNVSRLDAMKMNGVMLKGDAKAGLEQLGKELADYQTSLSYQQLIRHYQNEWAQELDKLTQSYSTEQAGLHQTTVLGLLNQYVTEEDVIISAAGSLPGDLHRIWQSKKAKDYHLEYAYSCMGYEVAAGLGVRIAKENQEGEVYVLVGDGSFVMMHSELLTAIQERKKITILIFDNHGFQCIRNLQEGNGSLGFGNEFRYREPTTNALNGDYLPIDFCKYAEGLGAATYFVKSYEQFRTTLDSAKKQENSTVIVLPVLPKTMSQGYKTWWRVGVAEVSQSESVSKAYQMMREQIETVRQY

SEQ ID NO: 61535 - protein, 156 aa, Legionella pneumophila
MTTKKQPDSTIALNRKAGFDYFIEDQYEAGLVLEGWEVKSLRAGKINLSDSHVIIKYGEAFLLGAQIQPLPTASTHFIPDPIRTRKLLMNKKELNHLIGSVERQGYTIVPLSLYWKKNKIKIKIALAKGKKEHDKRDTIKDREWQRDRSRIMKKNT

SEQ ID NO: 61536 - protein, 388 aa, Legionella pneumophila
MDNESQGFLETLYKLQNYISEITGMPGVSLTPMAGSQGEFAGVAMIKAYHQSRGDTARDEILIPDAAHGTNPASAVMCGFKVVEIATAPDGDIDLDELKRKVGPRTAGIMLTNPSTLGLFMRQIKEIASLVHQAGGLLYYDGANLNAILGKVRPGDMGFDVMHLNLHKTFATPHGGGGPGAGPVAVGKRLIPYMPLPVVKKTDSGYHWATRQDYPQSIGRLSCFMGNAGILLRAYFYMLVLGKEGLLRVSEFATLNANYLLKELTKVGYTAAYPDRRASHEFILTLNSEKKNYDVTAMDFAKRLLDYGVHAPTTYFPLLVPECLLIEPPETESKEELDAFVAVMKIIREEASKQPDILKAAPHTLPVKRLDDVKAARELDLNYFATHE

SEQ ID NO: 61537 - protein, 574 aa, Legionella pneumophila
MKDHYKWLSCLFFFICNIYQVNAKTFPQHPPGYAVASAHPLATHAGLEILAAGGNAFDAAVAVAAALAVVEPYHSGLGGGGFWLLHQEKEHLNLFIDGREVAPLAASKDMYLAPDGQVIPGLSLNGGLSAAIPGQPAALVYIAKNYGRLPLSKTLAPAIKLAEEGFPVDPQFRYFSTLDDRLENLKKYPDTAAIFLKNGQPFEIGEKLVQKDLAKTLRLIAKYGNAGFYSGETASLLVQGVNAAGGTWSLDDLAQYKIKVRPPLISAYHNMLIITAPLPSAGGVALVTMLNILSKFPLSSFPKLKWVHYVVESMRLAYWQRDQFLGDPDFIKVPLDKLISSDNAKQLSRLISPNKAIDSKVLQGSVPTGKHSNTSHISIIDTEGNRVAATMTINYIFGSSVVAKGTGVLLNDEMDDFSTKVGEQNVFGLVGSERNAIEPRKRPLSSMAPTFLEMPGRVAILGTPGGSRIPTMVLLASLLFYDGYGAISMVSAMRFHHQYLPDVLQFEPDTFPSSIQQGLQAMGYHLMPLKQYYGDMQAITWDKESNVLTAASDPRHIGLAAAISNMAYGYGVNY

SEQ ID NO: 61538 - protein, 309 aa, Legionella pneumophila
MSHALHSQIATHRVHGGVVPELASREHVNYLVPLVDEVLTKAQIRKNQLDGIAYTAGPGLIGALLVGSCFAKSLAYALNIPALAIHHLEAHLLAAKMETPSLDFPFIALLVSGGHCQLIEVNNIGEYRLLGDTLDDAVGEAFDKTAKLMGIPYPGGAVLANLADQCLSTPYQFPRPMTDRPGLDFSFSGLKTHALNTWNQSEKKESDRSEIAKAFQQAVVETLIIKCKRAIKESQSKRLVVAGGVGANKALRSALQKWIKDIQGEVYFPALEYCTDNGAMVAYAGCLRMMRGEIDGGLGVIVKPRWPLA

SEQ ID NO: 61539 - protein, 411 aa, Legionella pneumophila
MTNKTWGGRFKKSLDSSVNQFNASLSFDHVLFDQDINGSQVHVKQLAKQKILTEAECQEIYSALEEIRTEIKQGQYSFNERDEEDIHMFIEQLLIQKIGDLGKKLHTGRSRNDQVALDLRLYTRDKGCLINELLTRLIDCLDDLTSKHQQDLMPGYTHLQQAQPVTLGAYFNAYQCMFSRDKSRLEDWFKRMNYSPLGAGALAGSTLPLDREWVAESLGFAGIIPNTLDAVSDRDFVIELCSVAAMIMMHLSRLCEDLILWSTQEFNFVTLDDAFATGSSLMPNKKNPDVPELIRGKSGRVYGHLMAILTVMKGLPLAYNKDMQEDKEGLFDTINTIIVCLQMITPFLQSLTFNTPLMRTKAQSGYLDATAILESLVMKGMPFRDAHHQVGAWIAEAIEKQCSLNELLKGG

SEQ ID NO: 61540 - protein, 477 aa, Legionella pneumophila
MDKRPNIPKRKSGNSSKLLAFFALVFAFSLPYLLVKNFSHPKRSSYADQTDLYPELSDELSRDIPAEASTEIPHEKPDIKSATKPMQTKQDQQDKPINTSHVKKDNEWQIVNPHSGDSMATIFHRLGLTAQNLNDVIKNNPHAKMLTRIKPNQKLQFLIKKNKLEKLIVPVNTIQTLTVYRAGKIYKTKIDSKKTTTQNRYVTATVQGSLYTTAQRFNIPSKLVRQMTTIFNKEIDFSRSLRSGDQFSIIYDAYYIEDKMVGVGDILVVTYTNRGKTYQAIRHTNAHGEQDYFTPQGTSFKKAFTRYPIKFSHISSTFALSRYHPILHYRRAHKGIDLAAPIGTPIHATGDGVITIIDRHNGYGNMIKIKHDKTYSTIYGHLLKFQKGLSKGSRVKRGQVIGYVGQTGLATGPHCHYELHVNNQPRNPTTISLPTAAPVPAREMAAFKAKASTLLARLKLFEQAQLASKGKKKVNVG

SEQ ID NO: 61541 - protein, 425 aa, Legionella pneumophila
  MISC_FEATURE (7)..(7): X=any amino acid
MEPAYQXNPNAIHVIYGHGGEQIKSSLPNLPVHWVHQAEQLGTGHAVLQAMPHIPDDAYVLVLSADVPLIQVETLQSLIECSQRQNPDHSVLALLVAELENPSGLGRIIRNNQGEIYSIVEEKDANEQVKNIKEIYSGVCCTLANNLKKWLPQLSNSNAQGEYYLTEIISLAVQNKTPITSLTAKNSFEVQGINNRQQLQQLERIWQQRAANQLMEKGATLADANRFDLRGELYCGKDVYIDINCIFTGKVVLGNGCKIGPNCSLTNVTLGDGCEVYANSVLEGCHIANDCHIGPFARLRSGTQLASHCKIGNFVETKKAIFDEGTKASHLSYLGDVLLGKNVNVGAGTITCNYDGVNKHQTIIEDGVFIGSDTQLIAPVTVGANATIGAGSTIRRNVPPDELTLTESRQKTIYGWKRPVKRERD

SEQ ID NO: 61542 - protein, 521 aa, Legionella pneumophila
VEHETMEFDVIIVGAGPSGLSAAIKLKQLALASQKEITICILEKGAQVGAHILSGAVLEPRSLKELLPDNWQQAPLDTPVNKDLFYFLTQNKSFKLPTPKPMHNEGNFIISLGELCKFLAEQAESLGCEIYPGFAAAEILYNDKNQVIGVATGDVGIDRQGKKTDNYQPGMHLLAKQTLFAEGCRGQLSQTLMSRYHLRDHSQPQTYGIGIKEIWQVDASRHEPGKVIHTVGWPLDHATYGGSFLYHLSEQRVAIGFVVGLDYKNPWLNPFGEFQRFKTHPLIKSVLTGGERIGYGARALNEGGWQSLPKLTFPGGALIGDAAGFLNVPKIKGIHTAMQSGMLAAQACFDALSEEKSGQFELSAYPKKINQSWLKQELYAVRNIRPGFKYGLFPGLINAAFETYVTRGYSPWTLKNHSDYKSLIPADKAKKINYPKPDGVLTFDKLSSVFLSNTFHEENQPCHLKLKQPKLATEVNLNQYALSERRYCAAAVYEINVRGEKGPRLPINPQKCIHCKRAKIK

SEQ ID NO: 61543 - protein, 823 aa, Legionella pneumophila
MDNTYNPQEVEEQAQQYWHKKQSFNVTEDLNKEKFYCLSMFPYPSGTLHMGHVRNYTLGDVIARYQRALGKNVLQPIGWDAFGLPAENAAIKNKIPPAEWTRKNIAAMKEQFLRLGNAYDWKREITTCDPEYYRWEQWFFIRLFEKGLVYKKNAVVNWDPVDQTVLANEQVVDGRGWRSGALVERKEISQWFIKITSYADELLSSLDSLDEWPAQVKQMQRNWIGKSIGTEIYFNVNNYPKRLKIYTTRPDTLMGATYLAVATDHPLAKEAASNNKKVQEFLDSCQGIKIAEAELATMEKRGIDTGMTAIHPITGKELPIWVANFVLMQYGSGAVMAVPAHDQRDWEFAQKYQLPVKQVIKPIDIEHDFNQSAYTEEGILINSNQFDNLLSSKAIQVITNFLEENDAGKATINYRLRDWGVSRQRYWGTPIPMIICEQCGIVPVPDEELPVVLPENVDFTGTGSPLTQCKEFVNVTCPKCGQDATRETDTFDTFVESSWYYARFACKGQENAMLDDRAKYWTPVDQYIGGIEHAVMHLLYARFFHKLMRDEGLVNSDEPFKALLTQGMVLKDGHKMSKSLGNVVDPNHLINTYGADTARLFVMFASPPEQSLEWSDSGVEGAHRFLKRVWAFSHQHRDMLIDINDSILSGNGHVDWKEAESRLKKSRHIVHQILAQATHDYDRNQFNTVVSGCMKLFNEISDYSIETENDKFFIHSSISILLRLLAPITPHICHCLWQQLGFDKAIIDAPWPKVDKSALKTDEVDYVVQVNGKLRAQFTASTDATEEELIAAAKEHAHNFVVNHTIKKAIIVPHRQLINLVIG

SEQ ID NO: 61544 - protein, 768 aa, Legionella pneumophila
MRKVIKYLSIILGSLFVSGFLLLFFSPKPSLLEEFNFSKAVYDDNQQLLRLILSDDDKYRLYVPLSQIPKELMEATLLQEDQYFLWHKGVNPFSMVKAIWQTYVVKSRRIGASTITMQVARIRFGINSKKISGKLWQVIRALQIERHYDKDKILEAYFNLAPYGGNIEGVGAASLIYFNKPVSKLGLPEALTLSIIPQNPVKRTSKNSELKKIRNRLFARWLKQHPQDQEKQPLFGLPLVMQTNQNLPFLAPHFVNMVLKENPGLSQSISTTLDYRLQLIVERITRHYLARKKMFGVHNAAVLLVDSRTMSIKALMGSADFFNNKISGQINGVETKRSPGSTLKPFIYGLALDQGLIHPNTVLKDVPQSFNGYNPENFDYDFMGPIKAKDALVLSRNIPAIELSNQLTNPTLHKLLEQAHITQLRSESYYGLSLNLGGVELTMKELVGLYAMLINDGVWYPINSLKGVPRQKGRHLLSAEASFLVFDMLKNTPMKESNNDGSLQLPIAWKTGTSSGYRDAWTVGVFGPYVLAVWIGNFDNQANPAFIGKEIAAPLFFELINAIKHERGPIARVEKYPEHMHLEKIEVCKASGMLPGRYCTDTEWTWFIPGKSPIKTDTIFREVAINGKTGLRTCHIDENTRFEVYEFWPSDLLRIFRRAGIQRHTPPFFEPGCALSGNSGISPQITSPQAGVSYIVHANTQSNKIIPLTAVTDAGIAHLYWFINESFVAETKSDEPYLWQAKPGKYVVRVVDDRGLSDARDITIQMVS

SEQ ID NO: 61545 - protein, 707 aa, Legionella pneumophila
MSYFKELDEELKCYLEQAQIEKCYQAYLVAEKAHHGQMRRSGEPYITHPVAAALILARMRLDYQTIMATLLHDVVEDTSISKEELVNQFGEEVTALVDGVTKLTKIKFESKAEAQAENFRKMVLAMVKDIRVIIVKLADRLHNMRTLGSMPAAKRRRIAIETLEIYAPIANRLGMHSIYIGLEDLGFQALYPMRYRAIKSAVEKSRGNRRELTQTIEKDLQHALSQLNIPYEQVFGRQKHLYSIYRKMKQKKASFTEITDVFAFRIITEDIDSCYRILGALHCTYKPVPQRFKDYIGIPKANGYQSLHTTLFGPFGVPLEVQIRTREMDKVADNGVAAHWIYKSSGLEVNEAQLRAREWVQSLLEMQRSTGSSLEFIENVKIDLFPDEVYVFTPKGHIMELPKGATPVDFAYTVHSGVGNSCVAAKVNRRLVPLSIPLSNGQTVEIITAPGAHPNPAWLNFVVTGKARSNIRHFLKSQQHAESIVLGKRLLEQSLAELSSDYAKVPPETLQALLSDLHYKTVDDLLYAIGIGNQMAMVIAKRLVVSQDANESDKGNKKPLAIKGTEGMVVHFGECCQPIPGDNIVGKFQQGRGIIVHASDCTTLKTTRSNPEQFIALRWDEQVQGEYWVDITVDVANERGVLAALATAISEADSNIGNINVDPRDGRHNAVTFSISVRDRTHLARVMRRLRANKVVMRLYRKKQGEI

SEQ ID NO: 61546 - protein, 579 aa, Legionella pneumophila
MLIKQRQQPEFTVNLPNVPDVLKRIYITRGISDESQLDKQLQTLLPFHTLKGINEACLRLENALRSEQRILIIGDFDADGATSTALAITALRAMGARFVEYLVPNRFEFGYGLTPAIVEVASKWQPDLIITVDNGIASFEGVDAANKMGIDVLITDHHLPAESLPDACAIVNPNQPGCLFPSKSIAGVGVIFYVMLALRRHLSNCNWFNEINMAEPNMASFLDLVALGTVADVVGLDQNNRIMVNQGMMRIRQGQCREGIKALIEIAGRDYSRLRESDLGFAIAPRLNAAGRLDDMSLGIECLITTDPKMARNFCQQLDELNLERRQIESEMKEQAMLALEKLSINDEENKHLPVALCLHDKTWHQGVIGILAGRMKEKYHRPVIAFASVSEHELKGSARSVPDLNIRDVLAAVDKDNPGLILKFGGHAMAAGLSISPELLNDFRSAFVSEVLKHLDLSQCEGEILTDGPLQSHELSLETAQLIQQAGPWGQAFAEPVFDNVFEILDQRIVGKNHLKMTLISSQGGELLDAIAFNVDLKSWPNHRIKYIHAAYKLDINFYQGRTRLQLLIQAMNPVQQA

SEQ ID NO: 61547 - protein, 181 aa, Legionella pneumophila
MKLLFDFFPIVLFFIVYKFFGIYTATAVAMVASLTQVAFYRLKFQHYEKMHLFSLAIIMVLGGATLFFQNPWFIKWKPTGIYWLSALVFYGSSYIGSKPLIQKMMEANINLTTKIWYRLNLAWTLFFIVMGALNLYVAYHYDTDVWVNFKLFGGVGFTLLFVLIQAFYLTKHTDEKSFEKQ

SEQ ID NO: 61548 - protein, 285 aa, Legionella pneumophila
MNKLEDGGSWFSRLKQFLQGEPQNQEELVSLLRDAQIRSLINSETLAMIEGAILFSKMRVRDIMLPKNQMVCINKDDDFKHIISIVTQTGHSRFPVTGENSDEVVGILHAKDLLKYQPENMESFDLLDICRQVTFVPESRRLDSLLSEFRSNRNHMAIVVDEYGEVSGFVTIEDIIEQIIGDIEDEFDIDEDAYIKTHEGHCYIIKAHTPIEEFNEQLNADFSDETYDTIGGIVLNKFGYLPQRGEVIIIDDFEFKVLNADSRRIKLLECLDKRSPEKLNSTVEG

SEQ ID NO: 61549 - protein, 589 aa, Legionella pneumophila
MTVARNRFDAVIIGAGGAGMRAALQMTNSGLKVALLSKVFPTRSHTVSAQGGITAALGNADEDDWRWHMYDTVKGADYIGDQDCIEYLCKTGPEAVYELEHMGLPFSRMDNGKIYQRQFGGQSKHFGGEQAARTCAAADRTGHALLHTLYQQNLKAKTHVFSEWYALDLVKNSQGRIAGVTAMCMETGEIVFFQTRVCILATGGAGRIFQSTTNAFINTGDGFGMALRAGIPLQDMEMWQFHPTGIAGAGVLVTEGCRGEGGYLINKDGERFMERYAPRVKDLASRDVVARAMALEIRAGKGFDPKGVDHVKLKLDHLGADLIMSRLPGIRELSMKFAGVDPIVEPIPVVPTCHYSMGGIPTNMHGQVITKTDGKEHVVEGLYAVGECACVSVHGANRLGGNSLLDLVVFGRAAGIHVEELWQSNQLPDMSYVSEDDVAASLVRYERWENSKDGESHAVIRDEMQRVMQEDFGVFRTGEVMASGLKRLQALRDRLAHAKLDDKSQIFNTERVEAMELDNLMATAYATALSAIARTESRGAHSREDYPKRDDANWIKHTLYFEEGEVIDYRPVNTSPKYVEPFEPKERVY

SEQ ID NO: 61550 - protein, 863 aa, Legionella pneumophila
MVYLAKEVLPVNIEDELKQSYLDYAMSVIVGRALPDVRDGLKPVHRRVLFAMSELSNDWNKPYKKSARVVGDVIGKYHPHGDTAVYDTIVRMAQPFSMRYMLIDGQGNFGSVDGDAPAAMRYTEVRMSKVAHALLADLDKETVDFSPNYDETEFAPVVLPSRIPNLLVNGSSGIAVGMATNIPPHNLTEVINACIALVDEPDTSLEDLMEIIPGPDFPTAAIINGRAGIIEGYRTGKGRVVIRARTEIETDESSGRQSIIIQELPYQVNKARLIERIAELVRDKKIEGISGLRDESDKQGMRVVIELKRNEVADVVLNNLFAHTQMQNVFGINMVALVDGQPRTLNLKQILEYFIKHRREVVTRRTIFELKKARSRAHLLEGLGIALANIDEMIALIKQSPTPQDAKSALLSKIWQPGLVKAMLEKAGSNASRPDDLTEEYGLHESGYKLSEAQAQAILELRLHRLTALEQDKIINEFEELLNLIKELLDILASPERLMQVIRDELIEIKSQFGDERRTEITASQEDLTIEDLITEEDVVVTLSHQGYVKYQPITAYQAQRRGGKGKSATHVKDEDFVERLVIASTHDTLLCFSNHGKLYWLKAYQLPQASRASRGRPIINILPLAEGEEINAMLPVREYKDGSYVFMATKKGTVKKVPLNAFSRPRSNGIIAVDLEEDDSLVGVDITDGARDIMLFTDAGKVIRFDESKVRPMGRTARGVRGIRVEKDQAVKSLVVVDPSGGTILTATENGYGKRTHIDEYRVSGRGGQGVISIQVTERNGKVVRSLQVTDNDEAMLITDKGTLVRFKVNELSVIGRNTQGVRLINVSSGEAVVGMQKIVDLGEELEEAEDSSLNAEDSSDE

SEQ ID NO: 61551 - protein, 783 aa, Legionella pneumophila
MATIEIDGKTFEAENGKMIIEVADEAGIYIPRFCYHKKLSVAANCRMCLVEVENGRKPVPACATPITNGMKVFTKSEQAIHSQKVVMEFLLINHPLDCPICDQGGECELQDISMGFGADKSEYTETKRAVDDENLGTLISTEMTRCIHCTRCVRFGEEIAGVRELGATGRGEKTQIGTYVEHSMTSEVSGNIIDLCPVGALTSKPYRFKARAWELTQHDSVAPHDCLGSNVHIHTRNNKLMRVVPRENESINETWLSDRDRFSYLGLNAVSRASKPQIKKNGQWEAVDWETALKFAAEGISRVIKQHGPEQMAAFASSSSTLEEMYLLQKLMRELGVQNLDHRLQQIDFRDQAFLPTTPVSTLPYAEIDHQHSILLIGCNIHREVPLAGTRVRKAFRNGAKIYALNPVDFDYHFDLSGRVIISPLEMPMQLAKLALALTTELASLPEEVQKLLIGLEVDKQTKQIAQSLKEEKACLITGAIVENHPEASLLRTLVAIVQKLSGAKLVRLTTGANSAGACIAGMLPHRTVAGKSIAEPGFNVQEALNSKLKGYLLMGVEPGYDFANPAGARQSMLAAEFVVLLSAYEHESMHDYADVILPIAPYAETSGTYINIDNTWQTVKGAMLPFGESRPAWKVLRVLGNLLHCKKFDYTSTEDILEEVKEAVSMTMEHEYEPYYPESLPVINQSLVRVGEWPLYRIDAITRNAKELQLCAASESACIRIHPSTADRLKLEEIATVSQGDIEITLPLKRDERIAVDVVWVANAMPETVDLGHSFAAITIKR

SEQ ID NO: 61552 - protein, 896 aa, Legionella pneumophila
MLSTLIKKMFGSRNERTLRRMEKSVMAINAFEPKMQALSNEELAGKTQEFKERFNNGESLDELLAEAFATVREVSLRTLGLRHFDVQLIGGMVLHEGNIAEMRTGEGKTLVATLPAYLNAISGRGVHIVTVNDYLAKRDSQWMKPIYEFLGLTVGVIYPDMSHKEKQEAYKADIVYGTNNEYGFDYLRDNMAFSLTDKVQRELNFAIVDEVDSILIDEARTPLIISGAAEDSSELYIKINSLIPQLKKQEEEGDEGDYTIDEKQKQAHLTDAGHLHIEELLTKAKLLDPGESLYHASNIMLMHHVNAALKAHAMFHRDIDYIVKDNQVVIVDEHTGRTMPGRRWSEGLHQAVEAKEGVPIQNENQTLASITFQNFFRMYNKLSGMTGTADTEAYEFQQIYNLEVVVIPTNRSMIRKDEADLVYLTQADKFQAIIEDVRECGVRRQPVLVGTVSIEASEFLSQLLKKENIKHQVLNAKFHEKEAQIIAEAGRPGAVTIATNMAGRGTDIVLGGSLAADLANLPADASEQEKEAVKKEWQKRHDEVIAAGGLRIIGSERHESRRIDNQLRGRAGRQGDPGSSRFYLSLEDNLMRIFASERVASMMRRLGMQPGEPIEHSLVTRAIENAQRKLEGHHFDVRKQLLDYDNVANDQRQVIYTQRSSIMAMTDTQEVVEMMREEVMDSLVDTYIPPQSLEDQWDPQALSDVLSDEFKIKAPVPDWIDKDHSIQPEKIKEKILALAIEHYDEKVRKVGRPVISQFEKSIILQTLDNHWREHLAAMDQLRQGIHLRGYAQKDPKQEYKKEAFSLFTMMLDNLKYEVIRILSSVEIQTEEDAHVVEEQRRADQIRKMNLMHESLSENDEASETQTFRRQEKKIGRNDPCPCGSGKKYKACHGSLV

SEQ ID NO: 61553 - protein, 863 aa, Legionella pneumophila
MPDTTIYLKNYQPPSFTVETVELNFDLYDDHALVNSTLKLTRQNDGALHLYGEELELIALHLNGRPLEHEKYVLTKDALIIEQCPDEIVLNIVTRIKPQENTQLSGLYRSNHLFCTQCEAEGFRRITYYLDRPDVLATFTTRITADKKQYPILLSNGNLMDTGETADGRHWVIWEDPFKKPSYLFALVAGNLACVRDSFVTCSGRIVDLRIYVEPGNEDKCSHAMESLKKAMKWDEEVYGREYDLDIYMIVAVSDFNMGAMENKGLNIFNSKYILARPETATDQDFADVEGVVGHEYFHNWTGNRVTCRDWFQLSLKEGLTVFRDQEFSRDMNSRDVNRIMDVKVLRSAQFPEDAGSMAHPVRPESYQEINNFYTATVYNKGAEVIRMQHTLLGKERFRRGMDLYFKRHDGYAVTIDDFVAAMEDANGVDLTQFKLWYSQAGTPEVRVLSHFSEGRLEITMQQNCPPTPECHEKKPFHIPVRIALFDLKGEMIPIENELLELKEKEQRFIFSGLNEKPVVSLLREFSAPVKIYDDLDQDDLLFLLRYETDGYAKWDAAQRLVLNCLNENLKLPASEWQVSKTLVAAFQHVLLDDSLDMDLRAELLTPPGFEEVAATMKWVDVSKVESVRDYFRQQLGLGLYTEASDLYKELWEVEDHRMHGQAYGRRKLRNVCLWLMMKANESDALELCREQFKASRTMTDQIASCSLLVNCSRESQRNEAIEGFYKQWSHNELVLDKWFAMQAACELPGTLDHVKKLTQHPAFCIKNPNKVRALVGAFCMANPRNFHALDGSGYVFLSEVLIKLDKLNPQIAARLATPFTRWRSYDEPRQKLIQNQLEQLTKLDLSRDLREVVDKSLIVEEK

SEQ ID NO: 61554 - protein, 223 aa, Legionella pneumophila
  MISC_FEATURE (2)..(2): X=any amino acid
GXLGIILGLLLVFRSNRAYERWWEARTLWGQLVNASRNLAIKIRILLSPNADEAKKFSELINTFCEVLAIHLRQKSTRDDFKKFLKMVSLPNHVPSYVAQELYRELSEKTKASKRLNLWLLDNEFSKFMDICGGCERIKNTFISLSFRVFVKHVFIIFILFLPCSLIDTLGVWAIPATIIITYLIIAIEGIARNLEEPFGLTEDHLNLSAITESIRESVNEVL

SEQ ID NO: 61555 - protein, 243 aa, Legionella pneumophila
MRTRIIVNGANGKMGILACETLENHEQFEIVAKLSRQDNLGQSILDTKAQIVVDLTRADCVYENSLTIINHGARPVIGTSGLVETQIDELTKLCEIKQIGGIIAPNFSLGAILMMILATKASEYFSEVEIIEGHHQQKLDAPSGTALKTAEMIAAARKKPKNKLPLKELTPGARGGSHHDINIHSLRLPGLLARQEVLFGNIGETLSITHNSIDRRCFMPGIVLACQKVLNLNNLVYGLEHLL

SEQ ID NO: 61556 - protein, 325 aa, Legionella pneumophila
MIKYILRRILYAIPILFGINLITFALFFMVNSPDDMARMHLGNKHVEQKAIEDWKVVHGYDLPLFYNEKQTGFNQFRQTLFYQKSLMLFTFNFGVSDAGRDISHDISYRMWPSLAIALPTLLFAVLVNIIFAMAMAFFRSTYLDLSGVVICIILMSISSLFYIIGGQYLFGKILKWFPISGYDDGLDALKFTILPVLVAVLGQLGAGARWYRTLVLEEINKDYVKTARAKGLSEQRILFKHILKNAMLPILTGIVVIIPTLFMGSLVLESFFGVPGLGSYIIDAIQQQDFAIVRAMVFLGSVLYIIGLVLTDFSYILVDPRVRLS

SEQ ID NO: 61557 - protein, 382 aa, Legionella pneumophila
MNEVYVFTSESVSEGHPDKIADQISDAILDAILAQDPKARVACEVLVKTGMVLVGGEITTKAWVDVEEITRHVIKDIGYNSSQMGFDWESCAVLSAIGKQSPDIAQGVDNQQTKILGAGDQGLMFGYASRETDVFMPAPIAYAHRLMEKLAKARKSGQLPWLRPDAKCQLTLKYEQGMPVEVDTVVFSTQHSPDIEHKDLVEAIREEIIKSVLPAEWLNDKTRYFINPTGRFVIGGPLGDCGLTGRKIIVDTYGGMARHGGGCFSGKDPSKVDRSAAYAARHVAKNIVAAGLADKCELQISYAIGVAEPTSIFVDTFGTGRLKNSEIIDLIHTHFDLTPQGIIDQHDLLRPIYRQTATYGHYGRESFPWERLDKVAELSKAL

SEQ ID NO: 61558 - protein, 226 aa, Legionella pneumophila
MNSPFQLFGKQFRREILIQVRQIRYLVNSCLFFLMLLFIFPLTLRPELMLMRMFAPGLVWMAILLSMLLSLERLFQQDYEQGVLEQWLVSGQPLNLLVTAKVMAHWLISVTPLLLLSPLIAILFSFNVWETCILLLSLICGTPAILFLCALAAAFGIGINQRGALMALILLPLTLPLLIFGSGTLSVAMQGLPVSGYLALLLAMSLLAVGFLPYAIAAVIRISHID

SEQ ID NO: 61559 - protein, 268 aa, Legionella pneumophila
MGGDTIVGFLTGKKALIVGLASNRSIAYGIAKAFHNQGAELAFTYQNEKLQSRVETMASEFNSTLVFPCDVASDEEIKAVFDNLRNHWDKLDILVHSVAYAPADQISGDFVECANREGFRIAHDISAYSLIGLSQAALPMMLDTQGSILTLSYYGAEKAVPNYNVMGVAKASLEASVRYLAASLGSRGLRINAISAGPIKTLAAAGIKDFRKIHAAYANITPLQRNVTADEVGNTAAFLCSDLASGITGEVLHVDAGYHAVSAMSELG

SEQ ID NO: 61560 - protein, 344 aa, Legionella pneumophila
MDIAELLAFSVKNKSSDLHISAGMPPMIRVDGDLRKINLPPLEHKDVIKIIYDIMNDRQRKEYEEFFETDFSFEIANLARFRVNAFNQSRGAAAVFRTIPSEILSMEDLGLPPIFKEMASFSRGLVLVTGPTGSGKSTTLAAVIDYINSSRYEHILTVEDPIEFVHQSKKCLVNQREVHKDTLSFNAALRSALREDPDIILVGELRDLETIRLAMTAAETGHLVFGTLHTNSATKTINRIIDVFPAEEKSMVRSMLSESLQAVVAQSLLKKNKGGRVAALEIMMCTGAIRNLIREDKIAQMYSSIQTGQAKGMQTLDQHLTELVNKNIISKHTAHEAALNKSLF

SEQ ID NO: 61561 - protein, 377 aa, Legionella pneumophila
  MISC_FEATURE (194)..(194): X=any amino acid
  MISC_FEATURE (196)..(196): X=any amino acid
MLNLIWLGMILISVVVGVIEGRIDEVVRAVTDSAKLGFELALGLAGIMTFWLGIMSVATESGLVSILGKVLKPVLKRLFPDIPVEHPAMGAMVMNIAANMLGLANAATPFGLQAMKELQSLNQNLKVATNSMCTFLAINTSSVQLIPVTAIAFLAANGSTNPSSVVFTSLIATTVSTLVAIVAVKQLAKLPAIXNXKDRQLMNGFANHLSNWLFLTFIVGIPLYAAIKKVNVFDAFIIGAKQGFDVSVKLIPYLVAMMVAIGMLRASGFFSLMSQILSPALTMIGMPSELLPLALIRPFSGSASTGVMAELIHKYGGDSFIAKTAATMMGSTETTFYVIAVYFGSVGIRRTRHAIPAGLLADLAGIIASVLICRYLF

SEQ ID NO: 61562 - protein, 357 aa, Legionella pneumophila
MTTVAQFEITYTQYLNEQGKLVAELPPFADNQSILKELYKIMVLTRTFDKKAIALQRTGKMGTYAPINGQEAISTAIGHALKPEDVLVPYYRDYAAQFQRGVKMSEILAFWGGDERGSHYSNNAEDLPICVPIASQCLHAAGVAFAFKYRNQPRVAVVCIGEGGTSEGDFYEAMNVAGAWKLPVVFVVNNNKWAISVPIEKQTGSQTIAQKAIAAGFSGVQIDGNDIFAARQVIGDAIEKARQGGGPTLIEALTYRLCDHTTADDATRYQPSHEVEEAKAKEPIVRFKHYLMQQNIWTSQDEEKLVIECSETVEKAVEEYLNTKPQPVSSIFDYHYAELPEYLIEQRAIAMEEYSHA

SEQ ID NO: 61563 - protein, 458 aa, Legionella pneumophila
  MISC_FEATURE (14)..(14): X=any amino acid
  MISC_FEATURE (21)..(21): X=any amino acid
  MISC_FEATURE (22)..(22): X=any amino acid
ITFIKLKDWQTLLXVLRYMDXXAIIFWASRSMEDSLPKGLANKNSFIDLRKYPLKGVKKLDDYTFEITLKGQYTQFLFWLAMPFFAPVPWEADLFYSQKDMDDKNLSFGWYPIGTGPFMLTENNPNRSMILEKNPNFREVYFPVNGSDADRRAGYLTNLGRRLPLIDKAVYTLEKESIPRWNKFLQGYYDMSGISADSFDQAIHINRFGEPILSQEMKDKKIYLRQTLEPSIYYTGFNMLDSVVGGNSKRARKLRQAISIAVNFDENIAIFFNGRGIPAQGPIPPGIFGYKEGKEGINPYVYQWVNNARKRKSLKDAQKLMVEAGYPRGIDPKTGKHLILHYDVMTTGGPDDKARLDWMRKQFANIGIDLNIRATLYNRFQEKMRIGHAQIFSWGWNADYPDPENFLFLLYGKNGKVKYGGENASNYENPEFDRLFNLMKNRPNDLQRQKLIDKMLAI

SEQ ID NO: 61564 - protein, 140 aa, Legionella pneumophila
MTASLNRVQLIGNLGADPKSITGKDGQSFVTATLATNESFKKSDEWQTRVEWHQLVLFGKLIKVAEYLKKGSQVYLEGKLRSNQWTDNEGKTHQTLSVVVNHIQLLSHSKSADESSNKTAEHHMAQMREMLQTDSEEIPF

SEQ ID NO: 61565 - protein, 317 aa, Legionella pneumophila
MSDNSWLPSASIQLLRARAELIGKIRQFFTERQYLEVETPVMARHGVTDVYLSNIKAIFRGETCYLQTSPEYHMKRLLAAGSGPIFQLARVFRDDELGRWHNPEFTLLEWYQLHIDHHVLMDEVDLLLQIILKSRPMIRKTYQQAFEEACGIDPFSTSIEQFNKVLAQHDLDGVLSPNEQDRDQYLFLLMSHVVEPFLAEESTPVAVYHFPASQAALAQVKEGLAERFEVYYQGVELANGFHELTDVEAQKKRFMLDQQHRKQKGLTAMEADAYLLKALEYGLPPCSGVALGVDRLLALALKQPSIEKILSFDFSRS

SEQ ID NO: 61566 - protein, 732 aa, Legionella pneumophila
MRIFVMILLFFFSISPTLGDSTLPAIFDVKNANKQFDQINLQLSVQNLNLNNLNKAVETLGELSAQSDECIADIQKKINGVDVLIKQATSTGNDKGADLVYLNNQKHQLAELQSQCRLFSIRAQEAIEAYKSAILQLRQEKTLARTLPLWQLASKIINSSDNTKWINHTKEKFLLQDLPVYLWFCIVAGSFFISILILSKLRQSNVIRRYVKLKKIRWSHITLLALFMMTGSFYGYISLFTAEEQLINSQFLLIKELFWFLCGTLFIVCLFKVKKIKAFFDWYAMDSEFFEILSIVIVAFYFLALSEQRLFDIWEVNKIIVELTRSIFLFLLLGTTAYFTHYFCRSHLHISFVKRHYNFIRYFIFALLSGCAILNINGFYTLAMQLTLSGIFTFFILYITILIGQSINKFYASLSYSQGKLNVIRIFGYKKDQMLTEFYILKVTLKLVIVLLSVYLIGISWGFATDFIDTVYKKLLYGFTLANITIYPTRILFGIIIFCFLYLVSRAISTSISRHQQFENEEETQVAIASILTYVGFSIAVISGLLVAGFNFTGLAIIAGALSVGIGLGLQSIVNNFVSGIILLIEKPIRPGDRINIDGVEGFVKKIRVRSTQILTPVNEDIIIPNSDLITRRVVNYMLTDNYWRVNCEVSVAFGTNLNLVKDILLEIANKHDDVVKSGRNKPVVLFTSFADSALTFQLWCMIKDVNKKSTVKSELNFSIEEAFRKHDISIT

SEQ ID NO: 61567 - protein, 239 aa, Legionella pneumophila
MFILLMFLNFYTFGKPLIIGVPEFAPPFVSRSGGGGETYFGFNIDLMNSICKIIEMECQYKGMNIQQLYTNLNQGKLDIMLAPTPIVSTVGTNYIFSLPYLPSNAQVITLKANNDINSLADLKGKKVGTLKYTLYGSLLAEHFQDYFDLVQFSKLSDMALALSNQKIEAIVLNTNAAKYAMSNSATELKFVGDKMAIGDGYGILALKNNAPLIMKINKALLQIEKDGTYLEIYNTYFGD

SEQ ID NO: 61568 - protein, 432 aa, Legionella pneumophila
MSIAANAGELFRGFSKLSREERFQRLCALGALTHEDITFLKQGGIKDLNLADKLIENVIGYFQLPLGVATNFNIDGRDYVIPLAVEETSIIAALSKSAKWIRQHGEINTWVHGECILGQIQLAKIKDFQRFSDLFNKNRQYFIEIANKDVAANMVKRGGGVTDLQVRHLKRDDGQDMAVIHLTMNSCDAMGANIINQVLEYLKQPIEQITGEEVTMCILSNLNDQKLTTAQVIIRNIDPILGQKLQEASLFAEIDPYRAATHNKGVMNGIDPVLIATGNDWRAVEAGIHAYAARSGQYKAITRWRYQNEILTGELTAPIIVGTVGGVTSLHPTAKMCLRMMDITSANQLSQVIAAVGLVQNLGALKALCTDGIIQGHMKLHIDNLLLVAGANENEMPVLKEKLQEWLNLNKRVSLNNAYDLLAEIRQAPVAV

SEQ ID NO: 61569 - protein, 470 aa, Legionella pneumophila
MTVRTRFAPSPTGFLHVGGVRTALFSWLYAKHHNGQFILRIEDTDRERSTQESVQAILDGMAWLGLNFDEGPYYQTERYARYQQVAQQLLEEGKAYRCQCSKERLEALREAQLAAKEKPRYDGHCRNQSLPDSGIPYVIRFRNPDAGIVSFHDEVYGDIHVDNSELDDLILVRSDGHPTYNFAVVIDDWDMKITHVIRGDDHINNTPRQINLFKALDAPVPVFAHLPMILGEDGKRLSKRHGAVSVLQFKELGVLPHALLNYLVRLGWSHGDQEIFSVQEMITSFDLKNVSRGVSSFNYDKLYWLNQHYQKSDSPESVANALQWHFEQAGIDLNQGPDLKDLVAVQAERCKSLAEMCQISQYFYTDIIEYNEDAVKKHLRPVVLEPLMVLHERLKALDEWKNDKIQECINDVSLQFDLNLGKIAQPLRVAVTGSGTSPSIDMTLALLGKNKSIKRLEDALEKIRARASVV

SEQ ID NO: 61570 - protein, 91 aa, Legionella pneumophila
MNDISWFSLASTVIAAIAIAIGTIGPALAMGRAISHALDALARQPEAEKSITRTLFIGLAMIESLAIYCLVIVLIILFRNPLLSYFVTQQG

SEQ ID NO: 61571 - protein, 617 aa, Legionella pneumophila
MSIVSLNGASLILAGNCILDRADLQIQPQDRIALVGRNGAGKSTLLKILQGELVLDGGQIQRSSGLRIAGLVQEVPSAEGESVYHFLVKSLGETGEVLSQFHEFTKQGDMDKLAKCQQRMDNLNAWHLLPEIETMASRLGIDIHEQMSNLSGGMKRRVLLGAALLAKPDLLLLDEPTNHLDVEAIEWLENYLKSFSGAVIVVTHDREFLSQIATSILEIDRGKLYLHHCNYEAYLDRRESIRLSEQKQNDLFDKRLAEEEAWIRTGIKARRTRNEGRVRALKAMREQYKARRNQLGTVKSLNLDVSRSGALVVEANKVSYTINDKPIIKDFSLLMTRGDKLGIIGPNGCGKTTLVRLLLGEIKPDAGTIKLGTGLQVAYFDQLRRHLLEDQTVMFNVGEGADYVTINGKQKHVASYLKEFLFSSDRFNQPVSSLSGGERNRLLLAKLFAKPVNLLVMDEPTNDLDIETLELLEAVLADYPGTLILISHDRAFINQVVTSVLVYEGNGKFNEFVGGYDDYKKHQLTRNEQQTKSPVSKRSSPEKAKNLSFNEQRELSKLPQQIEAVEKKIEALHSQMASPEFYQQDAKLISEVTQLLAKEEALLNQYFARWEELEEKK

SEQ ID NO: 61572 - protein, 439 aa, Legionella pneumophila
MKHQSNLSGRNVYVVDGSRTPFLKAKGVGPFCGSDLAVAAGTTLLNRQPFSPDELDEVIIGSAMPGPDEANIARVVALRLGCGDKVPAFTVMRNCASGMQALDNAAIQIATGRSNLVLAGGTDAMSHAPLLFNEKMASWLANWFAAKSMGQKLALITKFKPSYLAPVIALLRGLTDPIVGLNMGQTAEKVAYRFNITREQMDEFAAQSHLRIAQAYAENRMSEVAPIIDYKGCIYPQDDGIRADSTVEKLSKLKPFFDKKYGMVTPGNSSQITDGACMLLLASAEAVKKYALPVLGRIVDSQWAALDPSQMGLGPVHAATPILERHNLKPQDLDCWEINEAFAAQVLGCLAAWNDEEYCKTQLGLKEAIGAPSLERLNRDGGAIALGHPIGASGARIVLHVLKSLEQRNESRGMAAICIGGGQGGAMYLERVTEVKGHE

SEQ ID NO: 61573 - protein, 239 aa, Legionella pneumophila
MEVNSVGLRYLTIMGLLILSALLLAGRLGYLYLADAERFPITTIKVAATYEHITHKELENVLAKYLDASFFLLSVKGLQSELNSMSWIDTAYVERVWPDTLKIKLTEKKPVAIWGDALMTRDGKLFNQGSVPSDLDIPKLKGPQSQQLEVLQVYEKLSKILSSYGLNASGLYLRDNQSWVLLLNHSVKIYLGKKELEERLLRFCKAYPAVFAEKADQLAGVDLRYPRGMAVQWKQQMGR

SEQ ID NO: 61574 - protein, 214 aa, Legionella pneumophila
MSRPTRLVIEPSALLHNLSQIKHLAPGKKVIAMVKANAYGCGVREVAPVLDGRIEAFGVACLEEALAIRALGVETPCILFQGVFSSDELSVAVENDFACVLHHAQQLEWLIKTPLPYPIKVWVKVNTGMHRLGFKIHELQKVMGALQTCTWVDKSIGLMTHLACADEPHRPENQQQISLFQEISIPGFRQRSIANSAAIISFPDSQADVVRPGI

SEQ ID NO: 61575 - protein, 627 aa, Legionella pneumophila
MLPVHLKHPHLTATEEYLSEFWSEIAAQTIDWIQPWSITLQGGLHKGDVKWFQGGLLNVSANCLDRHLPHKANQTAIIWEGDDENQNKTLTFAQLYSEVCKMSNVLKSLNVRRGDTVGIYLPMIPEAAIAMLACARIGAIHTVVFAGFSAHALQQRLIASSCKCLITADAFQRGGKTIPLKKQADEASVDLNITKLVVKNSNAPTALNKNKEHWWHELKQTVSDQCTPEPMNTEDPLFILYTSGSTGQPKGVVHTTGGYLVQAAYTHQLIFACQDNEVFWCTADVGWITGHSYVVYGPLCNGITTLMFEGIPTWPDAARNWRIIDKHQVNVFYTAPTAIRSLMRAGDQWLNSSSRSSLRLLGSVGEPINPEAWNWYHQKVGQGKCPIVDTWWQTETGAIMISPRASDEVIKPGSARKPIPGIVPLLLNEQGHEINGAGEGLLAIKYPWPSMARTIAGDHQRYCNTYLSNGYYITGDGAKRDEDGDYWITGRIDDVLNVSGHRLGTAEIESALVSHPKVAEAGVVGIPHDLKGQAIFAYVILKQGNKPDAELQTELMERVKDQISAIAKPDVIQFANDLPKTRSGKIMRRILRKIACKEVSHIDELGDLTTLANPQIVEELMKNILKR

SEQ ID NO: 61576 - protein, 458 aa, Legionella pneumophila
MITRIKLFIASLLVFFIPVADAAQDLTNMPSLAPVLKNAMPAIVNVAVQGYLPNNMASGNADDDDGENSKQPSRIPEKGRKFESIGSGVIIDPKNGIIITNDHVIRNANLITVTLQDGRRLKARLIGGDSETDLAVLKIDAKNLKSLVIGDSDKLEVGDYVVAIGNPFGLNSFGNSQSATFGIVSALKRSDLNIEGVENFIQTDAAINPGNSGGALVNAKGELIGINTAIISPYGGNVGIGFAIPINMAKDVAQQIIKFGSIHRGLMGIFVQHLTPELAQSMGYAEDFQGALVSQVNQNSPAQLAGLKSGDVIVQINDTKITQATQVKTTISLLRAGSTAKIKILRDNKPLTLDVEVTDIKKHEQKLQSNNPFLYGLALRNFEQESPPHGNVVGVQVVGASETSAGWRAGLRPGDIIISANKTPVKDIKSLQAVAHEKGKQLLVQVLRGAGALYLLII

SEQ ID NO: 61577 - protein, 279 aa, Legionella pneumophila
MCSAIDILHKHSSQSRYIYRAPTEKFLAYQISGNEPHVLAEAAAKLQSLGADLIDINCGCPKSKIRKKGAGSALLEDPQKLIAIISRVRAAISIPLTIKIRIQNNEKDLTLAKQIEDAGAHALIVHGRRWTEDYDIPCNWQQIANIKNAVNIPVIVNGDINNIFSLRKALEISACDGFMISRAGTGKPWLYRDLLNLETNDVAFDEKLKLFMLHLEGLSCLENEYKAVLQSKSLVRYYFKKQLNEQQLQQFYQLGSLMEIKDFLAEATHRVSPILVAAS

SEQ ID NO: 61578 - protein, 561 aa, Legionella pneumophila
  MISC_FEATURE (7)..(7): X=any amino acid
KPISLFXLIYFVNFRLFSQLGFRQQHSTASPTLNIKILGINDFHGQISSGRAVKNEPVGGAAVLAAYLKEAQLGMEDRSIITIMGDLVGASPPSSGLLNDEPSILFINGLGNNQCKPESRMDPLCNIVATVGNHEFDKGQKAMFDLIYGTNNPPTDSWISLPNYPGASYPYVSANIVDAKSEQPLFPPYIIKRIHNTPIAFIGAVLKDAADSMFPANAEGVKFLDEADSINHYIPEIKAKGVNVIIVLIHEGGNQIPYEGDTQTTSAVEGHIKEIVYSLGDEIDVVMGGHTHQFLNAFLPNRNGHKILVTQANSYSAAFAEVTLQIDTKNHTVKNKSAKIITTYANRWPGTNPDTQALEIVKLAEDKIGPMINNHVGTAEYDLLRKQNKDGESSLGNLIADAYRTVMNTDLGITNPNGIRDDLKAGEVNWGNIYSILPFSNRIVTITLTGNDIYDLLEQQWMGSYINMLQISGFAYTYDSHQPLGHKIIEIRHQNKPLLREKMYTIATSDFLASGNGVFSVMKRGKIIHIGQSDHDTVIAYIKSLPQPFHASIEARIKESE

SEQ ID NO: 61579 - protein, 222 aa, Legionella pneumophila
MLQVINASKKIGNAQVLNEINLSIQANSIVGLVGPSGSGKTTLLRCIQQLESIDSGSIQCEGKSGFMFQDFQLFPHMTVLNNLIYAPSLHDKTADHIANAWALLAMLGLSDKAHSYPQGLSGGQKQRVALARSLMMKPDLLLCDEPTSGLDMATTNDVIALLNTVKTLKITMLIASHDLFFLSNIAERLLVVKQGQLIADFKTQEVPDPILYLQQFYQGEIL

SEQ ID NO: 61580 - protein, 301 aa, Legionella pneumophila
MITYQEQWQKMQMALAIRRIPQAMLFSGSLHCGLIEFTNQVIKLLLCKIKQNEPCLTCMDCQMIERFEHPDVEWIKPERSGGIIKIDQIRGLQSTAFLTPQRTNHKLIIIESAESMNIAASNALLKILEEPAQHTIFILLAQQIGNIPPTVLSRCQITQFAVFDELPCNNLLALGEYYTQELNSTMVFKHSESILEGLIAIIERREHPCTLAAQWIQHELSAFLWFLYLIYSQLQYMHLFRVAYSGTLTKQLNKLSSLLNPVMIFAQVDKINTLLRKLSHNMNINHTLVLEDLLFSLVVDY

SEQ ID NO: 61581 - protein, 84 aa, Legionella pneumophila
MNEVILYTTGYCPYCIKAKELLDRKKVIYTEIRVDLQPELREEMIQKSGRRTVPQIFINGQAIGGCDDLYALEAQGTLNELLKK

SEQ ID NO: 61582 - protein, 375 aa, Legionella pneumophila
MVAGELSGDLLGAGVIRELKQHLTNVEFMGVGGPQMLKEGFHSLIDISELSVMGISDVLRRYPQLYLIRERLLREWTINPPDVFIGIDYPDFNLSVEARLKKQHIKTIHLVSPKVWAWRQKRVHLIKKAVDLVLTLFPFEEAFYRQHGVSAQFIGHPLADLIEINPSCSTLRKKYNYHSDDTILAVLPGSRVGEIKYMGPLFLEVMQRIAVERPHVHFIVPIACQDLYPVFFKQLHAEYGHLKIQIIQGNAREAMAISDVVLTKSGTATLEAMLLKRPMVVAFKWGILTHAIIAPQVKVPYIALPNLLAGKKLIPEFVQEKANVDSITESVLNLLDSSNQNELIKQFTDIHCTLRQNANEKAALSILRILGTSLT

SEQ ID NO: 61583 - protein, 295 aa, Legionella pneumophila
MHDTSALKKKLDYARFIHLVIMFMVAMLIFLFSTFPEKWWVLITVLSVSAGIEPGLIIRRAKHRIGGTLLALIILIPLLYLLQLNYRLISILFVLAIVGLSVATLNTRRYDISVFFITLVVFFLMAQTEEATSPRGPFEMVLNRGICTLFGVFIVLAGDYFLFQAYRYSHRLYFFHQVIVYDFLNDIVRKIDESNTEKINTLLFVEKLRGQFTEHYLPISISSENLKLDFKTSEHTKKRIDIFQETIWEIRRLVFALCISEFVLHSSTASEQHLQRFKLLMNKARTHFIQFEGRY

SEQ ID NO: 61584 - protein, 98 aa, Legionella pneumophila
MTLSAKDLENISKLAYLNEDSEHSAKLTQEVSAIMDFVDQLKTIDTSQIAPLFHPLALNQRLRPDEVTEAECLAELEAMAPLFEDNLYLVPKVISSDK

SEQ ID NO: 61585 - protein, 180 aa, Legionella pneumophila
MSDSTTIARPYAKAIFEHALAEKKLSEWSEYLTLLAQVVLTPQATQFIANPASTDEQQIELLIEVCGSKFKKNDALNNLIKLLTTNKRLMLLPEIEALYEVYRAEQEKILEVDVVSYSELTPAQQQRLSESLSQRLSRKVSLKISIDPSLLGGALIRAGDLVIDGSVRGKLNMLGTSLAA

SEQ ID NO: 61586 - protein, 44 aa, Legionella pneumophila
MKRTFQPSNLKRKRDHGFRLRMSTRAGRLVIKRRRAKGRKRLSA

SEQ ID NO: 61587 - protein, 936 aa, Legionella pneumophila
MSSSDLQKEWASSYLSGGSMAYVDSLYEDYLADPDSVSEDWRAVFSALPKVNGATKEVSHRDIREYFLQHADKKLNKIIQIADSQQYQVASLINDFRSLGHLAAKLDPLEMTERMPVPRLELAYHNLADVDVNRTFFAGTSFNGPEMTLGEIYNALRETYCRSIGIEYMHISDTEVTEWLQNKMESVRGCPEFSPQEKLNILKDLIAADGLERYLGTRYVGQKRFSLEGGDSLIPMMKELIRRSGINNVKELVIGMAHRGRLNVLVNVLGKEPGLLFQEFEGKIKYERTGDVKYHLGFSSDIKTESGAIVHLALAFNPSHLEIIGPVVEGSVRSRLGRRNDLAKKDKVVPIVIHGDAAFAGQGVVMETFNFSQARGYCTGGTIHIVINNQIGFTTSNPLDARSTLYCTDVAKMVQAPVIHVNGDDPEAVVFATQVAFDFRMKFKRDIVIDLVCYRRHGHNEADEPSVTQPKMYKKIKSMPTLREKYGEQLVSANLLTKSEVDKLVDSYRETLDKGKAVVDLVHEDYEGKQSLDWTPYINAKWTDKVDTTISKEELEKISSQLNKLPDGMKLHPVVERLLAERNKMTAGEIPMNWGYAEIMAYASLLHEGYGVRISGQDSGRGTFAHRHAVLHDIETGDTFIPLEHISTSPKRYFTVIDSVLSEEAVLAFEYGFASSEPSFLVIWEAQFGDFANGAQVVIDQFISSGEQKWGRLCGLVMLLPHGYEGQGPEHSSARLERYMQLCAQHNIQVCTPTTPAQIFHLLRRQVIRNFRKPLIVMTPKSLLRHKLAVSPLEALFKGKFHTVIPEIDALDAQKVTKVVLCCGKVYYDLLQMRRDKNLNHVAIVRIEQLYPFPKKALMAELEKYQKANEVVWCQEEPQNQGVWFSSQHNMRDCLRSDQTLQYAGREFAAAPAVGSPGLHAEQQVALVEQALLGKK

SEQ ID NO: 61588 - protein, 245 aa, Legionella pneumophila
MKLLQLLLFIIISSNSYSLNLTIGTSKFNPPFEVWSGNNSSLYGFDIDLMQEICRRLHATCTFEAYIFDDLFPALKNREVDLVIASMIITDERKKHFIFSLPYMESNSQYITTVDSKISTFDDLHGKKIGVRKGTPYARQVLSENRNNQVIFYELIQDMLLGLSNNQVDASLMDYEAAKYWMASEPYAYKLIGKKYKLIGKKISIGEGYSIMANPDQFVLIKKINKILLEMEADGTYLRLYSEYF

SEQ ID NO: 61589 - protein, 690 aa, Legionella pneumophila
DSLLACLVLLTRYYQNPFSPPSLIARLPLVNSKLSVDMFSRAAARASLDSEVKTIKLEQITDSDIPLVLIKKNGEAVLLILEDDGKKAILDPKQPDSRIDLNQIADELSGEVIFVEQQYKPSTRAHETLSKEQKNWFWKVVIKSWPLYSEVLVASLLVNIFALVVPLFSMNVYDRVVPNHAIETMWVLASGVALVFLFDMLLKSLRSYFIDVANKHSDKELSALIFQQVLGLSMANRPKSVGSLANTVQSFEVFRDFITSTTMTVLVDLPFVFIFLFVIYLIGGVLFWIPFLVLPTIFITGLLLQWPLIRLTRKSYQYGAEKQATLFESLATIETVKTTGAESVLQSRWERIINESSKNSMQLRFVANTSISITNLAQQIATIAIIIAGVYMISEGELTTGGLIACTILTGRALAPMAQVSTLFTRYFQSVNALDSLNKIMQLETDTTEETRYLHRPSLKGAVEFKQVSFHYKEDETKVLQNLNFKINAGERVAIIGRVGSTLGKLILKLYVPNEGTILLDGTDYKQINPDDLRQQIGYVPQDIVLFYGSIRDNICVGAPFINDSALLEAAEIAGVTSFTNNHPKGFDRQVGEKGAELSGGQRQSVALARALIMSPNILLLDEPTSAMDDNNEKQIKKNLNEYLSDNRTLILITHKISMLELVNRIIVLENGKIIADGNKEAVLSALRTG

SEQ ID NO: 61590 - protein, 421 aa, Legionella pneumophila
MSQLIDRRQNAGKKSTVNRQRFLRRYKSQIKKAVSEAVGKRSITEIDQGEQITIPAKDIYEPQFHRGHGGHIERVLPGNDNFIAGDRIKRPGGGGAGGAGGNASDSGEGEDNFVFELSREEFLELYFEDLELPDLVKKELARISTYKTVRAGVTTSGIPNNINVLRSMKQATGRRVALASPYKKRLKEAEEELERLKQLANPDKIDLLKLERDIEFFKKKIQTVPFIDTIDLRYNHRVRVPSPSTQAVMFCVMDVSGSMDEAKKDIAKRFFILLYMFLTKNYEKIELVFIRHHTSAKEVNEEEFFYSRETGGTVVSSALELLNTIIEARYPPQAWNIYVAQASDGDNWNADSPYCQELLQEKIMPLLQYFAYIEIMPRHHQSLWEVYQQVKERYPNFAMENIDNVADIYPVFRELFKRKTV

SEQ ID NO: 61591 - protein, 212 aa, Legionella pneumophila
MSSLTGKLIVIEGLEGAGKSTAVNLVVELLSQKKISTITTREPGGTKIGEILRSIIKNPEYNNVLDDRSELLLLYAARIQLIEQVIKPALNVGQWVIADRFELSTLAYQGGGRKMDMRVINELSNFCLKGFKPDLTLYLDINPELGMIRAKSRGKFDRIEQESIEFFHRIHDTYHILVKQNPEIIMIDANRSLEEVQSSIQSVIEEFIEHNL

SEQ ID NO: 61592 - protein, 328 aa, Legionella pneumophila
MISVVTGATGCLGLNLTRRLIKEGHAVIALGRNLQLGEIISQIGATFVPLDLKDLESLSLISQNADFIFHCAALSSPWGKYKDFYQANVIGTHNVVQATPSQARLVYVSTPSIYFDFTEKHNIKENALLPAKPVNYYVQTKLIAESIVDKAQLQHDLDVITIRPRGIFGPYDRAIFPRLLKAERQGVLPIIGSGNHLIDITFVENVVESLILAALADKCYSGKKYNITNDEPRTFIDIISRMFSALNKPLKTRSIPYNHARFVAKFLEFLHRLLYLKTEPKITEYGVGVLAFGQTLNIEEAKKDLKYKPIYSIDEGIMKFAEWYCSCI

SEQ ID NO: 61593 - protein, 455 aa, Legionella pneumophila
MSQRKYFGTDGIRGHVGLSNINPEFVLKLGWAVGCVLANGARKKVVIGKDTRVSGYMLESALEAGLSAAGVDVALLGPMPTPGIAYLTQTLRANAGIVISASHNLFEDNGIKFFSADGGKLPDSVELAIEAQLEKQLQTVPSAKLGKATRINDAAGRYIEFCKSTIPSLSRLSNLKIVVDCANGATYHIAPNVFSELGADVVPIGIKPDGFNINQECGSTAPELLREKVIAVGADIGIGLDGDGDRVILVDSLGNLVDGDQIIYIIAKDRHQRGVLHGGVVGTLMSNYGLELAITSLGVPFQRSKVGDRYVLETLREKDWKIGGETSGHIVCLDKTTTGDGIVAALQVLSIMVKQNKALHELTAGIQLLPQTLVNLKTNNAALLASNPDVIQAVKNLEKHLNGEGRVLLRPSGTEPLLRVMVEGANASIVKQQAQMLCDDISQIDKKMTESLPST

SEQ ID NO: 61594 - protein, 223 aa, Legionella pneumophila
MLAPEISLLDHLPGYIGWKDLNRNYLGANKALLELKGFRDIEELAGKTDEELSPWATEENKMFQQQDLRVLNGEKIATVHFDSKTSEVFLLEKRPLTDQDQKVTGLIYYCHPYPKNEIFRVLRLFDDKWHLSPHYYTLNDNKNIYGLTDREHECVFLLIRGKSAKEIGALLSLSKRTIESYIENIKNKMDCRNKAEILVKAVLNGYHNYFPARLQQAAIIRSL

SEQ ID NO: 61595 - protein, 282 aa, Legionella pneumophila
MKTKILSIPGLSIACKVWGNPDNPPILALHGWLDNANSFDNIAEHLQNDYYFIAVDLPGHGHSSHLPPGCIYHFTDGIFTVVEIINALGLNKLHLLGHSMGACLGSLVAGVAPDRFLSLSLIEGLGPFSHPAETACQQLSKYLDYLSQKQSKKAKGYNKFEHAALARSVKGYVSLDIAKSLCERGIQQENGLYYWRHDRRLLAPSPLQMTEAQVLSCLTEIKAQTYLIWASKGFSFDSDKMKARIQAVKNIKIERLDGGHHIHMEKPEVISRLLAKFYQSIK

SEQ ID NO: 61596 - protein, 200 aa, Legionella pneumophila
MKKLALVLILCSSSVIFAQENPQEAGQNKSTVCTACHGPQGISTNPEWPNLAGQHEKYFVKQLKDIKEGKSRSAPTMTAIVANMNEQDMDDLAAYYAKMPVAEGSTPEKYLKRGEQLYRGGDLNKHIAACIACHGPKGSGNAQAGFPLLSGQHAAYTIMQLQAFKDGKRTNDLNQIMQDISSKMSPEDMEAVAYYIQGLY

SEQ ID NO: 61597 - protein, 404 aa, Legionella pneumophila
MYPKTKLSFMTLLLLISFASVNAVLFTPALPSITAFFRITEHAAQQTITCFLVGYAIGQLVYGPTANRYGRKKTLYIGIGLQIISSLLCVLAGMISMYPLLVLGRFLLALGSGVGLKMTFTLVNECYEPQLAAQKTSYLMLAFAIAPGLSVALGGILNSHYGWESCFYAGTVYGAILLAMVRQLPETQKNLQLEAFQMKHLLQGYVSQFKNKPLISGGALMGGASCFVYIFAATAPFIAINLLGMSTAEYGAANILPSLGLTLGSIWSAQFAKKYSQRAGIQLGILISGFAALAMMMAALTHHSALIKLFFPMIFIYLGLSFIFANASTFAMSHTSDKAHGSAVMNFINMGLVTVVILGLSLLPMSQYLLPAIYIILCIFMMWLFFSFIKSNEIISSIDRNKES

SEQ ID NO: 61598 - protein, 525 aa, Mycobacterium avium
MAESPPTEVPEPPARPVLVVDFGAQYAQLIARRVREARVFSEVIPHTATIEEIKARQPRALVLSGGPSSVYEPGAPQLDPAVFDLGVPVFGICYGFQAMAQALGGTVAHTGTSEYGRTELKVLGGELHSGLPGVQPVWMSHGDAVTAAPDGFEVVASSPGAVVAAFENRARRLAGVQYHPEVMHTPHGQQVLSRFLHDFAGLGADWTAANIAGVLVEQVRAQIGDGHAICGLSGGVDSAVAAALVQRAIGDRLTCVFVDHGLLRAGERAQVQRDFVAATGANLVTVDAADTFLQALAGVTNPEGKRKIIGRQFIRAFEGAVRDVLGDKPVEFLVQGTLYPDVVESGRGSGTANIKSHHNVGGLPGDLKFTLVEPLRLLFKDEVRAVGRELGLPEEIVARQPFPGPGLGIRIVGEVTATRLDTLRRADSIAREELTAAGLDSLIWQCPVVLLGEVRSVGVQGDNRTYGHPIVLRPVTSEDAMTADWTRVPYEVLERISTRITNEVPEVNRVVLDITSKPPGTIEWE

SEQ ID NO: 61599 - protein, 159 aa, Mycobacterium avium
MNTTPRIGLGVDVHPIQPGRPCRLLGLLFDDADGCAGHSDGDVGAHALCDAVLSAAGLGDVGAVFGVDDPRWAGVSGADMLRHVADLTARHGFRVGNAAVQVIGNRPKVGPRRAEAQRVLSELLGAPVSVAATTTDGLGLTGRGEGLAAIATALVVPTG

SEQ ID NO: 61600 - protein, 733 aa, Mycobacterium avium
TSWFHAAGPVGAWVDTALRTFIGAGVLALPVVTAAVAVTLMRTEPDPDVRPRLILGAGLIALSVLGLRHLWSGSPGDPDARRRAAGFIGFAIGGPLSDGLTPWIAAPLLFIGFMFGLLLLTGTTIRELPVVMRNLFHTRFVEDYTDEDYTDADYTDGDYGDEPYDYAGEFDDATAQPEPEPAAWAPDDDAQAALQDDIPTVPEPAVKTGRGRKRGRAADNSDTIELDRVVEGPYVLPSLSLLVAGDPPKKRSAANNVMADAITEVLNQFKVDAAVTGCTRGPTVTRYEVELGPGVKVEKITALQKNIAYAVATESVRMLAPIPGKSAVGIEVPNTDREMVRLADVLTAPSTRRDHHPLVIGLGKDIEGDFISANLAKMPHLLVAGSTGSGKSSFVNSMLISLLARATPEEVRMILIDPKMVELTPYEGIPHLITPIITQPKKAAAALAWLVEEMEQRYQDMQASRVRHIDDFNAKVRSGEITAPLGSQREYRPYPYVVAIVDELADLMMTAPRDVEDAIVRITQKARAAGIHLVLATQRPSVDVVTGLIKTNVPSRLAFATSSLTDSRVILDQAGAEKLIGMGDGLFLPMGASKPIRLQGAFITDEEIQAVVAACKDQAEPEYTEGVTAVKTSSERADVDPDIGDDMDVFLQAVELVVSSQFGSTSMLQRKLRVGFAKAGRLMDLMETRGIVGPSEGSKAREVLVKPDELAGTLALIRGSGAGSADADGGDPD

SEQ ID NO: 61601 - protein, 199 aa, Mycobacterium avium
MPGQPQTGPMVGRANIANLANTLTLLRLVLVPVFLLALFAGDGHETGFRILAFLIFAFACITDRLDGLLARNYGMATEFGAFVDPIADKTLVGSALIGLSMLGELPWWITVLILAREFGVTVLRLAVIRRGVIPASWGGKLKTVVQVFAIGLFVLPWAGTPGPFRVGAAVVMGAAIVLTVITGIDYVVSTVREVRRTAA

SEQ ID NO: 61602 - protein, 275 aa, Mycobacterium avium
MANPFVKAWKYLMAKFNATIDERADPKVQIQQAIEEAQRTHQALTQQAAQVIGNQRQLEMRLNRQLADVEKLQVNVRQALTLADQATAAGDTAKATEYNNAAEAFAAQLVTAEQSVEDLKTLHDQALNAAAQAKKAVEQNAMVLQQKIAERTKLLSQLEQAKMQEQVSASLQSMSELAAPGNVPSLDEVRDKIERRYANAIGAAELAQGSVQGRMLEVEQAGVQMAGHSRLEQIRASMRGEALPTGGTPAAGGTQATPAPGQGAGDAVSEKPLGQ

SEQ ID NO: 61603 - protein, 336 aa, Mycobacterium avium
MIRGVVALTATVGLLLTGCVSRTTTSGPTPPPAAVPLSELSGLTLQVGDQKGGTEALLRAAGQLDNLPYRVAFSTFTSGPPQVEAATAGKIDFAITGNTPPIFGAASNARIKAVSAYGGGGAGNRILVHADSPITSVSDLRGKAIAVAKGSSSHANLLAQLDRAAIKPADVKFVYLQPADALSAFSQHQADAWAIWDPYTAQAEQQIPVRSIAEAQGVTNGDWIGVASDQALADPKRNTALGDLLVRFETAVRWARAHPQQWAQSYAAAVGLDPQVAAVSQARSLRLPTELGDDVVASEQKLADLFAAAGQLQSAPRFANWVDRRFNAALRPGLVS

SEQ ID NO: 61604 - protein, 70 aa, Mycobacterium avium
MTAEYCDPLDLRADSRLGVAGLVEAQHRGTVTVVNTLGSGILENPGLQRFLPAMARHLLSETLLLPSAPV

SEQ ID NO: 61605 - protein, 863 aa, Mycobacterium avium
MALPNLTREQAVERAALVTVAGYRIDLDLTDGNGAPGERTFRSITTVVFDALAGADTVIDIAADTVRSATLNGRDIDVSGYDESTGIPLQGLADRNVVVVDADCRYSNTGEGLHRFVDPVDDEVYLYSQFETADAKRMFACFDQPDLKATFDVRVTAPRHWKVISNSAAVSVNDAAQHRVHTFATTPRMSTYLVALIAGPYAEWKDSYVDEHGEIPLGIYCRASLAQYMDAERLFTQTKQGFGFYHKNFGMPYAFGKYDQLFVPEFNAGAMENAGAVTLLEDYVFRSKVTRASYERRAETVLHEMAHMWFGDLVTMAWWDDLWLNESFATFASVLCQSEATEFTEAWTTFATVEKSWAYRQDQLPSTHPIAADIPDLAAVEVNFDGITYAKGASVLKQLVAYVGLEHFLAGLRDYFRAHAFGNATFDDLVAALEKASGRDLSDWGRQWLKTTGLNTLRPDFDVDDRGRFTRFAVTQSGAAPGAGETRVHRLVIGIYDDDGSGKLVRVHRAELDVEGPVTEVPALVGVSRGKLVLVNDDDLTYCSVRLDAESLGTALDRIADIAEPLPRSLVWSAAWEMTREAELRARDFVALVAGGVQGETEVGVAQRLLLQAQTALSSYAEPEWARDHGWPQFADRLLELARAAETGSDHQLAFVNALCSSLLSTRHVVTLADLLDHDPAELGLAGLEIDTDLRWRIVTALAAAGEIDADGPATPFIDAEVQRDPTAAGKRHAAQAAAARPQLPVKEQAWTTVVEDDTLANITARSMIAGIAQPGQHELLKPFTPRYFEAIPGVWARRSSEVAQTVVVGLYPAWDISDEGIAAADRFLSDPQVPAALRRLVLEGQAGVKRALRARRFDATAD

SEQ ID NO: 61606 - protein, 268 aa, Mycobacterium avium
MRLGRIASPDGVAFVSIEGELDNPAEMIAREIAEHPFGTPNFTGRSWPLADVRLLAPILASKVVCVGKNYADHIAEMGEATGPVPADPVIFLKPNTAIIGPNVPIRLPANASPVHFEGELAVVIGRPCKDVSAAQAAENILGYTIGNDVSARDQQRSDGQWTRAKGHDTFCPVGPWIVTDLNPLDPGDLELRTEVNGEVKQRSRTSLLIHDIGSIVEWISAVMTLLPGDLILTGTPAGVGPIEDGDTVSITIEGIGTLTNPVVRKGKS

SEQ ID NO: 61607 - protein, 149 aa, Mycobacterium avium
MLGVERVGVDDSFFDLGGDSILSMQVVARARAAGVMCTARDVFVEQTVARLARVFTRWPPPTGELGRGRRGESGPVQPPPDHCAGCRTSTAPIDEFNQTMVLAAPAGVSQSDRGGGAAGAAGSASDAAAVPRRRRRRRLGPARAAPRFG

SEQ ID NO: 61608 - protein, 436 aa, Mycobacterium avium
MTGWSELLGAVALIALGGLFAAIDAAISTVSLARVQELVRDERPGAVALSKVMSERPRYINLVVLLRITCEITATVLLVVFLYDNFGLRWGLFGAAAIMVVTSFVVMGVGPRTLGRQNAYSIALTTVLPLQVISWLLMPISRLLVVLGNAVTPGRGLRNGPFASEIELREVVDLAQQRGVVAAEERRMIQSVFELGDTPAREVMVPRTEMIWIESDKSASQAINLAVRSGHSRIPVIGENVDDIVGVVYLKDLVQQALLPGGSGRATPVSQVMRPAVFVPDSKPLDALLREMQRDRNHMALLVDEYGAIAGLVSIEDVLEEIVGEIADEYDQAETAPIEDLGDKRFRVSARLPIEDLGELYGVEFDDDLDVDTVGGLLALELGRVPLPGAEVISHGLRLHAEGGTDHRGRVRVGTVLLSPVESDGSPDGEEPEHHD

SEQ ID NO: 61609 - protein, 97 aa, Mycobacterium avium
  MISC_FEATURE (11)..(11): X=any amino acid
  MISC_FEATURE (18)..(18): X=any amino acid
DDRIALIANEXVVPDFPXAQVDRPLAVSLPTRQCTIDKVTALKQVLARHPGTSQVHLRLISGDRITTLELDASLRVTPSPALMGDLKELLGPGCLGG

SEQ ID NO: 61610 - protein, 400 aa, Mycobacterium avium
MPPVGSDSPLDSVEDVVRRRGADLVELSHAIHAEPELAFAEHRSCAKAQALVAERGFEITAAAGGLDTAFRADFGSGQLTIGVCAEYDALPEIGHACGHNIIAASAVGTALALAEVADDLGLRVALVGTPAEEAGGGKALLLKAGVFDDISAAVMLHPGPADIAAARSLALSEAIVRYRGKESHAAVAPHLGVNALDAVTVAQVAVGLLRQQLAPGQLVHGIVTDGGQAVNVIPGHASLQYAMRAVESDSLRELEGRMYACFAAGAMAAGCEYEIDNPAPAYDELKPDAWLANIFREEMCRLGRQPVAPEYEAALPMGSTDMGNVTQALPGIHPVVGVESGGAMVHQRAFADAAAGPSADRAVIEGAIMLARTVVALAQTPAERDRVLAAHERRRGGAHP

SEQ ID NO: 61611 - protein, 526 aa, Mycobacterium avium
MTPEEWIAHDPDPRTAAELAACDAAELAARFARPLRFGTAGLRGPVRGGPDAMNVAVVSRASWALAQVLKRRGPAGARVIVGRDARHGSAVFATVAAEVIAAQGFSVLLLPGPAPTPVVAFAVRHTGAAAGVQITASHNPPTDNGYKVYDGGGIQIVSPTDHQIEAAMADAPPADEIRRTPVPPAHTDLVQRYIERAAGVRRGTGSVRVALTALHGVGGTVAVDALHRAGFGRIHTVASQFAPDPDFPTVAFPNPEEPGATDALLTLAADVDADVAIALDPDADRCAVGIPDASGWRMLSGDETGWLLGDYLLSQPQRADRPVVASTVVSSRMLSAIAARHGAVHVETLTGFKWLARADAEVPGGTLVYAYEEAIGHCVDPAAVRDKDGISAAVLVCDLVAALIARGGSVSGRLDELARRHGVHDVAAVSRRVGTDGAAELMRRLRTSPPETLAGFGVALTDITDALIFTGGDDDTSVRLVVRPSGTEPKVKCYLEIRCAPSDDLASSRRRARALRELLVATVRSW

SEQ ID NO: 61612 - protein, 257 aa, Mycobacterium avium
MDVCVIDHPLAAARLTVLRDERTDTAGFRAALRDLTLMLVYEASRDAPRKSVRIRTPVAAAAGTRLVNPPLLVPVLRAGLGMVDPAQAALPEAEVGFVGVARDEQTHRPVPYLAALPDKLAGRSVMVLDPMLATGGSMAHTLGLLQRRGATDITVLCVVAAPEGLAAVGETAPDARVFTAAVDKGLNKAAYIVPGLGDAGDRQFGPNLFTSSAPSRPEAPAGRGRAAAKMPGRRSARSESPSSTSPSARSRKAAPPA

SEQ ID NO: 61613 - protein, 248 aa, Mycobacterium avium
MITEPATAFSRVFRGYDPAAVDAYVEALLAKQKLLIDEVQNLRAQRNESGDQLAALRIEVACLKDEVAHLSDTSPTPYAIQHRMTKMLRRTLEEISRMQAEAQAEAESMIAAAAAQVEASHREHQELLADMAAQREALETEREEAKKELEAELATMRAEARASIDEARREAERECARLLAEAKQKADDLDERARRTVEEANQQRIMILEELMDVARDLQGLPASLESAYQERTSPSEASVVVPLDPLN

SEQ ID NO: 61614 - protein, 1265 aa, Mycobacterium avium
MSRSGLVWTGGSTPPVTTESVPSSRRDAIDQEEYFLTATPHVGGVLEELLERSGRFFTPGEFSADLRTVTRQGGREADVFYRDRWSHDKVVRSTHGVNCTGSCSWKIYVKDGIITWETQQTDYPSVGPDRPEYEPRGCPRGASFSWYSYSPTRVRYPYARGVLVEMYREAKARLGDPVLAWADIQADPERRRRYQRARGKGGLVRITWAEATELIAAAHVHTIKTYGPDRVAGFSPIPAMSMVSYTAGSRFFELIGAPMTSFYDWYADLPVASPQVFGDQTDVPESGDWWDAAYLMMWGSNVPITRTPDAHWMAEARYRGTKVVTVSPDYADNTKFADEWMPCAAGTDGALAMAMGHVILSECYVQKQVPFFTDYARRYTDLPFLIKLEERGDMLVPGKNLTAADLGEAVENAALKPALLDETTNSVAVPHGSLGFRYGESGVGKWNLDLGDLVPALSVRAAPTEDGETALVHLPSFDTVDGEGTTVARGVPVRRVGKHLVCTVFDLMLAQYGVARPGLPGEWPTGYDDATQQNTPAWQEAITGVSAAQATRVAREFARSAEESGGRSMIIMGGGICHWFHSDAIYRAVLALLMLTGSMGRNGGGWAHYVGQEKVRPLTGFQTMAMATDWVRPPRQVPGASYWYAHTDQWRYDGYGADKLASPVGRGRFAGRHTMDLLASAVAMGWSPYYPQFDRSSLDVADEARAAGRDVADYVAEQLGRRNLKLAVTDPDNPVNWPRVLTVWRANLIGSSGKGGEYFLRHLLGTDSNASAVPPEDGVRPVDVTCGADIPEGKLDLMMSIDFRMTSTTLVSDVVLPAATWYEKADISSTDMHPYVHAFSAATDPPWETRSDFDAFGAIARAFSTMAKEHLGTRTDVVLTALQHDTPDAMAYPDGAEHDWLRSGATPVPGRTMGKLTVVERDYAAVYDKWRTLGPLVDKFGLTTKGVTVHPFREVEELAARFGVLKSGVAAGRPAITTAARMADVLLLLSGTTNGRLAVEGFHELEKRTGQRLVHLAEGSEDKRISYADTQARPVPVVTSPEWSGSETGGRRYAPFTINIENLKPFHTLTGRMHFYLAHDWVEELGEHLPVFRPPLDMARLFGQPRLGACEDGIGLTVRYLTPHSKWSFHSTYQDNLYMLSLSRGGPTMWMSPGDAAKIQVRDNDWVEAVNANGIYVCRAIVSHRMPDGVVYVYHVQERTVDTPRTETNDKRGGNHNALTRVRIKPSHLAGGYAQHAFAFNYLGPTGNQRDEVTIVRRRSQEVVY

SEQ ID NO: 61615 - protein, 146 aa, Mycobacterium avium
MKVMAQLAMVMNLDKCIGCHTCSVTCKQAWTNRSGTEYVWFNNVETRPGQGYPRTYEDQERWRGGWIRDKRGRLRLRDGGRFQKLLRIFANPKLPVIGDYYEPWTYEYENLTTAPAGDTFPTAAPKSLISGEPMKVSWGPNWDDNL

SEQ ID NO: 61616 - protein, 379 aa, Mycobacterium avium
MTLSEEQDAQGGLEQTSRVDRVASLTGVRAVAALLVVGTHAAYTTGKYTHGYWGLVGSRMEIGVPIFFVLSGYLLFRPWVKSAATGGPPPSLSRYVWHRVRRIMPPYVITVLFAYVLYHFREAGPNPGHSWLGLARNLTLTQIYCNGYLGKYLHQGLTQMWSLAVEASFYVILPLLAYLLLVLVCRRQWQPKLVLGALAGLALVSPAWLVLVHTDHWFPDGARLWLPTYLAWFLAGMMLTVLQEMGARAYGFVAIPLAVVSYFIVSTPIAGAPTTSPATLSEALFKACFYAVIAALAVAPLALGDHGWYSRLLASRPMVWLGEISYEIFLIHLITMEFAMDYIVGARVYTGSMLNLFVATLVLTIPLAWLLHRFTRVRD

SEQ ID NO: 61617 - protein, 566 aa, Mycobacterium avium
MTLPDSSTEAASPTFADLQIHPSVLRAIADVGYETPTGIQAATIPALMAGSDVVGLAQTGTGKTAAFAIPILSKIDVASTATQALVLAPTRELALQVAEAFSRYGAHLPKINVLPIYGGSSYAVQLAGLKRGAHVVVGTPGRVIDHLERGTLDLSHVDYLVLDEADEMLTMGFAEEVDRILSETPEYKQVALFSATMPPAIRKLTAKYLHDPLEVSTKAKTTTAENISQRYIQVAGPRKMDALTRVLEVEPFEAMIVFVRTKQATEEVAERLRARGFSAAAINGDIPQGQRERTVAALKDGGIDILVATDVAARGLDVERISHVLNYDIPHDTESYVHRIGRTGRAGRSGTALLFVSPRERHLLKAIEKATRQPLTEAELPTVEDVNAQRVAKFADSITAALGAPGIDLFRKLVQDYEREHDVPMADIAAALAVQSRDGEEFLMAPEPPRERRERHTERRERTEKPRSTRPLATYRIAVGKRHKIGPGAIVGAIANEGGLHRSDFGHIAIGPDFSLVELPAKLPKSTLKRLEQTRISGVLINLQPDRAAAKARGRDGGKPRRKYGG

SEQ ID NO: 61618 - protein, 298 aa, Mycobacterium avium
MSPPGLVVVDKPAGMTSHDVVGRCRRIFATRRVGHAGTLDPMATGVLVLGVERATKILGLLTAAAKSYSATIRLGQATSTDDAEGDVVRSVDARHLTSQAIEAAVGGLRGDIHQVPSTVSAIKVAGKRAYKLVREGQAVELPARPVRIDRFEVRDLRAAGECVDVDVEVDCSSGTYVRALARDLGAALGVGGHLTALRRTRVGRFGLEQAYGLDELAECPRLSYSLDEACLLIFGRRDLSADEAEAAGNGRALAAAGIDGVYAACAPDGRVIALLRDEGARTRSVVVIRPATMQDGTS

SEQ ID NO: 61619 - protein, 610 aa, Mycobacterium avium
MQAPVVGGVRLPHGNGETIRLARGASLSDFAEKIDANPASLVQALFNLGEMVTATQSVGDETLELLGSEMNYNVQVVSPEDEDRELLESFDLTYGEDEGTEEDLQTRPPVVTVMGHVDHGKTRLLDTIRKANVREAEAGGITQHIGAYQVTVEHDGVERPITFIDTPGHEAFTAMRARGAKATDIAILVVAADDGVMPQTVEAINHAQAADVPIVVAVNKIDVEGADPQKIRGQLTEYGLVPEEFGGDTMFVDISAKQGTNIDQLLEAVLLTADAALDLRANPDMEAQGVAIEAHLDRGRGPVATVLIQRGTLRVGDSIVAGDAYGRVRRMVDEHGDDVEEALPSRPVQVIGFTSVPGAGDNLLVVDEDRIARQIADKRSARKRNALAARSRKRISLEDLDSALKETSQLNLILKGDNAGTVEALEEALMGIQIDDEVALRVIDRGVGGITETNVNLASASDAVIIGFNVRAEGKATELANREGVEIRYYSVIYQAIDEIEKALRGMLKPIYEENQLGRAEIRAIFRSSKVGIIAGCMITSGVVRRNAKARLLRDNVVVSENLTINSLRREKDDVTEVREGFECGMTLGYSDIKEGDVIESYELVQKERT

SEQ ID NO: 61620 - protein, 457 aa, Mycobacterium avium
MPPADSRRRAADSSTGALRAGKVVEAQPHPHAALRRSTLPGGLRVVTEYLPAVRSASVGVWVGVGSRDEGATVAGAAHFLEHLLFKSTPTRTAVDIAQAMDAVGGELNAFTAKEHTCYYAHVLDADLELAVDLVADVVLNGRCAAEDVELERDVVLEEIAMRDDDPEDALGDMFLGALFGDHPVGRPVIGTARSVASMTRTQLHSFHVRRYTPERMVVAVAGNVDHDEVVAMVREHFGPHLVRGRQPIAPRKGAGRVNGRPGLLLGTRDAEQTHVSLGVRTPGRGWQHRWALSVLHTALGGGLSSRLFQEIRELRGLAYSVYSTVDIFADSGALSVYAACQPERFAEVMAVTGGVLESVARDGITESECRIAKGSLRGGLVLGLEDSGSRMSRLGRNELNYGRHRSIEHTLAQIDRVSVDEVNAIARRLLTQRYGAAVLGPYSTKRSLPQQLRAMVR

SEQ ID NO: 61621 - protein, 757 aa, Mycobacterium avium
MSVAEIEEGVFEATATIDNGSFGTRTIRFETGRLAQQAAGAVVAYLDDENMLLSATTASKSPKEHFDFFPLTVDVEERMYAAGRIPGSFFRREGRPSTDAILTCRLIDRPLRPSFVDGLRNEIQVVVTILSLDPNDLYDVLAINAASASTQLGGLPFSGPIGGVRVALIDGTWVAFPTVEQLERAVFDMVVAGRKVDGADGPDVAIMMVEAEATSNVIELIDGGAQAPTETVVAQGLEAAKPFIEVLCTAQQELADKAARPTSDYPTFPDYGDDVYYSVASVATDELSKALTIGGKAERDARTDELKAEVLARLAETYEGREKEVSAAFRSLTKKLVRQRILTDHFRIDGRGITDIRALSAEVAVVPRAHGSALFQRGETQILGVTTLDMVKMAQQIDSLGPETTKRYMHHYNFPPFSTGETGRVGSPKRREIGHGALAERALVPVLPSLEDFPYAIRQVSEALGSNGSTSMGSVCASTLALLNAGVPLKAPVAGIAMGLVSDDIEVEAGDGTKSLERRFVTLTDILGAEDAFGDMDFKVAGTKDFVTALQLDTKLDGIPSQVLAGALSQAKDARLTILEVMAEAIDEPDEMSPYAPRVTTIRVPVDKIGEVIGPKGKIINAITEETGAQISIEDDGTVFVGATDGPSAQAAIDRINAIANPQLPTVGERFLGTVVKTTDFGAFVSLLPGRDGLVHISKLGKGKRIAKVEDVVNVGDKLRVEIADIDKRGKISLVLVEEDNSAPADAPAAAPADATS

SEQ ID NO: 61622 - protein, 89 aa, Mycobacterium avium
MALTAEQKKEILGTYGLHDTDTGSPEAQVALLTKRIADLTEHLKVHKHDHHSRRGLLLLVGRRRRLLKYVAQIDVERYRSLVERLGLRR

SEQ ID NO: 61623 - protein, 324 aa, Mycobacterium avium
MQRWRGQDEIPTDWGRCVLTIGVFDGVHRGHAELIAHAVKAGRARNVPTVLMTFDPHPMEVVYPGSHPAQLTTLTRRAELVEELGIDVFLVMPFTTDFMKLTPDRYVHELLVENLHVVEVVVGENFTFGKKATGNVETLRRAGERFGFAVEAMSLLSEHHSNQTVTFSSTYIRSCVDAGDVVAAMEALGRPHRVEGVVVRGEGRGIQLGFPTANVAPPMYSAIPADGVYAAWFTVLGHGPVTGTVIPGERYQAAVSVGTNPTFSGRTRTVEAFVLDTQADLYGQHVALDFVARIRGQHKFDSVDDLVVAMGQDTERARQLLSAG

SEQ ID NO: 61624 - protein, 183 aa, Mycobacterium avium
MSDVRRTVLPGGTEDMLIRSLPPCERPRERLLTCGVDALTAGELIALVLRNGTKGKSALELASELIAEYGSAQALAGARPEELAMRPGVGPAKAAALVAAFQLSRRSVRSDPSQLRSAEDVATIARGELAGARRERLIVVICDSANHVKKVVTVSEGALARSIVGHVPWSGVRAVACPRVALW

SEQ ID NO: 61625 - protein, 293 aa, Mycobacterium avium
MAPTLRPRRSALYLPGNKPRALEKGKSLPADVLIFDLEDAVGPDAKAESRAAVCEAISSPDYRPREIVVRINGLDTEWHDDDLAAVAGSAADGVLVPKVETAQQVQALDRALDTLGASASLQLWVMMETPRAFLRAEEVASASDRLAGLVVGTNDLVNELHGRHVAGRGPVVPALGLALLGARAAGKVVLDGVFNDITDDAGFRAEAAQGREMGFDGKTLIHPSQIAPANEVFGPSQHELADARKVVSAYQQAQAAGTSVITVDGRMIESLHVRDAQRILALADLISERDAAS

SEQ ID NO: 61626 - protein, 88 aa, Mycobacterium avium
MLLAKLGASCDVAVGFPIAGRGDPALDDLVGFFVNTLVLRVDLSGDPTVGEILARVRQRSLAAYEHQDRALRLAQQIGIRPPDPPARE

SEQ ID NO: 61627 - protein, 232 aa, Mycobacterium avium
MRLAWVLRLTIAASLVAAGGTRTAEASPDVPPVSEAAKAAGFVDIRSVIPDAVLDLRYATSNNFTHTQLYPSDARCLVHQSMAPGLAAAAGALRPQGHLLVFWDCYRPHDVQVKMFSLVPNPAWVARPGAYARSHESGRSVDVTFTTAQQACSSGLHAGGLCLADMGTDFDDFTSRATAFNTQGISADAVANRAALRNAMNYGGLTVYSGEWWHFDGPGAGVDQPILNVPVD

SEQ ID NO: 61628 - protein, 518 aa, Mycobacterium avium
MSPARTAQQWHNPLRDKRDKRLPRIAGPCGMVIFGVTGDLARKKVMPAIYDLANRGLLPPSFSLVGFARRDWSTQDFGKVVYEAVKEHCRTPFRQENWDRLAEGFRFVPGAFDDDEAFGRLAETLDKLDAERGTGGNHAFYLAIPPKSFPVVCEQLHKSGLARPQGDRWSRVVIEKPFGHDLESAQSLNKAVNAVFPEESVFRIDHYLGKETVRNILALRFANQLFDPIWNSHYVDHVQITMAEDIGLGGRAGYYDGIGAARDVIQNHLMQLLALTAMEEPVSFSPLALQAEKIKVLSATHLAHPLDETTSRGQYTAGWQGGEKVVGLLDEEGFAKDSITETFAAITLEVDTRRWAGVPFYLRTGKRLGRRVTEIALVFKRAPHLPFDATMTDELGANAMVIRVQPDEGVTLRFGSKVPGTAMEVRDVNMDFSYGSAFAEESPEAYEQLILDVLLGEPSLFPVNAEVELAWHILDPVLDNWASGGRPEPYEAGTWGPDSAFEMLHRTGREWRGHDTQR

SEQ ID NO: 61629 - protein, 558 aa, Mycobacterium avium
MAEFIYTMKKVRKAHGDKVILDDVTLSFYPGAKIGVVGPNGAGKSSVLRIMAGLDKPNNGEAFLATDATVGILQQEPPLNEEKTVRGNVEEGLGEIKVKLDRFNEVAELMATDYSDELMEEMGRLQEELDHADAWDLDSQLEQAMDALRCPPPDDPVTNLSGGERRRVALCKLLLSKPDLLLLDEPTNHLDAESVQWLEQHLAAYAGAVLAVTHDRYFLDNVAQWILELDRGRAYPYEGNYSTYLEKKADRLAVQGRKDAKLQKRLSEELAWVRSGAKARQAKSKARLQRYEEMAAEAEKTRKLDFEEIQIPVGPRLGNVVVEVEHLDKGYDGRTLIKDLSFTLPRNGIVGVIGPNGVGKTTLFKTIVGLEQPDSGTVKVGETVKLSYVDQARAGIDPKKTVWEVVSDGLDYIEVGQNEVPSRAYVSAFGFKGPDQQKPAGVLSGGERNRLNLALTLKQGGNLILLDEPTNDLDVETLGSLENALVNFPGCAVVISHDRWFLDRTCTHILAWEGDDDNEAKWFWFEGNFGAYEENKIERLGAEAARPHRVTHRKLTRD

SEQ ID NO: 61630 - protein, 415 aa, Mycobacterium avium
MAVHNLKDLLAEGVSGRGVLVRSDLNVPLDSDGEQGRITDPGRITASVPTLSALVEAGAKVVVAAHLGRPKNGPDPALSLAPVAAALGEQLGRHVQLASDVVGTDALARAEGLTDGDVLLLENIRFDARETSKDDAERLALARQLAELVGPTGAFVSDGFGVVHRKQASVYDVATLLPHYAGTLVAEEIAVLEQLTGSTKRPYAVVLGGSKVSDKLGVIESLATKADSIVIGGGMCFTFLAAQGFSVGKSLLETEMVDTCRRLLDTYVDVLRLPVDIVAADRFAADAAPQTVPADAIPDDLMGLDIGPGSVKRFTALLSNAETIFWNGPMGVFEFPAFAAGTKGLAEAIAAATGKGAFSVVGGGDSAAAVRALGIPESGFSHISTGGGASLEYLEGKALPGIEVLGRPQPTGGAA

SEQ ID NO: 61631 - protein, 10421 aa, Mycobacterium avium
MKRGDRAYPVTRGQLDIWLAQQTGHFDVAWQLGVLVRIDGAIDPALLHQAMRHVVGEAESLRASFFEADGQVFQKAVEYSDVDLTFYDLSGSPDPEREVREMAASIQRTPMPLTGPMIKFALFRTGSAEYYWFTTCHHIAIDGMGIALVGRRIAAVYTALASAKPIPPAFFGSLQDLVGGELEYEASAKFLEDKDYWLAHRPGDGTAGHPPRPADDGRDPYSPSPPVQLDESVIGSVKELSKALGVRRSSVLTAACALLVRGWCADGSDEVVLDFPVSRRVDPKSKTHPGMLAGVVPLVLHAPATATFADFCRHVDQRSREALRHQQFPTRTLDGEGDFSGPRQAPNRVVVNFVPARLTLSLADVPATATYTSFGPVGHFGLFFLGFGDQQFLSTVGTGQPLANFDATDLAERLQRILAAMAADPARLLSSLDVLRDPEHAQLEALGNTAVLTRTPGPAVSVPELFATQVARAPQDVALVGEGRSLTYRQLDEASNRLAHLLAGLGAGPGQSVALLFSRSAEAVASILAVLKTGAAYLPIDPAAPETRIGFMLADAKPVAALSTAELAGRLEAHGMTVIDVNDPRIQDRPATALPVAAADGVAYVIYTSGTTGVPKGVAVTHRNVTQLLGSLDAGLPSAGVWSQCHSYAFDVSVWEIFGALLRGGRLVVVPEAVTRAPEELHDVLVNEQVSVLTQTPSAVAMLSPQGLESVSLVVVGEACPAEVVDRWSGGRVMVNAYGPTETTMCVAISAPLAPGMGSPPIGVPVDGAGLFVLDAWLRPVPPGVVGELYVGGAGVAAGYVGRSGLTASRFVACPFGAPGARMYRTGDLVCWRPDGQLDYRGRADEQVKVRGYRIELGEVQAALAGLDDVEQAVVIAREDRPGGKRLVGYITGTADPAEARTALAQRLPVYMVPAAVVALDAIPLTPNGKLDTRALPTPEYSTGEYRAPESPTEEILAGIYAEVLGVDRVGVDESFFELGGDSILSLQVVARARAAGLTCRPRDVFVEQTVARLARVVGSGDGAAEVADEGVGPVPPTPIMRWLQAAERAGGATDQFNQTVLVQAPAGVTETEVAIVLQALVDRHAMLRLRVTDDGADGWSFEVPEAGSVQARDCLRSVDALSDEALLAARARLNPAAGTMLAALWVEATGQLAVIIHHLAVDAVSWWILLEDLNIAWALHRAGQPVELAPAGTSFARWARLLDEHARDPEVVGQLDRWKTVTSTPAALPAPRPDVDTYASAGRLSVELDAETTAMLLGEVPAAFHAGIHDILLIAFGLAWTEFLGEPGAPIGIDVEGHGRHEELGAGIDLSRTVGWFTTKYPVSLDVAGLRWPQVAAGDPALGPVLKRAKEQLRTLPEPLTYGLLRYLNTDVDLAGADPSIAFNYLGRQGAASDSAADGWRISHDMSVLGAAAAVPMPLMHAVELNAGTIDTGAGPHLHAEWTWAPSVLGAEQITRVSRLWFEALAGVCAHVRSGGGGLTPSDIAPARLTQQQIDELQSRHRIADILPLTPLQQGLLFHSSTAQGNDGMDDMYAVQLDFTLTGPLDADRLREAVRTVVHRHPHLAALFCDQYDEPVQIIPADPAVEWRYVELDRTGAADADDPIEQLCAAERAAVGDLAGQPVFRTALVRTGGDRHRFVLTSHHILLDGWSLPILLREIFAGYYGQRLPAAGSYRAFLTWLAERDLDAARRAWGEVLSGFDTPTLVAPEGRLGQGRRGFEKSCVPEQTTRALGELARSCHTTLSTVLQAAWAVVLTSLTGRHDVVFGTPRSRVGQLEVDDAEQMVGLLINTVPVRAEITATTTTAQLLAQLQNSHNDTLEHQHLALSEIHRVTGHDQLFDTLFVYENYPIDSGMTLGADGLAIAEFTNREYNHYPLTVEALPGPELGLHIEFDTDVFDTASIESLVQRLQRVLVAMSTDPARRLSSLDLLDRGERELVLSTMSGAGVSAPIGVAPQLLAAAVAADPDAPAIVDGARELSYRELDEWSTRLARKLIQHGVGPERAVGVAIERCAELVVAWWAVTKAGGVYAPVNLDHPVERVASVLHTVDAVCVLTCGTDEVAGAGPRPILRIDGLDLSGHSTEPITDADRRSPLRADDTAYLIFTSGSTGVPKGVAVSHTGLLGWAAAQRELFGLGADARVLMVASPTFDASVGELLLAAGSGAALIVAPPQVYAGEALTALLHNQRVGTAILTPTVISTLDRGRLDGLHTLVAVGEACLPELVDGWAPGRQMFNGYGPSETTIWVTCARLTAGQPVRIGAPIPGVCARVLDGWLKPVPVGVVGELYLSGPALGHGYLGRVDLTAERFVANPFGGPGERMYRTGDLVRWTPEGTLDYLGRADNQIKLRGQRIELGEIENTLLACPQVTQAAVTVQDSAAGSQLVAYVTLDHGPSDADVRHDTDDGDDVAQWQHLYDDLYGADLAATFGEDFRGWNSSYTGEPIPLQEMAEWRSATVDRIMSLRPRRVLEIGAGSGLLLSQIAPRCDRYVATDFSAVAIDNLARSMEQLQLPWRDRVELLTQPAHVTDGLPPGRFDTIVINSVVQYFPNAGYLADVIDNALELLAPGGSLFIGDVRNHALQGAFQTGIALARGGGADAAEIRQRVRHAMLGETELLLAPEFFTNWADSRPAAAGLDIQLKRGLSDNELNRYRYDVVIHKAPAPVRSVAAAPTWSWTDCTDCAGLRDQLAARRPAVVRVTDIPQAGVIDDVRVEAALAAGLPVADALAAAGSDPAAAVAEELHRVGEATGYRVAVTWGAQPGILSAVFVQDGDQAAEPLTDLYLPPAGARQRARHANDPRANTKIAQVRERLNAWLPEYMVPTHIVALDEFPMTTSGKLDRKALPAPDYQHADRYRAPSTAVEEILVGIYGQVLGLERVGVDDSFFDLGGDSLSAMRLVAAVNASLNTDLGVRTVFEAPTAAELALRVGSEADRPEPLVAGERPAVIPLSFAQTRLWFIDQFQGPSPMYNITVALRLSGRLDADALRAALADVVARHESLRTVFATADGTPQQVVIPADRIGFACDVVDARGWPEDRLREAMSAAARYTFDLSAESPLHTELFARGDDEHVLVVAVHHIAADGWSITPFARDLGVAYASRCVGRDPDWAPLPVQYADYTLWQRAHLGDVDDPGSRIAAQLDFWTDALAGLPERLQLPTDRPYPAVADHRGARLAVDWPAELQQQLRRVAREHNATSFMVVQAAFAALLAKVSASSDVAVGFPIAGRPEPVLDELIGFFVNTLVLRVDLNELGGDPTFAELLAQVRRRSLAAFEHQDVPFELLVERLNPTRSMSHHPLVQVLLGWENFPGEVTAPAAGLALGDLQVTPMPLHTNTARMDLTFSLAERFTESGQRAGIAVTAEYRTDVFDGRTVEGLIERLQRLLTAVTADPQRRLSAVDLLDANEHARLEKWGNTAVLARPATPVSVPTRFAAQAARTPDAVALTCDGRSMTYRELDEAANRLAHFMIHHGAGPGERVALLFPRSAEAIVAILAALKSGAAYLPIDPALPAARVEFMLTDAAPIVAVTTAALAERLHGFDLTVIDVADPAVATQPATAPPVPDPDDVAHIIYTSGTTGVPKGVAVTQYNVAQLFDDLRIGIELSPRQVWTQFHSYAFDFSVWEIWGALLHGGRLVVVPETVSRSPNEFHDLLVREHVTVLTQTPSAVGLLRTDGLDGTALVIGAEPCPPELVDRWAPGRTMVNVYGPTETTMWACKSAPLTAGSGFPPIGAPVTRAAFFVLDDWLRPVPPGVVGELYLAGDGVGVGYWRRPGLTAARFLACPFGEPGTRMYRTGDLVRWRADGQLDYLGRADEQVKVRGYRIELGEIQAALSALDGVEQAVVVAREDNPGDKRLVGYVTGSVAPAKARAALAERLPAYMVPAAVVVLDSLPMTVNGKLDTRALPAPDYRHTGGYRAPESPTEEILAGIYAEVLGVQRVGVDDSFFDLGGDSLTTMRLITAINSALDTDLPVRTVFEAPTIAQLAPRIAQSAGGLAPLVAAERPDVVPLSFAQNRLWFIDQFQGPSPLYNMAAALRLRGRLDAGALGAALADVVARHESLRTVFPSHQGTPRQLVVPAERAEFGWDVIDATDWPADRLDDAVQDVTRHTFDLAAEIPIRAKLFAVSEDEHVLVIVVHHIAADGMSLTPLGVDLSQAYASRCAGHAPGWADLPVQYCDYTLWQRAQFGDLDDPDSRIGTQLAYWQDALAGMPERLALPTDRPYPAVADQRGDSVAVDWPAELQQQVRRVAREHNATSFMVVQAALAVLLSKIGASSDVAVGFPIAGRRDPALDRLVGFFVNTLVLRIDLTGDPSFAELLARVQARSLAAFEHQDVPFEVLVERLNPTRSLTHHPLVQVMLAWQNFAGHDDPAAALALGDLDVTSVPVHDQSARMDLVFSLAERWNPDGEFAGIGGRVEFRTDVFDAATIETLIERLRRVLEAMTGDPGRPLSAVDLLDDAERAYLEEVGNTAILTRPASGRVSVPELFATQVARVPETVALVCDDLSVTYRQLDEASNRLAHRLAAAGAGPGQTVALLFSRSAEAVAAILAVLKTGAAYLPIDPSAPQTRVEFMLGDAEPIAAVTTAELAQRLAGRPVTVVDVDDPGIDTLPDTALPLPDPDGIAYLIYTSGTTGAPKGVAVTHHNVTQLLGSLDAGLPSPGVWSQCHSLAFDVSVWEIFGALLRGGRVVVMPEAVARSPHDLHDALIARHVTVLTQTPSALAMLSPQGLESVSLVLAGEACPPEVVDQWAPGRVMVNGYGPTETSMCVSISAPLTAGSGIPPIGSPVDGAALFVLDESLRPVPPGVVGELYVAGSGVAAGYLGRPSLTAARFVACPFGAPSARMYRTGDLVRWRADGQLDYLGRADEQVKVRGYRIELGEIQAALSALDGVEQAVVVAREDNPGDKRLVGYITGTADPAEARARLGERLPAYMVPAAVLGLDAIPLTPNGKLDARALPAPDYAAGEYRAPQTPTEEILAGIYAEVLGVQRVGVDDSFFDLGGDSISAMRLIAAVNAALNADLPVRTVFEAPTVAALAPRIGEGGSGLEPLTAGERPAVVPLSFAQNRLWFLDQLQGPSPVYNMAAALRLDGPLDTEALGAALGDVVARHESLRTLFAAPEGRPQQVVLPAERADFGWEVVDASGWSADQLDEAIGATARYTFDLAAQIPLRAELFRLHDDRHVLVAVVHHIAADGMSITPLVRDLGAAYARRCAGHAPGWEPLPVQYVDYTLWQRAQFGDLDDPGSRIAAQLAYWQDALAGMPERLALPTDRPYPLVADQRGATVEIDWPAELQQRIGDMARRHNATSFMVIQTALTVLLAKLGANPDVAVGFPIAGRRDPALDDLVGFFVNTLVLRVDAAGDPSFTELLARVRTRSLEAFEHQDVPFEVLVERLNPTRSLTHHPLVQVMLAWQNFAGQDTGPAAGLSLGDVEITPIPVDTHTARMDLTFSVGERWSESGEPGGIGGTVEFRTDVFDPDSIQTLIGRLRRVLEAMTADPTQSVSSVDLLDEREHARLDTLGNRAALTGPPPRFDSLPTLFAEQAARTPDAVALVCGGRRMTYRELDEAANRVAHLLRVRGAGPGHTVALLFSRSAEAIVAILGVLKSGAAYLPIDPALPGERIGFMLADAAPLVAISTAELAPRLHGQHDVPVVDVHDPAIEAAPSSALPPPGADDIAYLIYTSGTTGVPKGVAVSHRNVAQLLTAESGLPREGVWSQWHSLAFDVSVWEIFGAQLHGGRLVVIPESVARSPEDLHALLITEQVSVLSQTPSAAGALSPEGLEDLTLVVAGEACPSELVDRWAPGRTMINAYGPTEATVYAAISAPLRPGALGGVPIGSPVPGGAVFVLDEWLRPVPPGVVGELYVAGAGVACGYWRRGGLTASRFVACPFGAPGARMYRTGDLVRWRGDGQLDYLGRVDEQVKIRGYRIELGEVRAALAWVDGVDQAVVVAREDRPRDKRLVGYITGTADPAAVRAALAERLPAYMVPAAVVTLDAIPLTPNGKLDTRALPAPEYSDADRYRAPDNAVEEILAGIYAQVLGVQRVGVDDSFFDLGGDSISSMQVVTRARAAGLVCKTRDIFVEQTVARLARVAEVADADAAADEGVGEITATPIIRWLQDVESAGGQVDQFNQAMLVRAPAGVTEADVVTVLQALLDRHAMLRLRVERDDATGEWSLQVPEPGSVDAGACLHAVDELSDAAVIEARSRLNPAAGVMLSAVWANATGQLVVIIHHLAVDGVSWRILLQDLNIAWAQHHGGQPVALPAAGTSFARWASRLAGHAHHPDVADRAGAWQAVAATPPALPAVRPDVDTFASAGHLSTELDTETTAMLLGEVPAAFHAGVQDILLIAFALACAEFCGTRGTPIGIDVEGHGRREELGRDIDLSHTVGWFTTKYPVALTVGALDWAQVVAGAPGLGDILKAAKEQLRSLPDPLSYGLLRYLNPGVDLDGDDPPIGFNYLGRQGGATELTADMWRPEPDGWTATRAAAAIPMPLMHTLELNAVTVDSASGPRLHANWTWAPSALDDQQIARLSRLWSQALTGICAHVRAGGGGLTPSDIAPARLTQQQLDQLARQHRIADVLALTPVQQGLLFHANTASGSDDLYAGQLDIAIAGPLDAARLRDAVHAVVHRHPNLVARFCDRYDQAVQIIPAEPAPAWQVVELHGEEQIRQLGADERAAVCADLTESPALRVALVRTATDRHRLLLTNHHIVLDGWSMPILLGEIFAAYYGQRLPAPAPYRGFVDWLAERDLDAARAAWAEVFAGFDTPTLVGPQDPVELGPQQVETFTLPADLTRAVTDLARSCHTTVNTVLQAAFARLLCALTGQRDVVFGTTVSGRPAEVPGADTMVGLLINTVPVRANITATTSTVDLLHQLQGAYNHTLDHQHLALNEIHRITGQDKLFDTLFAYENYPIDAGALSGDQELAVTDITSRESTHYPLTVQAQPGSQLRLQIEYATRVFDDEDIATLIERMRRVLVAMTADPARPLSSIDVLDPAEHQRLHDWGARAVLDRPATRTSIPALFTAQAQRSPQAPAVTFEGRTTTYRELDEASNRLAHLLIGRGVGPGQAVALLLPRSADAIVAILAVLKTGAAYLPIDPALPAARIEFMLDDTAPTAAVTTAALAGPLRGRDLTVVDIGDRALSRQPHTALPAPDPDHVAHIIYTSGTTGVPKGVAVSHHNVTRLFDAQAVGVELSADQVWTQFHSYAFDYSVWEIWGALLHGGRLVVVSDAVARSPMDFHALLVAENVTVLSQTPSAVRMLSPQGLESAALVIGAEPCPPELLDRWAPGRTMVNVYGPTEATIFSTASTPLAAGSGAPPIGSPVPGTALLVLDGWLRPVPAGVVGELYVAGRGVGYGYLRRAGLTASRFVACPFGAPGARMYRTGDLVRWRADGQLDYLGRADEQVKIRGYRIEVGEIRSALAALDGVDEAVVIAREDRPGDKRLVGYITGDADPAEARARLAERLPAYMVPVAVVVLDALPMTVNGKLDLRALPAPEYAAAGYRSPTTPAEEILAGIYAHVLGVQRVGVDDSFFDLGGDSISAMRVIAAINSALDVGVPVRAIFEAPTVAQLAPRIGEDAGRLDPLTAGERPAVVPLSFAQSRLWFLDQLQGPSPVYNMAAALRMHGRLDDRALGAALADVVARHESLRTVFAAPDGTPQQVVLPAERADLGWRVVNARDWSASRLREAIDAAARETFDLATQIPLRATLFRIGEDEHVLVAVVHHIAADGWSLRPLVRDLGVAYASRCAGHAPGWEPLPVQYVDYTLWQRAQFGELADSGSRIAAQLAYWQQALAGMPERLALPTDRPYPQLADQRGAAVDVDWPADLQQQVAGLAREYNSTSFMVVQAALAVLLAKLSASTDVAVGFPIAGRRDPALDDLVGFFVNTLVLRVDLSGDPSFTELLARVRTRSLEAFEHQDVPFEVLVERLNPTRSLTHHPLVQVMLAWQNFAGQDADPGAGLALGDDVRVTSMPLDTQVARMDLTFSLAERWTEDDEPAGIGGRVEFRTDVFDADTIETLIRRLQRVLEAMTADPTQSVSSVDLLDAGEHAHLDRIGNRAALSGPAAQFHSIPTVFAEQAARTPDAVALVYEDRSWTYRELDEAANRLAHRLAGFGVGAGERVALLFSRSAEAIVAILAVLKAGAAYLPIDPALPDERIGFMLADAAPMVAISTAELAPRLHGHHVVVLDVHDPAVDTQPSTPLPPPGADDIAYLIYTSGTTGVPKGVAVSHRNVTQLLTADSGLPREGVWSQWHSLAFDVSVWEIFGALLHGGRLVVIPDSVVRSPDDFHALLVDEQVSVLSQTPSAAGTLSPEGLESTALVVAGEACPAELVDRWAPGRTMINAYGPTEATVYTAISAPLQPGSPAGVPIGFPVPGTGLFVLDESLRPVPPGVVGELYVAGAGVACGYWRRGGLTASRFVACPFGRPGARMYRTGDLVRWRGDGQLDYLGRADEQVKVRGYRIELGEVRSALAALDGVDQAAVVAREDRPGDKRLVGYITGDADPAEARARLGERLPAYMVPAAIVALDAIPLTPNGKLDTRALPAPEYSDAGQYRAPETPVEQTLAAIYAQVLGVQRVGVDDSFFDLGGDSISSMQVVTRAKAAGLAVRTRDIFTEQTVARLARVAGVADEDGGPADEGTGEVTATPIIEWLRGVNGPVDEFNQTMVLQAPAGVTEADVVAVLQALLDRHAMLRLRVDTAADTGEWSLQVPEPGSVDAAQRVHTVDELSDAAIIEARSRLNPAAGVMLSALWVGSTGRLVLIIHHLAVDGVSWRVLLEDLNIAWGQHHNGQPIVLPAGGTSFARWASLLAEHASSPAVVEQADAWRRVAATPPALPPVRPEADTYQSAENLAATLDTETTRTLLGEAPAAFHAGVNDILLIAFALAWAEFLDSADAPIGIDVEGHGRHEELAAGVDLSRTVGWFTTKYPVALTVGALEWEQVTSGAPGLGALVKDAKEQLRALPDPLSYGLLRYVNTDVDLDGADPPIGFNYLGRLGGAAAELSDELWRISRDGSSATATSTAVPMPLMHTVDLNAGTMDTEHGPQLHANWTWAPSALNRDQVTRLSRLWFDALAGICAHVRAGGGGLTPSDIAPARLTPPQIDQLERQHRIADVLPLTPLQQGLLFHANTTRGGDDHLYVVQLDLTLTGPLDRDRLREAMHTVISRHPHLGARFCDQFDEPVQVIPADPTMAWRYLELHANGSESDAQIRRLCAGERAAVYDLAEAPAVRAVLIRTGPDRHRLVLTIHHIVLDGWSVPILLNETFACYTGQRLPAPAPYRRFVTWLAERDLDAARAAWGEALAGFDTPTLVGPPHSLEPGARGVQAFAVSAEITRALGELARAHHTTVSTVLQAAWAQLLVWQTAQHDVAFGTTVSGRPAEVPGADSMVGLMINTVPVRARISAATTTTDLLAELQRGHADTLDHQHLALSEIHRIAGQDKLFDTLFGYENYPLDTSALAVDHELTISDVNLFERNHYPLTMQAALSGDRLGLRVEYDAGIFDAATIEALSRRLERVLIAMTADPARPLSSVDLLDPSERQRLDDIGNRAALAGPPPAPPSIPVLFAARAAQTPDAVAISWDGLSMTYRELDQAANRLAHLLADHGAGPGQSVALLFSRSAHAIVAILAVLKTGAAYLPIDAAAPAARVRFMLADSAAVAAVTTAGLRSRLDGCDVAAIDIEDPRIQTRPSTPLPAPAPHDIAYVIYTSGTTGVPKGVAVTHRNVTQLLEPLDAGLPSPGVWTQSHSYAFDVSVWEIFGALLRGGRLVVVPEAVTRSPKDFHALLVDEEVTVLTQTPSAVAMLSPEGLESVSLVVVGEACPAEVVDRWAPGRVMVNAYGPTETTMCVAISAPLAPGMGSPPIGVPVDGAGLFVLDAWLRPVAPGVVGELYVAGAGVAAGYVGRSGLTASRFVACPFGEPGTRMYRTGDLVCWRPDGQLDYRGRADEQVKVRGYRIELGEVQAALAGLDDVEQAVVIAREDRPGGKRLVGYITGTADPAEARTALAQRLPVYMVPTAVVALDAIPLTPNGKIDTRALPTPEYTGSRYRAPSNAVEETVAGIYAHVLGVERVGADDSFFELGGDSISAMRVITAINASLGVELAVRTLFEAPTVASLSRRAQTDTARGGQAEEIVPVQTLKEGTGAPLFCIHAAGGLSWSYQVLGNHLDCPIIGIQQAEPQHAAPRSIREMAQSYADRIQETYPDGPYHLVGWSFGGVVAHELAIELQRRGCAIARLVLLDAQPGLDGSVTAPDAALAEQHMMEEALRSHLAAADHDQPHAHRQFNQLVREAGAEGMSRHKRLFDVLFGNARNNIERSKIHEPGVFLGDVTIFSAVRDHEDRSAFLAENWRPYVAGDIVIHEIDCTHDEILNADVVDSYGQRLGQLLGAQRRRELTPPQRFGADPGDDEPPVR

SEQ ID NO: 61632 - protein, 295 aa, Mycobacterium avium
MAGRTGVIVTLDGEVHAPDAPLLHADDLAAVRGDGVFETLLVRDGRACLIESHLQRLTQSAALTELPEPDLPRWRSAIEAATRRWCAGGADEGAMRLIYSRGREGGSVPTAYVMVTAVPDRVTAVRRDGLAAITLDRGLPATGVDAMPWLLAGAKTLSYAINMAALRHAARHDAGDVVFVSTDGYVLEGPRSTVVIATDSEAPGGGPCLLTPPPWYPILRGTTQQALFEVARAKGYDCDYRALRVADLFAAQGVWLISSMTLAARVHTLDGRPLPRAPMAAEFAELVDAAIVSDR

SEQ ID NO: 61633 - protein, 537 aa, Mycobacterium avium
KVMAQLAMVMNLDKCIGCHTCSVTCKQAWTNRSGTEYVWFNNVETRPGQGYPRTYEDQERWRGGWIRDKRGRLRLRDGGRFQKLLRIFANPKLPVIGDYYEPWTYEYENLTTAPAGDTFPTAAPKSLISGEPMKVSWGPNWDDNLAGSPEILAEDPILKKVSEEVKLSLEQTFMFYLPRICEHCLNPSCVASCPSGAMYKRSEDGIVLVDQDRCRGWRMCVSGCPYKKVYFNHKTGKAEKCTLCYPRMEVGLPTICSETCVGRLRYLGVVLYDMDRVLEAASVENDTDLYRAQCDILLDPNDTDVIAGARAQGIPDEWIEAAQRSPVYALIHTYRVALPLHPEYRTMPMVWYIPPLSPVVDAVSRDGHDGEDLGNLFGALDALRIPMQYLAELFTAGDTAVVEGVLRRLAAMRSYMRDINLGRETQPHIPHSVGMTEEQIYEMYRLLAIAKYEERYVIPTAFAPQARDLEQMGCSLTGDGGPGMYESEPVAVETFHALKQRGGPTEAEPGSTRPRVNLLNWDGGQVPAGMFPEAQRR

SEQ ID NO: 61634 - protein, 243 aa, Mycobacterium avium
MFSNVLFWDISPYVTLSVLIVGTWWRYRYDKFGWTSRSSQIYESRLLSIASPIFHFGILAVFAGHVMGLFIPPRVTHMLKMSDHLYHMQAVIAGSAAGFATLAGVGLLIYRRFTRPAVSAATTRSDKVMYVVLVLAIVVGLYCDLIGTGPHGGEFHYRYTVGLWFRRIWILQPHGEVMVNAPLDYQLHALIGMVLFTLWPFTRLVHVFSAPVVYLFRPYIVYRSREVAAKDQLVGTAPRRRGW

SEQ ID NO: 61635 - protein, 302 aa, Mycobacterium avium
MAEQLLIGDVTALTGIASGRIRHYEKIGLLHADHLSNGYRVFDVEQVLDLLRIDLMRSLGVGINDIQRLLHGGHSTLADLLDEHRALLIQQRDRLDQLIRALDESCAQSRAAADGTDVSEHLLRQLATTHRDSIGVIGRLSAPLPAPVAAMYADLFDEWDLPVPALFGQMRLPSAASTLLAQLAETPGRQVLFDRLRRLAADVIALGESVSAATELAHNWIEQQLADPLPDDVVTVLRGVQPLLGQDPVIVQGFRAWAGSISPAAARFIEEIARQTARRGLAAVSVIVLPAADRAQTADATP

SEQ ID NO: 61636 - protein, 1160 aa, Mycobacterium avium
MCRACTGLGSVAGAEYADYTLWQRAQLGDVTDSDSPIAAQLAYWEQQLAGLPERLALPTDRPYPPLADYRGASVLVDWPAELQQRVRTVAREHNATSFMVIQAALAVLLAKLSAGNDVAIGFAIAGRDDPALDQLVGFFVNTLVLRVDLAGDPSFTESLAQVRARSLAAYDHQDVPFEVLVERLNPTRSLAHHPLVQVVLAWQNFAREDGVPAGLALGDLQVTPLAADTQVARMDLTFTLGERWTSAGEPAGIGGSVEFRTDVFDPESIQTLIQRLERVLAAMTADPGQRLSSVDLMDTDEHIYLDEIGNREALTQPAARVSIPAMFADQVIRAPQAVATRCAGHSMTYRQLDEASNRLAHLLIEAGAGPGESVALLFNRRAEAVVAVLAVLKTGAAYLPIDPAHPTARIEFMVADAAPIAAITTTELAERLDGCGLPIIDIADPRIDSYPHTALPVPDPDDIAYLIYTSGTTGVPKGVAITHNNVTELLGSLAPDLARPGQVWSQWHSYSFDISGWEIYGALLHGGRLVVVPEEVAASPDDLHALLIDEKVTVLCQTPSAAGTLSPQGLESVTLLVGGEACPSELVERWGPGRVMINEYGPTETTMWVALSAPLTTGSTGSDAVPIGSPVPGAAFFVLDQWLRPVPAGVVGELYVAGTGVGVGYVRRAGLTASRFVACPFGESGTRMYRTGDLVRWGADGQLRYLGRADEQVKIRGYRIELGEIRSALAGLDGIKQAAVIAREDRPGDKRLVGYVTESVTGAADPADIRARLGQRLPAYMVPAAVVVLDALPLTVNGKLNARALPAPEYIEREKYCAPATPTEEAVAGIYAQVLGLERVGVDDSFFDLGGDSLSAMRVIAAINKTLDAGLAVRTLFHAPSVRGLCRQLGQGANEVENQVEIVPVEFLKEGTGAPLFCIHPASGLSWPYHALGNYLGCPIIGIQQSLQRGEAEPASIRDMAKNYADRIQGVDPTGPYNLLGWSFGGVVAHEIAIELQRRGCPVRHLILLDALLVIPSSDALNSDVLVEQALNEVLRFCGIQVPEGDEPLTYERAEKLLRERGIEELPRYKPLLDSIVRNDNTNLALARAHEPGVFDGDVKLFAAAREEGDQNSSSLRSWRPYVTGEISSYPVDCTHQQMMSTESLIQYGQQLKVVLEGGG

SEQ ID NO: 61637 - protein, 809 aa, Mycobacterium avium
MSDRPPAALTVLKLAGFCLLASVVATALLFPVAGGIGLVSNRASEVVANGSAQLLEGEVPAVSTMVDAKGNTIAWLYSQRRFEVPSDKIANTMKLAIVSIEDKRFADHNGVDWKGTLTGLAGYARGDVDTRGGSTIEQQYIKNYQLLVTAKTDAEKRAAVETTPARKLREIRMALTLDKTFTKPEILTRYLNLVSFGNNSFGVQDAAQTYFGINASDLNWQQAALLAGMVQSTSALNPYTNPEGALARRNLVLDTMIENIPQEADALRAAKAAPLGILPQPNELPRGCIAAGDRAYFCDYVQEYLSRAGISKEQVARGGYLIKTTLDPDVQIPVKAAIDKFASPTLPGISSVMSVIQPGKTSHKVMAMASNRTYGLDVDAGQTMRPQPFSLVGDGAGSVFKIFTTAAALDMGMGINATLEVPGRFQAKGMGSGGAKGCPKDTWCVVNAGNYKGSMNVTEALATSPNTAFAKLIQQVGVTRTVDMAIKLGLRSYADPGTARDYNPDSNESLADFVKRQNIGSFTLGPIEVNALELSNVAATLASGGTWCPPNPIDKLIDRKGNEVAVTTETCDQVVPEGLANTMANAMSKDAVGGGTAAGSAGAAGWDLPMSGKTGTTEAHRSSGFVGFTNHYAAANYIYDDSPNPTDLCSAPLRHCGEGDLYGGNEPARTWFTAMKPIATNFGPVQLPPTDPRYVDGAPGSRVPSVAGLDIDAARQRIKEAGFQVADQNNFVNSSAKQGEVVGTTPSGATIPGSIITIQVSNGIPPAPPPPPEGAPPPVGSQVVEIPGLPPITIPLLAPPPPAPGQPPP

SEQ ID NO: 61638 - protein, 229 aa, Mycobacterium avium
MTTTYPEPAVLPAHNVYQPQEDSRLLVDVMHGTGLIPGRRVLDLCTGSGFVAIAAAEMGCASVTAFDKCPHAVRCARENAALAGVDVDVREGSWLAAVDCAPFDVVVSNPPYVPTPPGAVLDELGPVTGPSWAWNAGRDGRLVLDPLCESAPKLLRDGGSLLLVHSALAGVQQSLDSLKWAGMDAKVIASKWIPFGPVMLSRAHWLEDVGLIPRGRREEELIVIRAEKR

SEQ ID NO: 61639 - protein, 210 aa, Mycobacterium avium
MSGCLGSTLQWPRPPQSTADRNPIRYLNDGVSQTQLVREDGTVPRLAFPTPSGRAVFFARPHLQPEEMPDDDYPFLLNTGRLPHQWHTMTKTGKVAKLNKLNPGPFVEIHPDDAARLGIGEHDRVEIASRRGRAVLPAVVSDRVRPGNCFAPFHWNDAFGEYLSINAVTNDAVDPISNQPEFKACAVTLTDALRLHAPIRPSEPALRRAT

SEQ ID NO: 61640 - protein, 536 aa, Mycobacterium avium
MSSPKAVAAGFDHSDLRDRWYREGWYSRRTLVDALEQGSAEHGDTPVVFVVDGVETTSTPAEIFQRSRDVAAGLQALGVGPGDAVAVQLTNRLECAVAYEAVLMCGATLVPIIHIYGPSEVAFILVESGAKALIMPARFRSISYVDRIAEFSAIPTLQHVVVVDAPPGDGYLSWPDLTAGRYRRTSPSADDVAVLIYTSGTTSVPKGVQQSHNSMLAEQQTLPDLVTGDDVVQLVTFPPGHIAGVGSLLRPLISGARSVFVDGWDPPTAVELIHRHRITATAGTPFHLEGLLDLGDTGQKLTTLREFLVGAATVTEELGRRAAAAGINTYRCYGSTEHPTITSARSTDAAPARMGTDGLPMRGVTVRIIGPDGDEQPVGVDGEVVTQGPDQFIGYRDPVLDADAFTADGWFRTGDLGHLDTDGRLTITDRIKDVIIRAGETISSGQVEDVLNAHPAVAEGAVVAAPHHRYGDVVAAVVALKPGAALDLDELRRHFAASGLARQKTPERLAFVESLPRTPMGKIRKAELRKEHFENP

SEQ ID NO: 61641 - protein, 539 aa, Mycobacterium avium
MPRTAHTSVVLLDGSAQLPRETLGNKGYGLNIMRRNGLPVPPAFCITTEICAQWLDDPGTTIDGLSETLTQMIHCLEEQTSRTFGRGPRPLLVSVRSGAALSMPGMMDTVLNLGMNDTVEQALAQTFSARFAMDTRARFADMYRRIVLDGDASAAVPDDPFLQLLGAIEAVFASWNSPRAVAYRKHHGRDDLGGTAVVVQAMVFGNMESNSGTGVLFSRNPITGADEPFGEWLSSGQGEDVVSGTFDARPISVLAEEQPHVYDELVAAARTLERLGSDVQDIEYTVEEGKLWLLQTRAAKRSAQAAVRLALKLRDEGLIDDMETLRRVTPAHIETLLMPSLQPETRLAAPLLAKGLPACPGVVSGRAVTDVYDAIDAAEDGQDVILVRRSTSPDDVQGMIAALGIVTGIGGTTSHAAVVSRELGRPSVVGCGADVTDALAGKLITVDGTEGEVREGILELTAWSEDDSSDLAELTRIALAVSPLRAHTTGDYPPLDAGSDDAVRAALAAGHTDVLSSTPLITMLTAVRLAGTDTRELSR

SEQ ID NO: 61642 - protein, 749 aa, Mycobacterium avium
MLDAVLADLYGPRSLLTEGVLPPELLFGHPGYLRAANGIEIPGRHQLFMHACDVSRRPDGGFAVNADRTQAPSGAGYALADRRVVAHAIPDLYERIAPRPTTPFAQALRLALIDAAPDVAQDPVVVVLSPGIYSETAFDQAYLATLLGFPLVESADLVVRDGMVWMRSLGTLKRVDVVLRRVDAEYCDPLDLRADSRLGVAGLVEAQHRGTVTVVNTLGSGILENPGLQRFLPAMARHLLSETLLLPSAPVYWGGIDTERSHLLANLASLLVKSTVGGKTLVGPALSSRQLAQLAARIETAPWQWIGQELPQFSSAPTDHAGVLSSAGVGIRLFTVAQRGGYAPMIGGIGYLLAAGPAAYTLKSVAAKDVWVRPTERARAEAVGVPAVEPPAKTAAGTWAVSFPRVLSELFWIGRYGERAESMARLLIVTRDRFHVYRHHQHSEESECVPVLMAALGRITGTDTGTGAAAGGDAAETIAVAPSTLWSLTVDPQRPGSLVQSVEGLALAARAVRDQMSNDTWMVLAGVERALALDSEPPDSLAEADALLTAAQTQTLAGMLTLSGVAGESMVRDVGWTMMDIGKRIERGLWLTALLRATLTVVRGAAAEQTILESTLVACESSVSYRRRTAGKVSVAAMAELMLFDAQNPRSLLYQVERLRADLKDLPGASGSSRPERLVDEIGTRLRRSHPAELERISDDGRRTELAELLDSVHAELRSLAEVLTTTQLALPGGMQPLWGPDVRRVMPA

SEQ ID NO: 61643 - protein, 219 aa, Mycobacterium avium
MTGPAFSPQERRAVYRVISERRDMRRFVAGAVVDEQVLARLLAAAHAAPSVGLMQPWRFIRITDAALRRRIHALVEQERPRTAAALGERAQEFLALKVEGILECAELLVVALGDDRDKHVFGRRTLPQMDLASVSCAIQNLWLAARAEGLGMGWVSLFEPRPLAELLGLPDGAEPVAILCLGPVPEFPDRPALELDGWATPRPLAEFVCENRWAQPQLP

SEQ ID NO: 61644 - protein, 583 aa, Mycobacterium avium
MYLKSLTLKGFKSFASPTTLRFEPGITAVVGPNGSGKSNVVDALAWVMGEQGAKTLRGGKMEDVIFAGTSSRAPLGRAEVTVTIDNSDNALPIEYSEVSITRRMFRDGASEYEINGSSCRLMDVQELLSDSGIGREMHVIVGQGKLDEILQSRPEDRRAFIEEAAGVLKHRKRKEKALRKLDAMSANLARLTDLTTELRRQLKPLGRQAEVARRAQTIQADLRDARLRLAADDLVNRRGEREAIFEAEAAMRREHDEASARLAVASEELAAHEKALGELSGRAESVQQTWFALSALAERVAATVRIASERAQHLDLGPVTAGDTDPDALDAEAERVAAAEQQLLAELAAARSRLETARAELAEREREAAEADRAHMAAVRAEADRREGLARLAGQVETMRARVESIDDSVARLSERIEAAAARAQQAKAEFETVQGRVGELDQGEVGLDEHHERTVAALRLADERVAELQAAERDAERKVASLRARIDALAVGLERKDGTAWLTENHSGAGILGPMAKLVKVRSGYEAAVAAVLGSAADALAADGLGAARSALGALKQADGGRAALVLGDWPADPPAPSRPRR

SEQ ID NO: 61645 - protein, 241 aa, Mycobacterium avium
MAHGSTAHEVLAVVFQVREASEPVTKGRHRAKPQLNVLLWQRAKEPQRGAWSLPGGRLRNDEDMTTSVRRQLAEKVDLKELAHLEQLAVFSDPNRVPGTRMIASTFLGLVPSPASPELPPDTRWHPVNCLPPMAFDHGQMVDNARARLIAKLSYTNIGFALAPREFALSTLRDIYGAALGYQVDATNLQRVLARRGVITATGTIAQSGRSGGRPAALYRFTDAALRVTDEFAALRPPGLPG

SEQ ID NO: 61646 - protein, 454 aa, Mycobacterium avium
MSPAPAAVVLAHGLGGSGDLPVPYAYAMVGAAWALTFTFALVAFAWRRPRFDPLKPGRALPAALTAFVDARATRYTAAGLALAVAAWAVAAGVWGPESDANALLGAFYVLLWVGLVAVSLAIGPVWRVISPIRTLYLLARRVVPERLARPRLSYPKRWGYRPAALGLFAFVWMELASPNPAAPSWVTGWLLVYAVLMAGGAWLCGQRWLARADPFGVYSMAVSRLSPFRRNPRTGRIVVGNPLDHLPSLPVRPGVVVLLAVLLGSTAFDSFSSSPTWRGFSDRLTREFAAPPALASSVLRTLGLIVFICVVALTFSLAARATGGVDAQQRRALPGQMAHSLIPIVVGYIFAHYLSYLVERGQQAVFALADPFGRGWNPLGLAHLQVAYVLSMHPPVLAAIKVTCVVTGHIVAVIAAHDKALRLLPAGHQLTGQLAMMLVMVGYTFTGLYLLFGG

SEQ ID NO: 61647 - protein, 389 aa, Mycobacterium avium
MVVYPGVVGVARPLPYFEHLFVQAAIDGRRARTRGHPQEAGEYLVTQAATRPTAETGNDEDILAVARRQVLEGGQGLSRDQVLQVLRLPDDRLDDLLALAHEVRMRWCGPEVEVEGIISLKTGGCPEDCHFCSQSGLFASPVRSARLDIPSLVEAAKQTAKSGATEFCIVAAVRGPDERLLAQVAAGIEAIRNEVEINIACSLGMLTAEQVEQLAEMGVHRYNHNLETARSFFPNVVTTHTWEERWDTLSMVRDAGMEVCCGGILGMGETLEQRAEFAAELAELGPDEVPLNFLNPRPGTPFGDLEVMPATEALKSVAAFRLALPRTMLRFAGGREITLGDLGAKKGILGGINAVIVGNYLTTLGRPAESDLELLDDLQMPLKGLNASL

SEQ ID NO: 61648 - protein, 248 aa, Mycobacterium avium
MFHVKHVGPVEPAAGGPEVPPVAALGAAPESAAALFGPRLATAQRYAEVLGTAGVERGLLGPREVDRIWDRHILNSAAVAGLLGRGDRIIDIGSGAGLPGIPLAIARPDLEVVLLEPLLRRSEFLTEVVDELGLAVEVVRGRAEERPVRNRFGDRDAAVSRAVAALDKLTKWSMPLLRHDGRMLAIKGERAAEEVDRYRRVMTASGAADVRVVTCGANYLRPPATVVSARRAKPPHPKSARTGKAGTR

SEQ ID NO: 61649 - protein, 677 aa, Mycobacterium avium
MAAQKKKAQDEYGASAITVLEGLEAVRKRPGMYIGSTGERGLHHLIWEVVDNSVDEAMAGYADRVDVRILDDGSVEVADNGRGIPVAMHATGAPTVDVVMTQLHAGGKFGGENSGYNVSGGLHGVGVSVVNALSTRLEVNIARDGYEWSQYYDHAVPGTLKQGEATKRTGTTIRFWADPDIFETTEYDFETVARRLQEMAFLNKGLTINLTDERVTNEEVVDEVVSDTADAPKSAQEKAAESAAPHKVKHRTFHYPGGLVDFVKHINRTKNPIHQSIIDFGGKGPGHEVEIAMQWNGGYSESVHTFANTINTHEGGTHEEGFRSALTSVVNKYAKDKKLLKDKDPNLTGDDIREGLAAVISVKVSEPQFEGQTKTKLGNTEVKSFVQKVCNEQLTHWFEANPADAKVIVNKAVSSAQARIAARKARELVRRKSATDLGGLPGKLADCRSTDPRKSELYVVEGDSAGGSAKSGRDSMFQAILPLRGKIINVEKARIDRVLKNTEVQAIITALGTGIHDEFDITKLRYHKIVLMADADVDGQHISTLLLTLLFRFMRPLIEHGHVFLAQPPLYKLKWQRSDPEFAYSDRERDGLLEAGLKAGKKINKDDGIQRYKGLGEMDAKELWETTMDPTVRVLRQVTLDDAAAADELFSILMGEDVDARRSFITRNAKDVRFLDV

SEQ ID NO: 61650 - protein, 839 aa, Mycobacterium avium
MTDTTLPPGGDAADRVEPVDIQQEMQRSYIDYAMSVIVGRALPEVRDGLKPVHRRVLYAMYDSGFRPDRSHAKSARSVAETMGNYHPHGDASIYDTLVRMAQPWSLRYPLVDGQGNFGSPGNDPPAAMRYTEARLTPLAMEMLREIDEETVDFIPNYDGRVQEPTVLPSRFPNLLANGSGGIAVGMATNIPPHNLGELAEAVFWALDNYEADEEATLAAVMERVKGPDFPTSGLIVGTQGIADAYKTGRGSIRMRGVVEVEEDSRGRTSLVITELPYQVNHDNFITSIAEQVRDGKLAGISNIEDQSSDRVGLRIVIELKRDAVAKVVLNNLYKHTQLQTSFGANMLAIVDGVPRTLRLDQLIRHYVDHQLDVIVRRTTYRLRKANERAHILRGLVKALDALDEVIALIRASETVDIARQGLIELLDIDEIQAQAILDMQLRRLAALERQRIIDDLAKIEAEIADLEDILAKPERQRGIVRDELAEIVEKHGDARRTRIVAADGDVSDEDLIAREDVVVTITETGYAKRTKTDLYRSQKRGGKGVQGAGLKQDDIVRHFFVCSTHDWILFFTTQGRVYRAKAYELPEASRTARGQHVANLLAFQPEERIAQVIQIRSYEDAPYLVLATRNGLVKKTKLTDFDSNRSGGIVAINLRDNDELVGAVLCSAEDDLLLVSANGQSIRFSATDEALRPMGRATSGVQGMRFNADDYLLSLNVVREGTYLLVATSGGYAKRTAIEEYPVQGRGGKGVLTVMYDRRRGRLVGALIVDEDSELYAITSGGGVIRTAAGQVRKAARQTKGVRLMNLGEGDTMLAIARNAEEAADETVEESDGAAGSDG

SEQ ID NO: 61651 - protein, 353 aa, Mycobacterium avium
MDLLFDFFSLDFVYYPVSWIMWVWYKLFAAMLGPSNFFAWALSVMFLVFTLRALLYKPFVRQIRTTRQMQELQPQIKALQKKYGKDRQRMALEMQKLQREHGFNPILGCLPMLAQIPVFLGLYHVLRSFNRTTGGFGQPHLSVVQNRLTGNYVFTPTDVGHFLDANLFGAPIGAFMTQRTGLDAFTYFSRPAVIAVGLPVMILAGVATYFNSRASVARQSPEAAANPQTAMMNKLALYVFPLGVVVGGPFLPLAIILYWFANNIWTFGQQHYVFGMIEKEDEAKKQEAIQRRAANAPAPGAKPKRNLKAGAGNGVDADAAQSDAGATEGQAGGGSDAPSRTPRPGARPKKRKR

SEQ ID NO: 61652 - protein, 112 aa, Mycobacterium avium
MTRSTEFDATVKHGTRMAQPDIVVHLRRDSEPDDESAGPRVGLVVGKAVGTAVQRHRVARRLRHVARALLGELEPSDRLVIRALPGSRTASSARLAQELQRCLRRMPAGTGP

SEQ ID NO: 61653 - protein, 509 aa, Mycobacterium avium
MADDPGSSFTTVWNAVVSELNGEPVADGGAANRTTLVTPLTPQQRAWLNLVRPLTIVEGFALLSVPSSFVQNEIERHLRAPITDALSRRLGQQIQLGVRIAPPPDDVEDALIPPAEPFPDTDAALSADDGADGEPVENGEPVTDTQPGWPNYFTERPHAIDPAVAAGTSLNRRYTFDTFVIGASNRFAHAAALAIAEAPARAYNPLFIWGESGLGKTHLLHAAGNYAQRLFPGMRVKYVSTEEFTNDFINSLRDDRKVAFKRSYRDVDVLLVDDIQFIEGKEGIQEEFFHTFNTLHNANKQIVISSDRPPKQLATLEDRLRTRFEWGLITDVQPPELETRIAILRKKAQMERLAVPDDVLELIASSIERNIRELEGALIRVTAFASLNKTPIDKSLAEIVLRDLIADASTMQISAATIMAATAEYFDTTVEELRGPGKTRALAQSRQIAMYLCRELTDLSLPKIGQAFGRDHTTVMYAQRKILSEMAERREVFDHVKELTTRIRQRSKR

SEQ ID NO: 61654 - protein, 399 aa, Mycobacterium avium
MDAATTTAGLSDLKFRLVRESFADAVSWVAKSLPSRPAVPVLSGVLLSGTDEGLTISGFDYEVSAEAQVAAEIASPGSVLVSGRLLSDIVRALPNKPIDFYVDGNRVALNCGSARFSLPTMAVEDYPTLPTLPEETGTLPADLFAEAIGQVAIAAGRDDTLPMLTGIRVEISGDTVVLAATDRFRLAVRELTWSAASPDIEAAVLVPAKTLAEAARTGIDGSDVRLSLGAGAGVGKDGLLGISGNGKRSTTRLLDAEFPKFRQLLPAEHTAVATINVAELTEAIKLVALVADRGAQVRMEFSEGSLRLSAGADDVGRAEEDLAVDFAGEPLTIAFNPTYLTDGLGSVRSERVSFGFTTPGKPALLRPASDDDSPPSGSGPFSALPTDYVYLLMPVRLPG

SEQ ID NO: 61655 - protein, 2539 aa, Mycobacterium avium
PRGPDAPGRRGVASFRMAAKTTSAVSELARCRRTTVNTVLQAAWAQLLMMLTGQHDVAFGTAVSGRPAELPGAESMVGLLINTVPVRARAAAATTIADLLDQLQCAHNDTVEHQHLGLNEIHRVTGQDQLFDTLLVYENYPIDTAALSAADDLTATEFSCHDYNHYPLSLQVVPGDELGLRLEFDTDVFDPAAIDTLADRLRRLLAAMPADPDRPLRSLDLLDSTEHTRLQRWGNRPALSRPATGPSLPELFTAQVANAPHAVALRCAGRSMTYRELDEASTRLAHLLAGHGATPGCFVALLFSRSAEAIVAMLAVLKTGAAYLPIDPALPATRIEFMLGDAAPVVAVSTAGLRARLEAFGLPVVDVAATGAQPGGPLPPPAPDNIAYLLYTSGTTGVPKGVAVTHRNVAQLLESLHASLPGTGVWSQCHSYGFDVSVQEIWGALAGGGRLVVVPESVTSSPDELHALLIAENVTVLSQTPSALAALSPRNLHAALVIGGEPCPAALADRWAPGRVMINAYGPTETTVDAVLSTPLAAGAGAPPLGSPVAGATLFVLDGWLRPVPAGVTGELYIAGAGVAAGYLGRAGLTAARFVACPFGGAGARMYRTGDLVRWDRDGRLHYVARADQQVKIRGHRIELGEIHSALAELDGVEQAAVIAREDRPGEKRIVGYLTGTADPAAIRARLAERLPAYMVPAAVLAIEALPLTPNGKLDARALPAPEYAGGAYRAPSTPTEEIIAGIYTQVLGLHRVGVDDSFFDLGGDSLSAMRVIAAVNAGLDARLSVRVLFEAPTIAQLAARLGEGGHRFAAVVAAERPAVVPLSFAQSRLWFIGQLHGPSPVYNMVAALRLHGPVDIGALGAALHDVVTRHESLRTVFAATDGTPAQVVLPPDRADIGWQVIDASGWSPARVDDVIRDTARHTFDLAAEIPLRAVLLRCGDEEHLLVAVVHHIAADGWSLTPLVRDLARAYASRSAGRVPDWVPLPVQYVDYTLWQRAQFGDLDDPHSLIAGQLRYWESALAGMPERLELPTDRPYPVVADFRGASVAVEWPAQLQQQISRLAGAHNATSFMVVQAALAVLLAKVSASSDVAVGFPIAGRRDPALDDVVGFFVNTLVLRVDVSGDPTVAELLARVRQRSLAAYEHQDVPFEVLVERLNPARSLAHHPLVQVMLAWQNIEPTELSLGQVRVIPLPVDTRTARMDLAWSLAERWTPDGSPAGIGGAVEFRTDVFDTATVEALTQRLRRVLAAMTADPGRRLSSIDLLDPDEHARLDALGNRAALTRPQHPPTSIPAMFAAQVARTPHAVALTANGRSVTYRRLEEHANQLAHQLIRYGAGPGRCVAVLLERSAEAVAAILGVLKAGAAYLPIDPSLPSARIEFMLTDAAPAAVLTSTEFHCRLQEYDQTVIDVDDPSIREQPVTAPPAPAPDNIAYLIYTSGTTGVPKGVAVTHRNATQLFASLGAAGLPAAPGKVWGQCHSLAFDFSVWEIFGALLNGGRVLVVPDDVVRSPEDLCALLIDEHVDVLSQTPSAFDALQRADSARRLNPQTVIFGGEALIPHRLGGWLDGHPARPRLINMYGITETTVHASFREIVDGDIDGNVSPIGMPLAHLGFFVLDGWLRPVPAGVTGELYIAGAGVAAGYLGRPGLTASRFVACPFGGAGERMYRTGDLARWGTDGQLHYLGRADQQVKIRGYRIELGEIQSALAELDGVEQATVIAREDRPGDKRLVGYVTGTADPAQLRTALAERLPAYLVPAAVVAIDAMPLTPNGKLDTGALPAPDYHGADQYHAPASAVEQTLADIYAHVLDVRPPRLVGIDDSFFDLGGDSLSAMRLVAEVNSRLDVHLGVRALFEAPTIRRLAARLGADGSARAPLVAAERPAVVPLSFAQSRLWFIGQLHGPSPVHNMAIALQLHGRLDAAAFGAALADVVGRHESLRTLFPAHEGIPQQLVIEVDEADIGWQVIDASGWSPARLDDVIRDTARHTFDLAAEIPLRAVLLRCGDEEHLLVAVVHHIAADGWSLTPLVRDLARAYASRSAGRVPDWVPLPVQYVDYTLWQRAQFGDLDDPHSLIAGQLRYWESALAGMPERLELPTDRPYPVVADFRGASVAVEWPAQLQQQISRLAGAHNATSFMVVQAALAVLLAKVSASSDVAVGFPIAGRRDPALDDVVGFFVNTLVLRVDVSGDPTVAELLARVRQRSLAAYEHQDVPFEVLVERLNPARSLAHHPLVQVMLAWQNIEPTELSLGQVRVIPLPVDTRTARMDLAWSLAERWTPDGSPAGIGGAVEFRTDVFDTATVEALTQRLRRVLAAMTADPGRRLSSIDLLDPAEHARLDALGNRAVLTRPQHPPTSIPEVFAAHVARTPHAVAVTCGRRSWTYRELDSSANRLAHLLIHHGAGPGDCVALLLERSAEAVAAILGVLKAGAAYLPIDPSLPSARIEFMLTDAAPAAVLTSTEFHCRLQEYDQTVIDVDDPSIREQPVTAPPAPAPDNIAYLIYTSGTTGVPKGVAVTHRNATQLFASLGAAGLPAAPGKVW

SEQ ID NO: 61656 - protein, 172 aa, Mycobacterium avium
MDRPGALDRLRTAVEAFSTAHLGAVERWCVALSGGPDSLALTAVAARLRPTTAVIVDHGLQPDSAAVAQTARAQAIALGCVAAQVISVHVDGEGGPEAAARRARYAALAAHRDGPVLLGHTLDDQAETVLLGLGRGSGVRSIAGMRPHDPPWCRPLLGQRRAVTHAACAELG

SEQ ID NO: 61657 - protein, 461 aa, Mycobacterium avium
MARTRWQKSTPVFIGLGVLAFVAAVVVAATFFTTTGHGAGNAHAPIPAPHAPTVKPGMLPVSDTAELPTGPGVSAALAPVAADPNLGRLGGRITDAITGKELWQVADDMPLVPASTNKVLTAAAALLTLDRQARISTRVVAGSQNAQGPVVLVGAGDPVLSAAPPGQPTWYRGAARISDLVEQIRRSGVTPTAVQVDTSAFSGPTMAQGWDPSDVDNGDIAPIESVMIDAGRIQPTTVNSRRTRTPALDAGRELAKALGLDPNAVTVATAPSGARQLAVVQSAPLVQRLSEMMDHSDNVLAECIAREVAAAINRPRSFAGAADAVTNRLSTAHVDTAGATLMDSSGLSVDDRLTAKTLDGVLQAAAGPDQPALRALLDLLPIAAGSGTLGDRFTDASTNQGPAGWLRAKTGSLTAINALAGVLTDRSGRVLTFAFISNDAGPNGRNAMDALATRLWFCGCS

SEQ ID NO: 61658 - protein, 359 aa, Mycobacterium avium
MRTFGVSLLVTAAALVLGYAYGGPKSLYLLLVLAALEVSLSFDNAVINAAVLKQMSRFWQRMFLTIGILVAVFGMRLLFPLLIVWATAGLDPVRALELALRPPPHGALEFPDGSPSYQKLLTAAHPQIAAFGGIFLLMLFLDFLLIDRDIKWLKWIEVPFARIGRLGQVSVVLSGLTLVLVGTGLTHSSQEAVTVLTAGLLGMVAYLVVNGLSRAFRPSGVGQPQPAGPATGWAGLSLFLYLEVLDAAFSFDGVTGAFAITSDPVVIVLGLGVVGAMFVRSITIYLVHQETLDRYVYLEHGAHWAIGALAVIMLASIEPRLTVPEPVTASVGVFFIGTAVGFSVLRRRRESGRASAPGP

SEQ ID NO: 61659 - protein, 496 aa, Mycobacterium avium
MTAGTIAGLLDECAAGRPDRPLLRDVDGETLTVSQVAGLASAAAGWLTDAGVRPGMTVAWQLPSHVNAAVAMLALARMPVVQAPVLHLYRCREVCAAVDVARADILLVDESTAANAAPGLPTIMVPADLVRRLQTSPATSAEYEALPSAAEPRWVYFTSGTTGRPKAVRHSDATLLSAARGYVAHLGVGSHPREVGTIAFPIAHIGGMVYLATALFGGFPVVLIPKVSAADLPRVLAEHQVTVTGASTAFYQMLLAAQMAAPTTELLVPSLRMLIGGGAPCPPEVHKQVREHLRVPVVHAYGMTEAPMICVSEATDTDEQLANSAGRPIPGSQVRIGANGEIELRGANLTAGYLQHDQWADALTADGWFRSGDRGHLRPDGRIVVTGRTKDLIIRKGENVAPDEIENELLAHPLVDEIAVLGQPDELRGELVCAVVRRSPRHRDVTLDELCTFLDQRGLMKQKWPERLVLVDEFPLTGLGKVAKSELARQIAGGTR

SEQ ID NO: 61660 - protein, 451 aa, Mycobacterium avium
MLMAGTSQLRQGLSQRQLSMIALGGVIGAGLFVGSGVVIKDTGPAAFLTYALCGLLIVLVMRMLGEMAAANPSTGSFADYAAAALGRWAGFSVAWLYWYFWVIVVGFEAVAGGKVLNYWFHAPLWVLSLGLMLLMTATNLFSVSSFGEFEFWFAGIKVATIVIFLVVGAAYVIGLVPGHHDGLTNLVSHGGFFPRGVGAVFAAIVVVIFSMVGAEIVTVAAAESRDPRRAVQKATRSVVTRIGIFFVGSVFLLVAILPWDSVELGASPYVAALKHLGLAGADQVMNAVVLTAVLSCLNSGLYTASRMLFVLAERGEAPARLVRLSGRGVPHIAILCSSAVGFLCVVMARVAPNTVFLFLLNSSGAIILFVYWLIALSQIVLRRRTPAERLSVKMWFFPVLSVLTLAGITAVLVQMAFDATARSQLWLSLLSWAVVVALYFVARSRGRVAAR

SEQ ID NO: 61661 - protein, 219 aa, Mycobacterium avium
MNRLRGCAAVAAAVALAVATAGCAPKPPDYQSILSKTPTTTTTTSATAKPVPLSQYLQSIGVTGQQVAPASLPDLTVSIPTPPGWAPFSSPNISPQTVMISKGGKFPTARLVVFKLSGDFDPAQVIKHGNDDAQLFENFKQLDASGAPYNGFPSSMIQGSYDLDGMRLHSWNRIVIATGSPPAHQRYLVQLTITSLADQAAAESTDIEAIIHGFVVAAK

SEQ ID NO: 61662 - protein, 335 aa, Mycobacterium avium
MKQISATSGPTNIGLLSVGSYRPQRAVTNDELCQNIDSSDEWIYSRTGIKTRRFAARDESTASMATEAGREAIAKAGLEASDIDCVVVATSTHFLQTPACGPAVAAALGATGVPAFDISAGCAGFGYALGVAADMVRGGTAGKVLVLGSEKLSPTVDMTDRSNCFIFADGAAGVVVGETPTQGIGPTVWGSDGTQATAIRQDIDWMDYLDRPTGPRPFLRLEGSAVFRWAAFEMGKVGQQAMDAAGVRPDEIDVFLPHQANSRINEILAKSLELRPDAVIANDIEHTGNTSAASIPLAMAEVLATGAAKAGDLALLIGYGAGLSYAAQVVRLPPG

SEQ ID NO: 61663 - protein, 858 aa, Mycobacterium avium
MMVDVTDVRDHHPKRGELRIYLGAAPGVGKTYSMLGEAHRRLERGTDLVAGVVETHGRAKTAELLEGIEIIPPRYIEYRGGRFPELDVPAVLARHPQVVLVDELAHTNTPGSKNPKRWQDVEELLDAGITVISTVNVQHLESLNDVVAQITGIEQKETVPDSVVRQASQVELIDITPEALRRRLSHGNVYAPDRIDAALSNYFRRGNLTALRELALLWLADQVDTALAKYRAENKITDTWEARERVVVAVTGGPESETLVRRASRIASKSSAELMVVHVIRGDGLAGLSESRMAKIRELASSLDASLHTIVGDEVPAALLEFAREMNATQLVIGTSRRSRWARLFEEGIGPRIVELSGKIDVHLVTHEESKRGFRASSLAPRERRVASWLAALIVPSVICAVTVTWLDPYLDTGGESALFFVGVLLVGLLGGIAPAALSAVLSGLLLNYYLIAPRHSFTIAEPNSAITELVLLLIAVAVAVLVDFAAKRTREARRASQEAELLTLFAGSVLRGADLETLLERVRETYAQRSVSMLRESEDARAGGTKTQVVACVGRDPCVSVDAADTAIEVGGPDSSEFQMLLAGRKLSARDRRVLSAVARQAAGLIRQRELAEEASRTEAIVRADELRRSLLSAVSHDLRTPLAAAKVAVSSLRAEDVAFSPTDTAELLATIEESIDQLTALVGNLLDSSRLAAGAIHPDLRRVYLEEAVQRALVSIGKGATGFFRSAIDRVKVDVGDAMVMADAGLLERVLANLIDNALRYAPNCVVRVNAGQVGDRVLINVIDEGPGIPHGAEEQIFEAFQRLGDHDNTTGVGLGMSVARGFVEAMGGTITATDTPGGGLTVMVDMAAPQSEGAA

SEQ ID NO: 61664 - protein, 159 aa, Mycobacterium avium
MSAKAEYAVRAMIQLATVPDGTLVKTDDLAQAQGIPPQFLVDILTNLRTDRLVRSHRGREGGYELARPGKDISIADVLRCIDGPLASVRDIGLGDLPYSGPTAALTDVWRALRASMRLVLEETTLADVATGSLPKHVAQLADDYRKQESQRHGTARTGD

SEQ ID NO: 61665 - protein, 611 aa, Mycobacterium avium
MSPLLQVTDLAVTFPAGDAPVTAVRGISYRIEPGEVVAMVGESGSGKSVSAMAVMGLLPEHARVRGSVRLHDTELLGLGDDAMSRLRGRAVGMVFQDPMSALTPVYTVGDQIAEAITIHQPRVGRKAARDRAVELLELVGIAQPQRRARAFPHELSGGERQRVVIAIAIANDPDLLICDEPTTALDVTVQAQILEVLKTARDITGAGVLIITHDLGVVAELADRALVMYAGRVVESAAVASLYRDRRMPYTVGLLGSVPRLDAAQGTRLVPIPGAPPSLAGLDPGCPFAPRCPLAIDECRSQEPELLPVGPDHRAACIRTDQVDGRSAADIYGVRTQPHPGEPANSPVVVRVRELSKTYRLTKGVLRRSAGEVRAVDRISFQLRQGRTLGIVGESGSGKSTTLHEILELVAPQSGSIEVLGTDVAALSPASRRSLRRDIQVVFQDPVASLDPRLPVFELLAEPLRANGFDKDHTNARVAELLETVGLRRADAARYPAEFSGGQKQRIGIARALALQPKILALDEPVSALDVSIQAGIINLLLDLQAQFQLSYLFVSHDLSVVKHLAHDVAVMYAGSIVEQGDSSQVFGNPQHEYTRRLLDAVPQPNPGSRG

SEQ ID NO: 61666 - protein, 383 aa, Mycobacterium avium
MRFLHTADWQLGMTRHFLAGDAQPRYSAARRDAVAGLGALAAEVGAEFVVVSGDVFEHNQLPPKVVGQSLEAMRAIGIPVYLLPGNHDPLDASSVYTSALFTAERPHNVTVLDQAGVHPVRPGLQLVAAPWRSKVPTTDLVGEVLDGLPETDDTRILVGHGGVDVLDPDRDKPSLIRLAKLEDALTRGAVHYVALGDKHSLTQVGRSGRVWYSGSPEVTNFDDVEADPGHVLIVDIDEADPRRPVSVTARRVGCWRFVTLHRQVDSSRDIADLDMNLDLMTNKDRTVVRLALTGSLTVTDRAALDACLDKYARLFAHLRTWDSHTELAVIPADGEFSDLGIGGFAAAAVEELVATARQQDSDTAADAQGALALLLRLADRGAA

SEQ ID NO: 61667 - protein, 154 aa, Mycobacterium avium
MFKLMFVSPRIAPNTGNAIRTAAATGCELHLVEPMGFDLSEPKLRRAGLDYHDLASVTVHASLAAAWDALTPARVVAFTSHAPASFAELRYRPGDVLMFGPEPTGLDAATLADPHVTTQVRIPMLAGRRSLNLSNAAAIAVYEAWRQHGYAGAT

SEQ ID NO: 61668 - protein, 185 aa, Mycobacterium avium
MTAWVDREFERHDFTDEDLVGLSTERVVFTECNFSGANLAESRHRASAFRNCTFRRTSLWHSTFEQCTMLGSVFEQCRLRPVTFDEVDFTLAVLGGNDLRGVDLSGCRLRVTSLVEADLRKAVLRGADLRGARTTGTRLDDADLCGGAADPALWTTASLAGARVDVDQAVAFALAHGLRLDGGDG

SEQ ID NO: 61669 - protein, 779 aa, Mycobacterium avium
MELDAQALPLTRGQLDIWLAQATGHSSTEWQLGLFVRIDGRVERDALHWAIRQAVQEAEPARVAFFEVDGAVYQRAIEHPDVELTFDDLSGLDDPVAEARRRALAIQRTPMPLSGPLFRFALFATRRDQFYLFACCHHIVIDGTGVGLVGHRIASIYSAIVAAGPIPTAVFGSLRELVECESHYESSADYRDDEAYWLANLPPETTRLPAAPAQRDPWPSAPVPLDADVVRRVRRLSEVWGVSQTSVITAACALLVRAWDGDGSGVVLDFPVSRRVRPELKTLPGMVAGVVPLVLSLAPQCTVAAFCRHVETRIDEAIQHQRFPVHALERKVRGLARPPERVSVNFIPSAFTLPFGGVTASASYTNSGQADGFGLIFSSDGDELFFSTAGSWAPWSGLDAAELADRLQGVLTAMTADPTRPLRSLQLLDQSERDRLDLFGRRAALSEPLAPVSVVDLFAAQVARTPDAVALTCRGRSMTYRELDLAANRLAHALIDRGAGPGELVALVFSRSAEAIVAILAVLKSGAAYLPIDPALPAARIEFMLADAAPIAAVGTAALAGTLDGFELPVIDVDDPALAGQPGTAPPTPAPDDLAHLIYTSGTTGVPKGVAVTHHNVAQLFDDLRIGIELSAQQVWTQFHSYAFDFSVWEIWGALLHGGRLVVVPDAVTQAPDELHALLVDEGVTVLTQTPSAVSTLSPHGLDSVALVVGAEPCPAELVDRWAPDRVMVNVYGPTETTMWASHSAPLTAGSGVPPIGSPLRGAAFFVLDGWLCPVPVGV

SEQ ID NO: 61670 - protein, 218 aa, Mycobacterium avium
MKVAVAGAGAVGRSVTRELLANGHDVTLIERNPDHVDVDAIPAAHWRLGDACELSLLESVQLQEFDVVVAATGDDKANVVLSLLAKTEFAVPRVVARVNDPRNEWLFTDAWGVDVAVSTPRMLASLIEEAVAVGDLVRLMEFRKGQANLVEITLPDDTPWGGKPVRRLQLPRDAALVTILRGPRVIVPEEDEPLEGGDELLFVAVAEAEEELQKLLLG

SEQ ID NO: 61671 - protein, 3411 aa, Mycobacterium avium
DRAFPLTRGQLDIWLSQEAGFAGTQWQLGLLVKIDGKVHRDALEQAITQAVAEAEPGRVSFFEVDGQVVQKPIDYPHVELAFHDLTDHADPVAEAREMSSAIQRTPMPLNGQMFKFVLFQTGHDEFYLFGCCHHIAIDGLGMALVCRRVATIYSAMVAGKPIPDAYFGTVQDLIDLESGYEASPDYAEDKAYWSEHLPPESGPVDRLPDAEGERDHYSPSASVQLDPSVANRIKELSKKLAIRRFSVTTAACALLVRGWSGSGSEVALDFPVSRRVRPESKTLPAMLAGVVPLVLSTAPESTVADFCKHVDKRIRELLAHQRFPVHTLEGDGLRQAPNRVGINFIPSRLTLDLAGSPATASYTNHGPVGHFGLFFLGAGDQLFLSTAGPGQPFASFGVADLAGRLQQILAAMTEDPDRPLSSIELLTGDEPALIDRWSNRPALTEPAPAPVSIPQAFAEHVQRTPDAVAVTFGATSLTYAQLDEASNRLGHLLADHGVGPGDCVAVMFPRCADAIVSMLAVLKTGAAYVPIDPAHASSRMDFVLADAAPSAVITTSDLRSRLDDHDLLVIDVHDPAVEAQPGTALPWPAPENTAYIIYTSGTTGTPKGVAIPHLNVTWLIESLDAGLPPGNVWTQCHSSAFDFSVWEIFGALLRGRRLLVVPESVASSPEDFHALLVAEQVSVLTQTPSAVAMLSPEGLESTALVVAGEACPTDVVDRWAAPGRVMLDAYGPTETTVCASISTPLTAGDPVVPIGSPIAGAAMFVLDKWLQPVPAGVVGELYLAGRGVGHGYVRRPGLTASRFVPNPFGAPGSRMYRTGDLVCWGPDGQLQYLGRADEQVKIRGFRIELGEIQSVLAGLDGVEQAAVVAREDRPGDKRLVGYITGTADPAELRAQLADRLPPYMVPTAVMVLDALPLTGNGKLDKRALPSPEYAAGEYRAPGDAIEEILADIYAQVLGVERVGVDDSFFDLGGDSILSMQVVARARAAGVICRPRDVFVEQTVARLARVSQVAVDGELGAADEGIGPVRPTPIMRWLQDIDGPIDEFNQTMVLAAPAGVGVDDVAVVLQALLDRHPMLRLRVQDDGAGGWSLEAPEVGSVRAADCLRAVDSLSDAALVEARSRLNVSDGVLLSAVWASETSQLALVVHHLAVDGVSWRTLIEDINIAWAQHQGGQEIALPVPGTSFARWSSILAEYAKSPAVVAAAAAWQQVVATPAVLPAVGPDDTYASAGQLSASLDVETTRLLLGEVPAAFHAGVQDILLIAFGLACTEFVGGGAPIGIDVEGHGRHEEIASGVDLSRTVGWFTTKYPVALRMGRRLDWARVVAGEAALGAVIKDAKEQLRALPDGLSYGLLRYLNPEIEVQGPDPVIGFNYLGRLGAGADLSEEMWRVSADSLSSAAVATAVPMPLAHTVELNAGTMDTDAGPQLHANWRWARSVLTDEQLNRLSRLWFEALTGICAHVQAGGGGLTPSDIAPARLDQQQIDELCQQHQIADVLPLSPVQQGLLFHTGFAQELEDLYAVQLGITVSGTLDPHRLRDAVQNAVNRHPNLVARFFDEFGEPVQIIPAEPEMAWRYLELDGGDIDGQLEQLSADERAAVCDLAGQPAFRAALIRIADDRHRLLLTIHHIVIDGWSLPVLLQEVFAGYYGQRLPAPPSYRSYLMWLSAQDRAAAQDAWREALAGFETPTLVAPPGKIGRRAVATYTVSADTTKALGELARSSRTTVSTVLQGAWAQLLTWLTGQHDVAFGTAVSGRPTELPGADAMVGLLINTVPVRADIAAATTVVDLLEQLQRAHADTLEHEHLALNEIHRVTGHDQLFDTLFLYENYPIDASALLDVHELAVTEFSSREFNHYPLSVVATPGHELSLRVEYDTEVFDEAGIETLIERLRQVLAAMTTDPGQRLSAIDLLDAAEHERLDAWGNRAVLTRRPAAQASIPALFAAQVARAADAVAITCGERSFTYREVEESANRLAHLLSGQGAGPGQRVAVVIPRSAEAVVAIFAVLKTGAAYVPIDPGVPAARLQFVLADSAPVAAVTTAEVRDRLDGFTGQIIDFDDPAVAEQPATGLPVPAADNIAYIIYTSGTTGIPKGVAIPHRNVTLLLETLDAQLGLGQVWTQCHSLAFDFSVWEIFGALLHGGRLVIVPDDIVRSPEDLHALLVREQVSVLSQTPSAFYALQSADALAPELGQQLKLQTVVFGGEALEPHRLATWLHRHPGLPRMINMYGITETTVHASFREIVDADVDSSVSPIGVPLANLAFFVLDGWLRPVPVGVVGELYVAGGGLATGYVGRPGLSATRFVACPFGGPGARMYRTGDLVRWGADGQLQYMGRADAQVKIRGYRIELGEIQAALAGLDGVEHAAVIAREDRPGDKRLVGYITGTADPAEVRAQLGERLPGYMVPSAVVVLDALPLTVNGKLDTRALPAPEYSDVDRYRAPVTAIEEILADIYAQVLGVERVGVDDSFFDLGGDSILSMQVVARARAAGVICRPRDVFTEQTVARLARVATVATGDDDVVDEGTGRVVATPIMRWLQNMDGPVEQFNQTMVLAAPAGVTPDDVAAVLQALLDRHAMLRLRVEDDGAGGWSLEVPEAGSVQAADCLETVDALSPAALVDARSRLNLADGILVRAVWASETSQLALIIHHLAVDGVSWRTLIEDLNIAWAQHHSGQPVALPTGGMSFARWSALLEDHARRPEVVERAEDWRQVAAVPAVLPGAQPGDTYATAGQLSASLDVETTRLLLGEVPAAFHAGVQDILLIAFGLAWTQFIGTGAPIGIDVEGHGRSEELGPQVDLSRTVGWFTAKYPVALRLGGLSWGQVVGGDEALGAVVKEAKEQLRALPDGLTYGLLRYLNPQAGLDVSDPAIAFNYLGRLGGGAAELSPELWRLSPDSFALAGAAGAVELPLPHTVELNAGTMDTEDGPHLQANWTWARSALDDKQIGRLSELWFDALAGICTHVRAGGGGLTPSDVAAARLTQRDLDELAQRYRVADVLPLTPLQQGLLFHAGTAQGSQEPEDLYAVQLDISVTGAVDPDRLREAVRTVITRHPNVVAHFSEDFGEPVQILSAEPELAWQYVELDAGADLDEQVERLSSAERVAVGDLAQPPFRGALIRTAEDAYRFVLTNHHIVLDGWSKPLLLQEIFAAYFGVRLPAPVPYRNFITWLSAQDRAAAQAAWREVLAGFDTPTLVGPSGRMALGPRGVAEFHVPADTSRLLGELARSCRTTVSTVLQAAWAQLLMWLTGQHDVVFGTAVSGRPTELAGSESMVGLLINTVPVRATIGAETTIADLLDQLQRAYTHTLEHQHLALNDIHRVTGHDQIFDTMFVYENYPIDTAALSAVDELTITGFTNREYNHYPLSVQAVPGHEIGLRVEFDTDVFGEARIEKLIERFRRVLEAMDRGLGGTV

SEQ ID NO: 61672 - protein, 2552 aa, Mycobacterium avium
MTVGAGRRLLSIDLLDGGEHDRLDEWGNRAILTKPVKAPASIPGMFAAQVARSAEAVALSFEGRSMTYRELDEASNRLAHLLAEQGAAPGECVALLFSRSDEAIVSILAVLKTGAAYLPIDPALPAARMEFMLGDATPIAAVTTAGLRDRLEGFDLPVIDVDEAAAEIERTQPSSALPGPSPDDIAYMIYTSGTTGTPKGVAVTHRNVTEFLKTLHPKLPSGPGQVWSQWHSLVFDVSVWETWGALLHGGRLVVVPESVAGSPDDLHDLLVAEGVTVLSQTPSAVGMLSPEGLDSTALVVAGEACPAEVVDRWAPGRVMINAYGPTEATVYAAMSAPLTAESGAPPIGSPVPGAALFVLDKWLRPAPEGVVGELYIAGRGVATGYARRAGLTASRFVACPFGGPGARMYRTGDLVRWGADGQLQYLGRADEQVKIRGYRIELGEIQSALAALDGVDQAAVIAREDRPGDKRLVGYITGTADPAELRTQLGKRLPAYMVPAAVVVLESLPLTVNGKLDKRALPAPEYHKRAGQYRAPSNHTEEILADIYAQVLGVERVGVDDSFFDLGGDSILSMQVVARARAAGVICRPRDVFVEQTVARLARVASDGADEEQVVDEGIGPVQATPIMRWLQTVQGPIDDFNQTMVLAAPSGVTADDVAVVLQALLDRHPMLRLRVEDDGAGGWNLQAPEPGSVRAADCLQSVDTLSDAVLVAARSRLNPGAGVMVSAVWASETSQLALIIHHVAVDGVSWRTLIEDLNIAWAQHHSGQPVALPAGGTSFARWSSLLAEHALTPAVVEQADAWREVVATPAVLPAVQPEVDTYQSAEQLSVSLDVDTTRLLLGEVPAAFHAGVQDILLIAFAMAWTQVVGAGTPIGIDVEGHGRHEELGPHVDLSRTVGWFTTKYPVALAIDGLDWASVVAGDDALGAAVKAAKEQLRALPDGLTYGLLRYLNPDVDLGGSDPVIGFNYLGRLGAAADLPGELWRLSPDSLSLSGAAAAVAMPLMHTVDLNAGTMDTEDGPHLHANWTWAPSAVDRDQISRLSQLWFEALAGICAHVRAGGGGLTPSDILPARLNQRQIDELSKQHQIADILPLTPLQQGLLFHASFAQDPGDDVYAVQLGITVTGALDSHRLHDAVHTVVNRHPNLAARFCPQYGEPVQVVPADPVMAWRYIQLGPEDVDPEQKVEELCAAERAAVSDLANRPAFRAALIRTADNRHRFVLTNHHIVMDGWSLPILLREILAIYYGDQLPAPATYRSYLTWLAGQDRSAAQAAWRQVLDGFDTPTLVGPAGRMRLGRRAVESYRLSADTTRALGELARACHTTVNTVLQAGWAQLLMRLTGQHDVAFGTAVSGRPADLAGAESMVGLLINTVPVRANTHAETTVADLLDQLQQHHNDTLEHEHLALSEIHRVTGHDALFDTLFLYENYPIDTSVPLGFHELAITDVTNREYNHYPLSVMALPGRELGLRVEFDTDVFDAAGIEKLTERFQRVLSEMTADPTRRLTSLEVMDEAEHELLDAWGNRPVLSQPATGTSIPALFAAQVARTPDAAALTFQGRSMSYRELDEASNRLAHLLIEEGAGPGECVALLFSRSAEAIVSILAVLKTGAAYLPIDPALPAARIEFLLGDAEPVAVVTTAALRSRLDGCKPSVVDVDDPALDGQPSAALPVPSSDNIAYLIYTSGTTGVPKGVAVSHDNVAQLVESLHADLPEGGVWAQWHSLVFDVSVHEIWGALLHGGRLVVVPESVAASPDELHDLLVAEGVTVLSQTPSAVGMLSPEGLDSTALVVAGEACPVEIVDRWAPGRVMINAYGPTEATVYAAMSTPLQPGTGSAPIGSPVPRAALFVLDRWLRPAPPGVVGELYIAGHGVATGYARRSGLTASRFVACPFGGPGARMYRTGDLVRWNQDGQLEYLGRADEQVKLRGYRIELGEVQAALAGLDGVEQAAVIAREDRPGDKRLVGYITGTADPVGIRIQLAERLPAYMVPAAVVVLDALPLTVNGKLDKRALPAPEYRKRGGEYIAPTNPTEETVAGIFARVLGMERVSIDDSFFELGGDSLSAMRVIAEINTAVDGALSVRTLFDSQSVRALSQRITSGADAENAAGPGFAAVHGADAKEVYARDLTLDKFLDATTLSTAPTLPGPSPEVRTVLLTGATGFLGRYLVLEWLEQLEQVDGKLICLVRARSDEEAWGRLEKTFNTGDPELLRHFQELAEEHLQVVAGDKGQANLGLDEQTWQQLADTVDLIVDSAAVVNGVLPYSELFTPNVGGTAELIRLALTTRKKPFAYVSTSDVGRQIEPSAFTEDADIRVISATRVIDGSYANGYGNSKWAGEVLLREAHDLCGLPVSVFRSDMILADTSYAGQLNVTDIFTRMILSIVATGTAPKSFYRLDADGNRQRSHFDALPVEFVAEAIAKLGAQVMDGFETYHVMNPHDDGIGLDEYVDWLIEAGYPIERVDDFGEWLQRFETGLRGLPERQRQNSVLQMLLLLLRDPKNLQLAEPARGAFAPTDRFRAAVQEAKVGSDNDIPHISAPVIVKYVTDLQLLGLL

SEQ ID NO: 61673 - protein, 1617 aa, Mycobacterium avium
MTIDPRAQQDLKPWTTFTRQQDIPEWISKAYVESYRGPHSDESGGAEAGPIDLTVPTAIVTPAMLSAHYRLGLHRPDGESRVAVYPADDPAGFGPALQVVTDHGGMLMDSVTVLLHRLGVPYTAIMTPVFDVHRSPDGDLLSLEPKPQGAPQYAGEAWIHVQLLPSVDSKGLTEAERLLPKVLADVQQVASDASALIAVLDELAAAVEANRDNHFSAPDRDDVAALLRWLGNGNFLLLGYQRCRVHDGLVSGDGSPGLGVLRTRTGSRPRLTDDDRLLVLAQSVVGSYLRYGAYPYAIAVREYVDGAVIEHRFVGLFTVAAMNADVLEIPTISRRVREALAMADSDPIHPGQLLLDVIQTVPRSELFTLSSERLLAMAKAVVDLGPQRNALLFLRADSLQYFVSCLVYLPRDRYTTAVRLQIEDILVREFGGTRLEFTARVSESPWALMHFMVRLPTDDPAAKPVDVSEDNRVRIQGLLSEAARTWTDRLVAAAAEGAVGHADAEYYADAFPEVYKQAISPADAIGHIAIIKELQDNSVKLVFTDGEDGSAQLTWFLGGRTASLSQLLPMLQSMGVVVLEERPFTVTRSDGLPVWIYQFRISPHPTIELASTPDERDAMAERFADAVTAIWQGRLEVDRFNELVMRAGLRWQQVVLLRAYAKYLRQANFPYSQSYIEAVLNEHPSTARSLVALFEALFDPDPDSSAGRDAQAAAAAVAADIDALVSLDTDRILRAFASLVQATLRTNYFVTREGSARARNVLVIKLDAQLIDELPLPRPKYEIFVYSPRVEGVHLRFGPVARGGLRWSDRRDDFRTEILGLVKAQAVKNAVIVPVGAKGGFVVKRPPLPSGDGAADRDATRAEGVACYQLFISGLLDVTDNVDHATGKVSPPPEVVRRDGDDAYLVVAADKGTATFSDIANDVAKSYGFWLGDAFASGGSVGYDHKAMGITARGAWEAVKRHFREMGVDTQTEDFTVVGIGDMSGDVFGNGMLLSKHIRLLAAFDHRHIFLDPNPDAAASWEERRRMFELPRSSWDDYDKSLISEGGGVYSREHKSIPVSPQVRDALGLDGSGGGVVTEMTPPNLIKAILQAPVDLLFNGGIGTYIKAESESDADVGDRANDPVRVNGSSVRAKVIGEGGNLGVTALGRVEFDLSGGRINTDAMDNSAGVDCSDHEVNIKILIDSLVTAGKVKPQERKPLLESMTDEVAALVLTDNEDQNDLIGTSRANAPSLLPVHARQIQYLVDERGLNRELEALPSEKEIQRRAEAGIGLTSPELCTLMAHVKLDLKEQMLQTELTEQDVFASRLPLYFPTPLRHRFTPEIRAHQLRREIVATMLINELVDAAGISYAFRIVEDVGVSAVDAVRTYVATDAIFGVGEIWRRIRAANLPVALSDRLTLDTRRLIDRAGRWLLNYRPQPLAVGAEINRFAAKVKALTPRMSEWLRGDDKAIVEKEAAEFESQGAPRDLAYLVAAGLYRFSLLDIIDIGDINDIDAAEVADTYFALMDRLGTDGLLTAVSELPRNDRWHSLARLAICDDIYASLRSLCFDVLAVGEPDESGEEKIAEWEHLSASRVERARRTLIEIQESGAKDLATLSVAARQIRRMTRTSGRGSSS

SEQ ID NO: 61674 - protein, 426 aa, Mycobacterium avium
MSAPLADIDPDIAGLLGQELGRQRDTLEMIASENFVPRAVLQAQGSVLTNKYAEGLPGRRYYGGCEYVDVVENIARDRAKALFGADFANVQPHSGAQANAAVLHALMTPGERLLGLDLANGGHLTHGMKLNFSGKLYDVGFYGVDPTTHLIDMDAVRAKALEFRPKVIIAGWSAYPRVLDFAAFASIADEVGAKLWVDMAHFAGLVAAGLHPSPVPHADVVSTTVHKTLGGPRSGLILGKQEYAKSINSAVFPGQQGGPLMHVIAAKAVALKIAGTEEFADRQRRTLSGARILAERLSGADVAAAGVSVVSGGTDVHLVLVDLRNSELDGQAAEDLLHEIGITVNRNAVPNDPRPPMVTSGLRVGTPALATRGFGDAEFSEVADVIATALAGGRGADLAALRDRVTRLARDFPLYEGLEDWALVGR

SEQ ID NO: 61675 - protein, 331 aa, Mycobacterium avium
MRYNGSLSRGGMISTNTHPTASGDRFTGADFGRVVRAVAAQLATAPRPFLATLTGEQPPAASLASLSGRPPPGDMSSQTSTAPNPEPDHEAIVPGNTVEQLVEGAAQVLGKPRMRGWIHFYSAWLAVITGATLVSVSWAAASPRAGHSTLIYAAATVALFAVSATYHRVKWKTEAARTRMKRLDHSMIFVFIAGSYTPFARLVMPQNTGVVVLCIVWGGALAGIALKVCWPTAPRWLGVPLYLLLGWVAIWYAPTILHQAGVAAMVLLAVGGVLYSVGGIFYALRWPDPWPSTFGYHEFFHALTAIAAILHYIAMWFAVFYTGDHAWLATA

SEQ ID NO: 61676 - protein, 157 aa, Mycobacterium avium
MADSLVVAQSVVAPVAAPDAFGRTLPMPLPTLFNRWYGPFPPIREVRGQTGDWDAAGRQRIVHLAGGASMREELTSVDPPRSFGYRLSGITGPMALLVNHVLGEWVFTPAAGGTEITWRWDIHPRSPLTAWALPLLGRMWQGYARRALDNLVALLTR

SEQ ID NO: 61677 - protein, 415 aa, Mycobacterium avium
MTRAATSEPNSAENPFPVRAVAIRVASWIDRLGTVWVEGQLAQVSLRPDSKTVFMVLRDPAADMSLTVTCPRDLVLNAPVKLAEGTQVVVCGKPSFYTGRGTFSLRLSEIRAVGVGELLARIERLRRLLDAEGLFDPRLKRPIPFLPNMIGLITGRASAAERDVKTVAAGRWPAVRFAVRNTAVQGPNAVAQIVEALRELDRDPEVDVIVLARGGGSVEDLLPFSDETLCRAIAACRTPVISAVGHEPDNPLCDLVADVRAATPTDAAKKVVPDTAAEQRLIDDLRRRSAQALRNWVSREQRALAQIRSRPVLAEPLRALTARAEEVHRARSAIRRDVTRLTAAETERIGHLRARLATLGPAATLARGYAVVQTVGAGGPHVLRTVGDAPAGTRLRVRVADGAVAALSEGPTDGE

SEQ ID NO: 61678 - protein, 366 aa, Mycobacterium avium
MIGPMGDPSLTAELGRVLVTGGSGFVGANLVTTLLERGYQVRSFDRAPSPLPAHPHLEVLQGDITDAGVCAAAVEGIDTIFHTAAIIDLMGGASVTEEYRQRSFAVNVGGTENLVRAGQAAGVQRFVYTSSNSVVMGGQNIVGGDETLPYTDRFNDLYTETKVLAERFVLGQNGVDGMLTCAIRPSGIWGRGDQTMFRKLFESVIAGHVKVLIGRKSARLDNSYVHNLIHGFILAAQHLTPGGTAPGQAYFINDAEPINMFEFARPVVEACGVNWPRVRVNGPIVRAAMTGWQRLHFRFGIPAPLLEPLAVERLYLDNFFSIAKASRDLGYQPLFTTEQAMSECLPYYVGMFEQMKRQALAGKASA

SEQ ID NO: 61679 - protein, 359 aa, Mycobacterium avium
MTVEGDRSSAATGRAPAQGRPRGEAPDRNLALELVRVTEAGAMAAGRWVGRGDKEGGDGAAVDAMRELVNTVSMRGVVVIGEGEKDHAPMLYNGEEVGNGDGPECDFAVDPIDGTTLMSKGMPNAISVLAVADRGAMFDPSAVFYMNKIAVGPEAAHVLDITAPIAENIKAVAKVKALSVRDMTVCILDRPRHAKLIDEVRETGARIRLITDGDVAGAISACRPHSGTDMLAGIGGTPEGIIAAAAIRCMGGAIQAQLAPRDDEERQKAIDAGYDLDQILTTEDLVSGENVFFCATGVTNGDLLKGVQYYPGGCTTQSIVMRSKSGTVRMIEAYHRLSKLNEYSAIDFTGDSSAAYPLP

SEQ ID NO: 61680 - protein, 199 aa, Mycobacterium avium
MFTGIVEELGEVTARDVLADAARLTIRGAVVTADAGHGDSIAVNGVCLTVAELLPDGRFSADVMGETLNRSNLGALQVGSRVNLERAAAVNSRLGGHIVQGHVDGTGRIVARTPSEHWEVVRIEVPPEVARYVVEKGSITVDGISLTVSGLGGEPRDWFEVSLIPTTRELTTLGGAPVGTQVNLEVDVIAKYVERLMSR

SEQ ID NO: 61681 - protein, 438 aa, Mycobacterium avium
MFPRPSGDGEVAEMTRLDSVERAVADIAAGKAVIVIDDEDRENEGDLIFAAEKATPEMVAFMVRYTSGYLCVPLDGAICDRLGLLPMYAVNQDKHGTAYTVTVDARNGVGTGISASDRATTMRLLADPTSIAEDFTRPGHVVPLRAKDGGVLRRPGHTEAAVDLARMAGLQPAGAICEIVSQKDEGSMAQTDELRVFADEHDLAMITIADLIEWRRKHEKHIERIAEARIPTRHGEFRAIGYTSIYEEVEHVALVRGEIAGPNSDGDDVLVRVHSECLTGDVFGSRRCDCGPQLDAAMAMVAREGRGIVLYMRGHEGRGIGLMHKLQAYQLQDAGEDTVDANLKLGFPADARDYGIGAQILVDLGVRSMRLLTNNPAKRVGLDGYGLHIIERVPLPVRANAENIRYLMTKRDKMGHDLAGLDDFHESVHLPGEFGGAL

SEQ ID NO: 61682 - protein, 163 aa, Mycobacterium avium
MAPMSPAAGVPEMPALDASGVRLGIVASTWHSRICDALLAGARKVAADSGVENPTVVRVLGAIEIPVVAQELARNHDAVVALGVVIRGQTPHFEYVCDAVTQGITRVSLDASTPVANGVLTTDNEQQALDRAGLPDSAEDKGAQAAGAALSAALTLRELRARS

SEQ ID NO: 61683 - protein, 310 aa, Mycobacterium avium
MTGPGELAGSRPVDAHLENGAGIDVVLVTGLSGAGRGTAAKVLEDLGWYVADNLPPQLITRMVDLGMDAGSRITQLAVVMDVRSRGFTGDLDSVRTELATRNIAPRVVFMEASDDMLVRRYEQNRRSHPLQGDQTLAEGIAAERRMLAPVRATADLIIDTSTLSVRALRETIERAFGGGASATISVTVESFGFKYGLPMDADMVMDVRFLPNPHWVDELRPRTGQDPAVRDYVLGQPGAAEFLDAYHRLLSLVVDGYRREGKRYMTIAIGCTGGKHRSVAIAEALMQRLQAQHGEAQLSVRVLHRDLGRE

SEQ ID NO: 61684 - protein, 358 aa, Mycobacterium avium
MSEPINRGIVALGGGHGLYATLSAARRLTPYVTAVVTVADDGGSSGRLRSELGVVPPGDLRMALAALASDSPHGRLWATILQHRFGGSGALAGHPIGNLMLAGLSEVLADPVAALDELGRILGVKGRVLPMCPIALQIEADVSGLEADPRMFRVIRGQVAIATTPGKVRRVRLLPDNPPATRQAVDAIMAADLVVLGPGSWFTSVIPHVMVPGLAAALRATTARRALVLNLVAEPGETAGFSVERHLHVLAQHAPGFTVHDIIIDAGRVPSEREREQLRRTATLLSAEVHFADVARPGTPLHDPGKLAAALDGVRAARKAPGASPVTATADIRVDGASPPAGGNGPAGSGPRGDDAWR

SEQ ID NO: 61685 - protein, 327 aa, Mycobacterium avium
MAMTTEVKDELSRLVVKSVSARRAEVTSLLRFAGGLHIVGGRVVVEAEVDLGNVARRLRKDIFELYGYNAVVHVLSASGIRKSTRYVLRVANDGEALARQTGLLDNRGRPVRGLPAQVVGGSIADAEAAWRGAFLAHGSLTEPGRSSALEVSCPGPEAALALVGAARRLGVSAKAREVRGADRVVVRDGEAIGALLTRMGAQDTRLIWEERRMRREVRATANRLANFDDANLRRSARAAVAAAARVERALEILGDTVPDHLASAGKLRVEHRQASLEELGRLADPPMTKDAVAGRIRRLLSMADRKAKIEGIPDTESAVTPDLLEDA

SEQ ID NO: 61686 - protein, 464 aa, Mycobacterium avium
MSRPQQRGRGKRRRPLDPARGAAFEVLRAVSERDAYANLALPALLRERGITGRDAAFATELTYGTCRTRGLLDAVIGAAAGRPPEAIDPVLLDLLRLGTYQLLRTRVDAHAAVSTTVEQAAIEFDSARAGFVNGVLRRIAGRDERSWVQELAPDPARDPIGHAAFVHAHPRWIAQAFADALGAAAAELDAVLASDDERPQVHLAARPGALTAAELADAVGGTVGRHSPFAVYLAGGDPGRLAPVRDGLALVQDEGSQLVARALTLAPVDGDCGRWLDLCAGPGGKTALLASLGAQRFSGPQFRVTAVEPAPRRADLVVENTRGLPVEVLRVDGRHTGLQPAFDRVLVDAPCTGLGALRRRPEARWRRQPGDVPTLTKLQRELLGAAIALTRPGGVVLYATCSPHLAETVGVVADALRRHPVSALDARPLFEPVADLGDGPHVQLWPHRHGTDAMFAAALRREAG

SEQ ID NO: 61687 - protein, 341 aa, Mycobacterium avium
MTASLGDRLDAAMRLAIEQSNQVKGNTYPNPPVGAVVLDGRGEVVGVGGTEPAGGDHAEILALRRAGDLAAGGTVVVTLEPCNHHGKTPPCVDALLEAGVSTVVYAVADPNPQAAGGAGRLQEAGVTVRSGLLADEVSGGPLREWLHKQRTGLPHLTWKYASSVDGRSAAADGSSRWISSEASRLDLHRRRAAADAIVVGTGTVLADDPALTARLPDGTLADRQPLRVVVGMREIPSEAKVLNDDSRTMVIRTHDPAEVLKAVSDRTDVLLEGGPTLAGAFVRAGLVNRILVYLAPTLLGGPVTAVDDVGVPTIAKALRWQFDGVDRVGPDLLLSLVPRSG

SEQ ID NO: 61688 - protein, 262 aa, Mycobacterium avium
MTNVLTSNDGPVRIVTLNRPGVRNAIDIPLRIELAEVLEAADADESVRSIVLTGAGRVFCSGGDISTMQRMESEDAKHRADLAQRVIRAIWNTAKPVVAAVEGAAFGAGAALALACDRVVAARDARFATTFTNVGLAGDMGTFVSLPRRVGIARARQMLLLPQPIGAEEAAALGMVDALTDPGHTLEAATRDAQNLAAGPAEAFGVIKALLAIAPTLHPLDALEEEASYQARLFGTDDFVEGVAAFRDKRRPSFGQRQGVRP

SEQ ID NO: 61689 - protein, 249 aa, Mycobacterium avium
MPVATNAPKCVRSAIAAAAAGLAVVAISACDKHGPPPSGAAPRQVTVVGSGQVQGVPDTLTADVGIEFTAPDVTTAMNQTNERQQAVINALVGAGIDHKDISTTEVALTPQYSNPEAGGSAAITGYRASNAVAVKIHPPDAASRLLALILGTGGDATRIRSVSYSIADDSQLVKDARTRAFNDAKSRAEQYAQLSGLHLGKVLSISEATGNAPPPGGPPPSPRAMPMAVPLEPGQQTVKFTVTASWELD

SEQ ID NO: 61690 - protein, 799 aa, Mycobacterium avium
MNRKNVIRTITAIAVVVLLGWSFFYFSDDTRGYKPVDTSVAMAQINGDNVKSAQIDDREQQLRLTLKKGNGDTDNSDKVITKYPSGYAVDLFNALSAKNAKVSTVVNQGSILGELLVYVLPLLLLVGLFVMFSRMQGGARMGFGFGKSRAKQLSKDMPKTTFADVAGVDEAVEELYEIKDFLQNPGRYQALGAKIPKGVLLYGPPGTGKTLLARAVAGEAGVPFFTISGSDFVEMFVGVGASRVRDLFDQAKQNNPCIIFVDEIDAVGRQRGAGLGGGHDEREQTLNQLLVEMDGFDPRAGVILIAATNRPDILDPALLRPGRFDRQIPVSNPDLAGRRAVLAVHSKGKPIAPDADLDGLAKRTVGMTGADLANVINEAALLTARENGTVITSAALEEAVDRVIGGPRRKGRIISEQEKKITAYHEGGHTLAAWAMPDIEPIYKVTILARGRTGGHAVAVPEEDKGLRTRSEMIAQLVFAMGGRAAEELVFREPTTGAVSDIEQATKIARAMVTEFGMSSKLGAVKYGSEHGDPFLGRTMGTQADYSHEVARDIDDEIRKLIEAAHTEAWEILTEYRDILDTLAGQLLEKETLHRAELESIFAGVEKRPRLTMFDDFGGRIPSDKPPIKTPGELAIERGEPWPPPAPEPAFKAAIAKASEAAAAARLEADRNANGGNGSHANQGGNRQGPTQPDYGAPAGWRAPGWPPQQSQQPNYWHPPAQPPYWQQPAHGYPGQQPYPGQQPYPGQPGGPAQSGPPQARPPYPPYPPYPPPGQPAPEGGSPDRQDDDVSRSNPPAHG

SEQ ID NO: 61691 - protein, 76 aa, Mycobacterium avium
MENQPGFLGFQLLRPVQGKDRYFVVTHWESDEAFQAWAKGPAIEAHAGHRANPVATGASLLEFEVVLDVAANKQAG

SEQ ID NO: 61692 - protein, 843 aa, Mycobacterium avium
MFERFTDRARRVVVLAQEEARMLNHNYIGTEHILLGLIHEGEGVAAKSLESLGISLEGVRSQVEEIIGQGQQAPSGHIPFTPRAKKVLELSLREALQLGHNYIGTEHILLGLIREGEGVAAQVLVKLGAELTRVRQQVIQLLSGYQGKEAAEAGTGGRGGESGSPSTSLVLDQFGRNLTAAAMEGKLDPVIGREKEIERVMQVLSRRTKNNPVLIGEPGVGKTAVVEGLAQAIVHGQVPETLKDKQLYTLDLGSLVAGSRYRGDFEERLKKVLKEINTRGDIILFIDELHTLVGAGAAEGAIDAASILKPKLARGELQTIGATTLDEYRKYIEKDAALERRFQPVQVGEPTVEHTIEILKGLRDRYEAHHRVSITDSAMVAAATLADRYINDRYLPDKAIDLIDEAGARMRIRRMTAPPDLREFDEKIAEARREKESAIDAQDFEKAASLRDREKQLVAQRAEREKQWRSGDLDVVAEVDDEQIAEVLGNWTGIPVFKLTEAETTRLLRMEDELHKRIIGQEDAVKAVSKAIRRTRAGLKDPKRPSGSFIFAGPSGVGKTELSKALANFLFGDDDALIQIDMGEFHDRFTASRLFGAPPGYVGYEEGGQLTEKVRRKPFSVVLFDEIEKAHQEIYNSLLQVLEDGRLTDGQGRTVDFKNTVLIFTSNLGTSDISKPVGLGFTQGGGENNYERMKQKVNDELKKHFRPEFLNRIDDIIVFHQLTRDEIIRMVDLMITRVAGQLKSKDMDLVLTDKAKALLAKRGFDPVLGARPLRRTIQREIEDQLSEKILFEEVGPGQIVTVDVDNWDGESAGEDAVFTFTGTRKPPAEPDLAKAGAHSADPQ

SEQ ID NO: 61693 - protein, 499 aa, Mycobacterium avium
MSPAPDADIPEQYRIRRDKRARLLAEGHDPYPVAVERTHTLAQVRAAHPDLPVDTATDDVVGVAGRVIFARNSGKLCFATLQEGDGTTLQVMVSLDKVGREALDAWKADVDLGDIVSVHGTLISSRRGELSVLADSWRMASKSLRPLPVAHKEMSEEARVRQRYVDLIVRPQARTVARQRIAVIRAIRNALERRGFLEVETPMLQTLAGGAAARPFVTHSNALDIDLYLRIAPELFLKRCVVGGFDKVFELNRVFRNEGADSTHSPEFSMLETYQAYGTYDDSAVVTRELIQEVADEAIGTRQLPLPDGSVYDIDGEWASIEMYPSLSAALGEEITPQTTVEKLLGIAERLGVEIPRDRGYGHGKIVEELWEHTVGDTLTAPTFVRDFPVETTPLTRQHRSIDGVTEKWDLYVRGVELATGYSELTDPVVQRERFAAQARAAAAGDDEAMVLDEDFLAALEYGMPPCTGTGMGIDRLLMTLTGLSIRETVLFPIVRPHS

SEQ ID NO: 61694 - protein, 121 aa, Mycobacterium avium
MELGDWLRVDMKAGKPLFDQLRTQVIEGVREGALPPGTRLPTVRELAGQLGVAVNTVARAYRELESAAIIETRGRFGTFVARYDPTDAAMAAAAREYVRVARGLGLDKADAVRYIESVPDE

SEQ ID NO: 61695 - protein, 551 aa, Mycobacterium avium
MSPNTTPPAGVLDGFVPFPAERAAAYRAAGLWTGRALDTILTDAARRWPDRTAVLDASGGTGFSYAGLDEQANRAAAGLADAGIAPGDRVLLQLPNGCQFAVALFALLRAGAIPVMCLPGHRAAELGHFAALSQATALLIADTAAGFDYRTMAAGLVEEHEALAHVIVDGDPGPFLSWAQLCERAPAGRPATPVDPGSPALLLVSGGTTGTPKLIPRTHDDYVFNANASAELCGLTRDDVYLAVLSAGHNFPLACPGLLGAMTVGATTVFGTDPSPEAAFATIARHGVTVTALVPALAKLWAHACEWEDNPPKSLRLLQVGGAKLEADDARVIRSALTPGLQQVFGMAEGLLNYTRLDDPPEITEHTQGRPLSTADEVRVVDAAGNPVAPGQEGELLVRGPYTFNGYFRAERDNQRCFDAQGFFRSGDLVRVRDDGYLVVTGRVKDVICRGGETISAADLEEQMLSHPAIFSAAAVPLPDPYLGEKICAAVVFEGPALSLAELNGYLDERGVAAHARPDVLAAMPSLPTTPIGKIDKKAIANQVSARNRRP

SEQ ID NO: 61696 - protein, 488 aa, Mycobacterium avium
  MISC_FEATURE (456)..(456): X=any amino acid
  MISC_FEATURE (470)..(470): X=any amino acid
MSSPAGSRAPGDGRARGRGRIPDRDIAAIRERVRIDEVVGDYVQLRRAGADSLKGLCPFHDEKSPSFHVRPNHGHFHCFGCGEGGDVYAFLQKIEHVSFVEAVELLADRIGHTITYSGPATSVQRDRGSRSRLIAANAAAAEFYAAALESDEAAPARQYLTERNFDAEAARHFGCGFAPSGWDTLTKHLQRKGFEFKELEAAGLSRQGRRGPMDRFHRRLLWPIRSSAGEVIGFGARRLFDDDPMEAKYINTPETLLYKKSNVMFGIDLAKRDIAKGHQAVVVEGYTDVMAMHLAGVTTAVASCGTAFGDEHLAMLRRLMMDDSFFRGELIYVFDGDAAGRAAALKAFGGEQNLAGQSFVAVAPDGMDPCDLRLRSGDAALRDLVARRTPLFEFAIRSALAELDLDSAEGRVAALRRCVPMVAQIKDPTLRDEYARQLAGWVGWSDVAQVIDRVRXQSKHSAGAGRGGSXGRVSRRAEQSAAPAGPAA

SEQ ID NO: 61697 - protein, 712 aa, Mycobacterium avium
MEDPALQVISDAAGRMRVSVGWVRADSRRAVAVEEAVAKCDGVRVVHAYPRTGSVVIWYSPRRCDRSAVLAAIGEAAHVAAELIPARAPHSSEIRNADVLRMVIGGAALALLGVRRYVFARPPLLGPSGRLFATGVTVFTGYPFLRGALRSLRSGRAGTDALVSAATVASLVLRENVVALTVLWLLNIGEYLQDLTLRRTRRAISELLRGSQDTAWIRLEHNEIQVATDTLQIGDEVVVHDHVAIPVDGEVIDGEAIVDQSAITGENLPVSVVVGMPVHAGSVVVRGRLVVRARAVGNQTTIGRIITRVEEAQHDRAPIQTVGENFSRRFVPTSFIVSAITLAVTGDVRRAMTMLLIACPCAVGLATPTAISAAIGNGARRGILIKGGSHLEQAGQVDAIVFDKTGTLTVGRPVVTNIVAMHKDWEPEQVLAYAASSEIHSRHPLAEAVIRSTEERHITIPPHEECEVLVGLGMRTWADGRTLLLGSPSLLQAEKVKVSKKAKEWVDKLRRQAETPLLLAVDGTLVGLISLRDEVRPEAAGVLKKLRANGIRRIVMLTGDHPDIAAVVADELGIDEWRAEVMPEDKLAAVRDLQEEGFVVGMVGDGINDAPALAAADIGIAMGLAGTDVAVETADVALSNDDLHRLLDVRDLGSRAVDVIRENYGMSIAVNAAGLIIGAGGALSPVLAAILHNASSVAVVANSSRLIRYRLN

SEQ ID NO: 61698 - protein, 146 aa, Mycobacterium avium
MPKPTKGPRLGGSSSHQKALLANLATSLFEHGRIKTTEPKARALRPYAEKLITHAKKGALHNRREVLKKIRDKDVVHVLFEEIGPFFADRNGGYTRIIKVEPRKGDNAPMAVIELVREKTVTSEADRARRVKASKKAPEAAAAAPQ

SEQ ID NO: 61699 - protein, 347 aa, Mycobacterium avium
MLISQRPTLSEEVLTDNRSQFVIEPLEPGFGYTLGNSLRRTLLSSIPGAAVTSIRIDGVLHEFTTVPGVKEDVTAIILNLKSLVVSSEEDEPVTMYLRKQGPGEVTAGDIVPPAGVTVHNPELHIATLNDKGKLEVELVVERGRGYVPAVQNRASGAEIGRIPVDSIYSPVLKVTYKVDATRVEQRTDFDKLILDVETKSSITPRDALASAGKTLVELFGLARELNVEAEGIEIGPSPAEADHIASFALPIDDLDLTVRSYNCLKREGVHTVGELVSRTESDLLDIRNFGQKSIDEVKVKLHQLGLSLKDSPPSFDPSQVAGYDVATGTWSTEAAYDDQDYAETEQL

SEQ ID NO: 61700 - protein, 201 aa, Mycobacterium avium
MARYTGPVTRKSRRLRTDLVGGDQAFEKRPYPPGQHGRARIKESEYLLQLQEKQKARFTYGVMEKQFRRYYEEAVRQPGKTGEELLRILESRLDNVVYRAGLARTRRMARQLVTHGHFTVNGVRVDVPSYRVSQYDIIDVREQSLNSVPFQIARETAGDRPVPSWLQVVGERQRILIHQLPERAQIDVPLTEQLIVEFYSK

SEQ ID NO: 61701 - protein, 138 aa, Mycobacterium avium
MPPAKKAAAAPKKGQKTRRREKKNVPHGAAHIKSTFNNTIVTITDPQGNVIAWASSGHVGFKGSRKSTPFAAQLAAENAARKAQEHGVRKVDVFVKGPGSGRETAIRSLQAAGLEVGAISDVTPQPHNGVRPPKRRRV

SEQ ID NO: 61702 - protein, 124 aa, Mycobacterium avium
MARLVGVDLPRDKRMEIALTYIYGVGRTRSNEILAATGIDRDLRTRDLTDDQLTHLRDYIEANLKVEGDLRREVQADIRRKIEIGCYQGLRHRRGLPVRGQRTKTNARTRKGPKRTIAGKKKAR

SEQ ID NO: 61703 - protein, 73 aa, Mycobacterium avium
MAKKDGAIEVEGRVVEPLPNAMFRIELENGHKVLAHISGKMRQHYIRILPEDRVVVELSPYDLSRGRIVYRYK

SEQ ID NO: 61704 - protein, 284 aa, Mycobacterium avium
MLRVAVPNKGTLSEPATEILAEAGYRRRTDSKDLTVIDPVNQVEFFFLRPKDIAIYVGSGELDFGITGRDLVGDSDAPVRERLALGFGSSSFRYAGPAGRDWKIADLAGKRIATAYPNLVRKDLAERGIEATVIRLDGAVEISVQLGVADAIADVVGSGRTLSLHNLVAFGEPLCDSEAVLIESDRGGQDDTQAARDQLVARIQGVVFGQQYLMLDYDCPRAVLDKATAITPGLESPTIAPLADADWVAIRALVPRRGVNEIMDELAAIGAKAILASDIRFCRF

SEQ ID NO: 61705 - protein, 300 aa, Mycobacterium avium
MTPPDGPPYGAPSGQAALPELHHTVVVAAFEGWNDAGDAASDALEHLEAIWEADPILEIDDEAYYDYQVNRPVIRQVDGVTRELVWPAMRISHCRPPGSDRDVVLMHGVEPNMRWRTFCAELVAIADKLNVDTVVILGALLADTPHTRPVPVSGAAYSPESAKRFGLEESRYEGPTGIAGVFQDACVAAGIPAVTFWAAVPHYVSQPPNPKATVALLRRVEDVLDIEVPLADLPTDAEEWEQAVTEMTAEDEDLAEYVQSLEQRGDAEVDMNDALGKIDGDALAAEFERYLRRRRPGFGR

SEQ ID NO: 61706 - protein, 1262 aa, Mycobacterium avium
MEGVHVTAPVTTPASDSFAPNIRPDCTDELTAALRQRIMVIDGAMGTAIQRDRPDEAGYRGERFKDWPSDLVGNNDLLNLTQPQIIEGIHREYLEAGADILETNTFNANAISLSDYGMEELSYELNYAGAALARKAADEFSTPDKPRYVAGALGPTSRTASISPDVNDPGARNVTYDELVAAYLEAANGLVDGGVDLLIVETIFDTLNAKAAVFALETLFEQRGRRWPVIISGTITDASGRTLSGQVTEAFWNSIRHAKPIAVGLNCALGAPEMRPYIAEVSRIADTFVSCYPNAGLPNAFGEYDESPERQASYIADFAEAGLVNIVGGCCGTAPPHIAEIAKVVEGKPPREVPQIPVATRLSGLEPLNITDDSLFVNIGERTNITGSARFRNLIKAEDYDTALSVALQQVEVGAQVIDINMDEGMIDGVAAMDRFTRLIAAEPDISRVPVMIDSSKWEVIEAGLKNVQGKPIVNSISLKEGEEKFVREARLCRKYGAAVVVMAFDEQGQADNLERRKQICARAYRVLTEEVGFPPEDIIFDPNCFALATGIEEHATYGIDFIEACAWIKENLPGVHLSGGISNVSFSFRGNNPVREAIHSVFLFHAIKAGLDMGIVNAGALVPYDSIDPELRDRIEDVVLNRREDAAERLLEIAERFNKSADASEDSAAAEWRGLPVRERITHALVKGIDAHVDEDTEELRAEIAAAGGRPIEVIEGPLMDGMNVVGDLFGSGKMFLPQVVKSARVMKKAVAYLLPFIEAEKEESGVSGSKDTNGTIVMATVKGDVHDIGKNIVGVVLQCNNFEVIDLGVMVPAQKILDAAKEHDADIIGLSGLITPSLDEMSNFAAEMEREGLQIPLLIGGATTSRAHTAVKISPRRSGPVVWVKDASRSVPVAAALLDDKQRPALLEATEKDYASLRERHAQKNERPMVTLEKARANRTPIDWDGYTPPVPAIGAGIREFQDYDLAELREYIDWQPFFNAWEMKGRFPDILNNPATGEAARKLYDDAQEMLDTLIKEKWLTANAVIGFFPANAIGPGFEDIELYTDDTRTEVLTTLHNLRQQGEHRDGIPNRSLGDYVAPKETGHRDYIGAFAVTAGLGSQEKIAEFKAALDDYSAILLESIADRLAEAFAERMHQRVRKEFWGYQPDEQLDNDALIDEKYRGIRPAPGYPACPEHTEKVTLWKLMDVKERTGIELTESMAMWPGAAVSGWYFSHPQSQYFVVGRLAQDQVADYAKRKGWTLAEAERWLAPNLGYNPED

SEQ ID NO: 61707 - protein, 109 aa, Mycobacterium avium
MSEPVCCAPVAAGPADDAAALDVAMRLKALADPVRVKLMSLLFTADGTCTTGSLAAAVGLSESTVSHHLGQLRTAGFVASDRQGMSVHHTARREALTALCRVLDPSCCT

SEQ ID NO: 61708 - protein, 750 aa, Mycobacterium avium
MTTTAPAVGSFADVPLRSERPVAPATEAAVEEHVAAIAAAHLYTPDQLHWHTPEDIAVKPVYIGADRAAVEADGYPLHTFPGEPPFVRGPYPTMYVNQPWTIRQYAGFSTAAESNAFYRRNLAAGQKGLSVAFDLATHRGYDSDHPRVQGDVGMAGVAIDSILDMRQLFDGIDLSTVSVSMTMNGAVLPILALYVVAAEEQGVPPEKLAGTIQNDILKEFMVRNTYIYPPKPSMRIISDIFAYTSAKMPKFNSISISGYHIQEAGATADLELAYTLADGVDYIKAGLDAELDIDKFAPRLSFFWGIGMNFFMEVAKLRAGRLLWSELVSQFNPKNPKSLSLRTHSQTSGWSLTAQDAFNNVARTCIEAMAATQGHTQSLHTNALDEALALPTDFSARIARNTQLVLQQESGTTRPIDPWGGSYYVEWLTHHLARKARAHIAEVAEHGGMAQAISDGIPKLRIEEAAARTQARIDSGIQPVIGVNKYQVEEDQEVEVLKVENSRVRAEQLAKLKELRDSRDQSAVDAALAELSRAAAAQGRAGEDGLGNNLLALAINAARAKATVGEISDALEKVYGRHQAEIRTIAGVYRDEAGKATNIATATELVEKFAEADGRRPRILVAKMGQDGHDRGQKVIATAFADIGFDVDVGSLFSTPEEVARQAADNDVHVVGVSSLAAGHLTLVPALRDALKEVGRPDIMIVVGGVIPPGDFDELYAAGAAAIFPPGTVIADAAIGLLHKLAERLGYDLG

SEQ ID NO: 61709 - protein, 169 aa, Mycobacterium avium
MAKGSGRAKAAGGKGGSKQIIATNRKARHNYSIIETYEAGVALQGTEVKSLREGQASLADAFATIDDGEVWLRNLYIPEYQHGSWTNHDPRRNRKLLLHRQQIDRLVGKIRDGNLALMPLSLYFSEGKVKVELALARGKKAYDKRQDLAQRDAQREVVRQLGRRTKGMI

SEQ ID NO: 61710 - protein, 317 aa, Mycobacterium avium
MIVVIGAGVCGLAAAHELSRRGHDDVVVLEKGQPFGEQSAGLARIFRIAHQREALCRLAFAARAGWQRWEAEFGVGRLLGSEGFIAAGAAADGVAQAMKRAGAAFSRLDRDGIAERIPFADVPWETGIFDPLGGSLRIRRALTALARRVVIRCGEVVSVADDGRTVLADGTVLRADRVLICAGVATPKLFGPLGVGFVPHTRFTYRGADATGAACLSAPEGYGLPLGGTGRWAFGQEVADPATVRALFPSLVAVDRVDCVSVRAPWLDSGGDGWTVARRGRVLAFVGANLMKFGPLLGELLARAALSDDIPAELLLD

SEQ ID NO: 61711 - protein, 398 aa, Mycobacterium avium
MGPLSGVTVVSLEQAVAAPYATRQLADLGARVIKVERPDGGDFARGYDHSVHGDSSYFVWLNRGKESLTLDLKTLEGQRILRQLLANSDVLVQNLGPGATTRLSLDATTLTPEYPRLIVCDITGYGGTGPWRDRKAYDLLVQAEAGLLSVTGSGDEVARTGVSIADIAAGMFAFSGILTALYVRATTGDVRPVSVSLFESLVELVSQPAYYAHYGGTAPPRTGARHATIAPYGPFTAGDGGTVLLAVQNQREWRRLCDEVLATPGLCEDPRFVTNPDRVTHRDELEAIIHAAIASMTADELAHRLEAAGIANARMNDVETLWSHPVLAGRDRWREVRAPGGAIEALLPPATLRDVEPQLGDVPGLAAHSRMILRELGYTNEAIADLVRSGVTTVASDH

SEQ ID NO: 61712 - protein, 252 aa, Mycobacterium avium
MNPGISIEREGGILRLTLDRPDKLNAVDTPMLNELLGRLDESADDASVRAVLLTGAGRAFCSGGDLTGGDTEGAAQAANDVVRAITELPKPVVAGVHGPAVGVGCALALACDLVVATRAAYFQLAFSKLGLMLDGGASVLLPAAIGRARAARVAMTAEKITAATAFEWGLISYVVDDDAYETDLAELTSTLANGPTHSYRWIKRALSAATLSDLESVQSLEADGQRLLVRTSDFAEGVRAFRERRPTEFRGE

SEQ ID NO: 61713 - protein, 306 aa, Mycobacterium avium
MQMSREGTRMRIAMISEHASPLAHLGGVDAGGQNVHVAELSCALARRGHDVVVYTRRDDPRLPDSVETPHGYSVVHVPAGPARVLPKDELLQYMYGFAQFLRQQWCSDGPDVAHAHFWMSGVATQQAARAHSIPTVQTFHALGLTKRLHQGSDDTSPDCRIDVEARVAREADWVAATSTDEVFELVRMGRARSRTSVVPCGVDLDAFTPDGPVAARGARPRIVTVGRLVPRKGFDTIVRALPRIPDAELVIVGGPPAAELAGDEQARRLQRLAGELGVADRVRLLGGVTRAQMPALLRSADVVACT

SEQ ID NO: 61714 - protein, 371 aa, Mycobacterium avium
MTSGSLEFTVSRSTRPATDAERETILAEPGFGKYFTDHMVSIEYDETEAGRGWHDARVIPYGPIELDPSAIVLHYAQEIFEGLKAYRWADGSIVSFRAQANAARLRSSARRLAIPELPEELFLESLRQLIAVDNAWVPAAGGEEALYLRPFVIATEPGLGVRPSKQYRYLLIASPAGAYFKGGISPVTVWVSTEYVRASPGGTGAAKFGGNYAASLSAQAEAAANGCDQVVWLDAVERRFVEEMGGMNIFFVFGSGGSARLVTPELSGSLLPGITRDSLLQLAIDAGFAVEERKIDIDEWQKKAAAGEITEVFACGTAAVITPVSQVKYGETEFTIADGQPGEVTMALRDTLTGIQRGTFADTHGWMTRLG

SEQ ID NO: 61715 - protein, 367 aa, Mycobacterium avium
MSNEADLLHGPLEDRHRDLGASFAEFGGWLMPVSYAGTVSEHNATRNAVGLFDVSHLGKALVRGTGAARFVNSALTNDLNRIGPGKAQYTLCCNESGGVIDDLIAYYVDDDEIFLVPNAANTAAVVEALQGAAPAGVTVSNLHRSYAVLAVQGPRSADVLAELGLPSDMDYMAYADTSFRQVPVRVCRTGYTGEHGYELLPPWESAGVVFDALAAAVSQAGGQPAGLGARDTLRTEMGYPLHGHELSPDISPLQARCGWAIGWKKEAFFGRDALLAEKEAGPRRLLRGLRMVGRGVLRAGLTVLVGDTPVGVTTSGTFSPTLQAGIALALIDTDADVRDGQKVTVDVRGRAATCEVVRPPFVAVKTR

SEQ ID NO: 61716 - protein, 518 aa, Mycobacterium avium
MMRMSTEPGYASPVVNVASSLPRRAAASTVLIVPVVSTGDDDKPGAVVAPAGSFLSSDAVAEIESGLRALAATGGAEQLHRLVVGSLPVSSVLTVGLGKPRSEWPADTVRRAAGVAARSLSNTETVFTTLAALPGEGVASAAVEGLILGSYRFTEFRSAKTAPKDKGLQKITVLATAKDAKQEVAHGAAVATAVATARDLVNTPPSHLFPDEFAKRARALGESVGLEVEVIDEKALQKGGYGGILGVGQGSSRPPRLVRLIHRGSRLAKKSKQAKKVALVGKGVTFDTGGISIKPAASMHHMTSDMGGAAAVIATVALAARLQLPIDVIATVPMAENMPSGTAQRPGDVLTQYGGTTVEVQNTDAEGRLILADAIVRACEDNPDYLIETSTLTGAQTVALGARIPGVMGSDEFRDRVAAISQRVGENGWPMPLPDELKEDLKSTVADLSNISGQRFAGMLVAGVFLREFVADGVGWAHIDVAGPAYNTGSPWGYSPKGATGVPTRTMFAVLEDIAANG

SEQ ID NO: 61717 - protein, 245 aa, Mycobacterium avium
MRVGVLGAKGKVGSTMVAAVQAAEDLTLSAEVDAGDPLSLLTDGGTEAVIDFTHPDVVMGNLEFLVRNGIHAVVGTTGFTAERLAQVREWLVDSPGTSVLIAPNFAIGAVLSMHFAKQAARFFDSAEVIELHHPHKADAPSGTATRTAKLIAEARKGLPPNPDATSTSLPGARGADVDGIPVHAVRLAGLVAHQEILFGTEGETLSIRHDSLDRTSFVPGVLLAVRRIREHPGLTVGLEPLLDLG

SEQ ID NO: 61718 - protein, 867 aa, Mycobacterium avium
MTALNNPTSIFATTRTEVVVDSFNPTTKTQAALTAALQAASAAGNPEIRPAHLLMALLTQADGIAAPLLEAVGVEPATIRAEAERMLARLPQASGASSQPQLSRESLAAITTAQHLATELDDEYVSTEHLMVGLATGDSDVAKLLTGHGASPQALREAFVKVRGSARVTSPDPEATYQALEKYSTDLTARAREGKLDPVIGRDNEIRRVVQVLSRRTKNNPVLIGEPGVGKTAIVEGLAQRIVAGDVPESLRDKTVIALDLGSMVAGAKYRGEFEERLKAVLDDIKNSAGQIITFIDELHTIVGAGATGEGAMDAGNMIKPMLARGELRLVGATTLDEYRKYIEKDAALERRFQQVFVGEPSVEDTVGILRGLKDRYEVHHGVRITDSALVAAATLSDRYITARFLPDKAIDLVDEAASRLKMEIDSRPVEIDEVERLVRRLEIEEMALAKEEDEASKERLEKLRSELADQKEKLAELTTRWQNEKNAIDVVRELKEQLETLRGESDRAERDGDLAKAAELRYGRIPEVEKKLEAALPQAEARENVMLKEEVGPDDIAEVVSAWTGIPAGRMLEGETAKLLRMEDELGKRVVGQKRAVQAVSDAVRRARAGVADPNRPTGSFMFLGPTGVGKTELAKALADFLFDDERAMVRIDMSEYGEKHSVARLVGAPPGYIGYDQGGQLTEAVRRRPYTVILFDEIEKAHPDVFDVLLQVLDEGRLTDGQGRTVDFRNTILILTSNLGSGGSEEQVMAAVRSAFKPEFINRLDDVIIFHGLEPGELVQIVDIQLAQLQKRLAQRRLTLEVSLPAKQWLAHRGFDPVYGARPLRRLVQQAIGDQLAKQLLAGQVHDGDTVPVNVSPDGDSLILG

SEQ ID NO: 61719 - protein, 394 aa, Mycobacterium avium
MTSTLPDARPAVAALNPLEDYLAACKQACDREIVRLYGSGERGSNGLYQLILDYPLRGGKALRPALSIATCLGLGGHLEAILPTAATLELYHNAFLIHDDIEDESWWRRGKPTLHIDHGVPVAVNVGDAMLSLSLQPLLDNVERVGLGPALRILRAVATMTRKTVDGQALELDWVHSNTWRLDDADYLEMVELKTSWYSFITPLQAGAVAAGSTPDRMAPLESLGRHLGAAFQITDDLLNLRADPQEYGKEIGGDLWEGKRTLMLLHTLRHAEPGDQQRAVQILSRRRPSPDAEFDLTELLDRLTAGGQLSVSGRTEIEARLRRHHHSEVKSLNDIRWLYELMHRVGSLNHARDVAVRQARQAAAVLAGLDWFPRSRHRDMLAALVDYVHGRAR

SEQ ID NO: 61720 - protein, 913 aa, Mycobacterium avium
MSTRAEPRPSDPLGRFSAITREWFTSTFAAPTTAQAQAWSAIADGHNTLVIAPTGSGKTLAAFLWALDSLAGQAERAPGTRVLYVSPLKALAVDVERNLRTPLAGLTRIAERAGLPAPDISVGVRSGDTPPAVRRQLINRPPDVLITTPESLFLMLTSAARETLAGVQTVIVDEIHAIAGGKRGAHLALSLERLDALREGRPAQRIGLSATVRPPDELARFLSGAAPGTRTTVVAPPSAKTVELSVQVPVPDMANLANNTIWPDVENRLVDLIEAHGSTIVFANSRRLAERLTARLNEIHAERSGVELSATANPKVAGGAPAHIMASGQTYGVEPILARAHHGSVSKEQRALVEEDLKRGLLKAVVATSSLELGIDMGAVDLVIQVEAPPSVASGLQRIGRAGHQVGEVSRGVLFPKHRTDLIGCAVTVQRMLAGQIETMRVPANPLDILAQQTVAAAALEPLDADRWFDTVRRAAPFATLPRSIYEATLDLLSGKYPSTEFAELRPRLVYDRNTGTLTARPGAQRLAVTSGGAIPDRGLFTVYLASEAEKPSRVGELEEEMVYESRPGDVISLGATSWRITEITHDRVLVIPAPGQPARLPFWRGDGVGRPAELGAALGAFTGELAGLSREEFDSRCAALGFDAYAVDNLYGLFDEQRTAAGVVPTDTTLLVERFRDELGDWRVILHSPYGLGVNGPLALAVGRRLRERYGIDEKPTASDDGVVVRLPDTVSDFASDGGDTPPGAELFVFDADEIDPIVTAEVGGSALFASRFRECAARALLLPRRHPGRRSPLWQQRQRAAQLLEVARKYPDFPVVLETVRECLQDVYDVPALVALMAGIAQRRVRVLEVETQRPSPFAASLLFGYVGAFMYEGDSPLAERRAAALSLDSTLLAELLGRVELRELLDPEVV

SEQ ID NO: 61721 - protein, 441 aa, Mycobacterium avium
MRCTVFGTGYLGATHAVGMAELGHDVLGVDIDPGKVAKLAGGDIPFYEPGLRKLLNENLAAGRLRFTTDYDMAAGFADVHFLGVGTPQKKGEYGADLRHVYAVIDELVPRLTTSAVLVGKSTVPVGTAAELNQRAAALAPRGVNVEIAWNPEFLREGYAVQDTLRPDRIVLGIKQDSPRAEAAVRELYGPLLDAGVPFLVTDLQTAELVKVSANAFLATKISFINAISEVCEAAGADVSLLADALGYDPRIGRQFLNAGLGFGGGCLPKDIRAFMARAGELGADQALTFLREVDSINMRRRTRMVELASAACGGSLLGANVAVLGAAFKPESDDVRDSPALNVAGQLQLNGAAVNVYDPKALDNAQRLFPTLNYAVSVEEACERADAVLVLTEWRQFVEMDPDDLADRVRARVVVDGRNCLDVTRWQRAGWRVYRLGAPRP

SEQ ID NO: 61722 - protein, 469 aa, Mycobacterium avium
MARAVGIDLGTTNSVVAVLEGGDPVVVANSEGSRTTPSIVAFARNGEVLVGQPAKNQAVTNVDRTIRSVKRHMGTDWSIEIDGKKYTAQEISARVLMKLKRDAEAYLGEDITDAVITVPAYFNDAQRQATKEAGQIAGLNVLRIVNEPTAAALAYGLDKGEKEQTILVFDLGGGTFDVSLLEIGEGVVEVRATSGDNHLGGDDWDDRIVNWLVDKFKGTSGIDLTKDKMAMQRLREAAEKAKIELSSSQSTSINLPYITVDADKNPLFLDEQLTRAEFQRITQDLLDRTRQPFKSVIADAGISVSDIDHVVLVGGSTRMPAVTDLVKELTGGKEPNKGVNPDEVVAVGAALQAGVLKGEVKDVLLLDVTPLSLGIETKGGVMTKLIERNTTIPTKRSETFTTADDNQPSVQIQVYQGEREIAAHNKLLGSFELTGIPPAPRGVPQIEVTFDIDANGIVHVTAKDKGTGK

SEQ ID NO: 61723 - protein, 521 aa, Mycobacterium avium
MVLLDGTSSHPRELLGNKGHGIEVMRRHHLPVPPAFCLTTAVGLRYLADPAATMDAVWDDVLDRIGWLQAQTSRAFGRGPHPLLVSVRSGATQSMPGMMDTLLNLGINDSVEQALAAEHGPAFARDTHRRFREMYRRIVGVERPVPSDPYTQLRAGIEAVFASWNSPRARAYRAHYGFADRHGTAVVVQAMVFGNHGPNSGAGAFFSRNPITGDDEPFGEWLPGGQGDDVVSGSVDVEPIAALRDEQPAVYDQLMAAARTLERLDRDVQEIEFTVEDGALWLLQTRAAERSAQAAVRSALQLRREGLIDDAETLRRVTPAHVRSLLMPALQPEIRLTAPLLAKGLPACPGVVSGTAYADVDEALHAAERGEPVILVRDHTRPEDVSGMLAARGIVTEVGGAASHAAVVSRELGRVAVVGCGAGVAAMLAGRRITVDGAEGEVREGELSLSAWSENDTPELRELAEIARLISPLRAHSGGDHPRLDDDSESAVRAALAAGQTDVVSPTPLLVMLTALRQGAP

SEQ ID NO: 61724 - protein, 297 aa, Mycobacterium avium
MHDKTIGGETVSDAAIQRVGVVGAGQMGSGIAEVSVRADVDVTVFETTEALITAGRNRIVKSLERGVSAGKVTERERDRALSKLTFTTDLKDLADRQLVIEAIIEDDAVKAQVFAELDRVVTDPDAVLASNTSSIPIMKLAAATKNPQRVLGLHFFNPVPVLPLVELVSTLVTDEAAAARTEEFASAVLGKQVVRCSDRSGFVVNALLVPYLLSAIRMVEAGFATVEDVDKAVVAGLSHPMGPLRLSDLVGLDTLKLIADKMFEEFKEPQYGAPPLLLRMVEAGRLGKKTGQGFYTY

SEQ ID NO: 61725 - protein, 300 aa, Mycobacterium avium
MSIFLNKDSKVIVQGITGGEGTKHTALMLKAGTQVVGGVNARKAGTTVSHVDPVGKDVELPVFGTVSEAMKETGANVSVVFVPPKFAKDAIIEAIDAEIPLLVVITEGIPVQDSAYAWAYNVDKGQKTRIIGPNCPGIITPGEALAGITPANISGPGPVGLVSKSGTLTYQMMYELRDFGFSTSIGIGGDPIIGTTHIDAIEAFEKDPDTKIIVMIGEIGGDAEERAADYIKAHVSKPVVGYVAGFTAPEGKTMGHAGAIVSGSSGTAAAKKEALEAAGVKVGKTPSETAALAREILQSL

SEQ ID NO: 61726 - protein, 353 aa, Mycobacterium avium
MAATNTAPTSPDPRSHDTVTPPSSACARQIVAAPPGRKRPAPSPSHGSFDVEVAGQEIQHGVGENVVAVAGDHVPRPAHVGEFDLGEARQELVGALLADQVAHLAADHQDGHAVAQDRLDGRVHPIGVGDLERRESRCAADELRIPVPIPAIAAATQVGGQALQIGWPRPVRVVFGDRVGDLVERGESRVHPVGHEGVNPVGPGLIHVRHDVHQHDRARDARGQFAGEQHRGETAERGADQHRLRGQRAQHRLHVGGEADDPVVAVAGPVRFAVPAQVDGDRLPPAGGDGGGRLAPRPPRLPAAVQEHHGARARIPETVGDDLNAAGAADREGFGCHGHQVILRRPPAGPAVA

SEQ ID NO: 61727 - protein, 227 aa, Mycobacterium avium
MQPRSRRPLRRAQLSDEVAGHLRAAIMSGALRPGTFIRLDETAAELGVSVTPVREALLKLRGEGMVQLEPHRGHVVLPLTRQDIEDIFWLQATIAKELAAAATDHITDTEIDELDRINDALAAAVGSGDAETIAGLEFGFHRVFNQASGRIKLAWFLLNAARYMPVLVYAADPQWGRAAVDNHRQLIAALRRRDTAAVIEHTVWQFTDAAARLTAMRDRTGTPSNRG

SEQ ID NO: 61728 - protein, 344 aa, Mycobacterium avium
MDAMTHRKRRHIDVCLSDPVEFDGVTTGLDRYRLPYHALTQTSLGDIDVSTSFFGANLRAPILIGAMTGGAEMSKTINRNLAAAAQQLGIGMMLGSQRIMLDSALGERAADSFAVRDVAPDVLLFGNIGLSQLAKTAVPHLVKALDRVGADALAVHTNPLQEAMQHNGDTDFSGSLSRLREAAAALDYPVLLKEVGHGIGGAAAAELVGGEGQPPVAGIDVAGAGGTSWSRVEQFVRYGELRYPDLADWGVPTARAIVEVRRLLPEIPLVASGGIRTGMDAAKAIALGADVVAVARPLLPAAIESSAAVVDWLRPFIDELRVCLHGCGVADLAGLRAVELIRLA

SEQ ID NO: 61729 - protein, 451 aa, Mycobacterium avium
MGLHYASVVDAAITEVFDWHARPGAFERLSPPWSPIRLLTEAASLKDGRATLALPGGLRWVAVHRPDGYDPPRRFVDSIGGDGLAALPARIAVRWRHIHEFEDVGGDRTRVIDRVETPVPASLLRPMFDYRHRQLAGDLAAHRLAAQHGLRPLTVAVTGSSGLVGSALTAFLRTGGHRVIRLVRRAARGDDERRWDPEDPDPGLCDGVDAVIHLAGASIAGRFTDRHREAVRDSRIGPTRRLAELLGRGRPRPAALISASAIGYYGYDRGDETLTEDSDRGDGFLADVVADWEQATTPALDAGVRVMQVRTGIVQSPRGGTLKLMRPLFSAGLGGRLGDGRQWLSWIGIDDLIDVYHRALWDSRLNGPVNAVAPQPVRNREYTTALAAVLHRPAVLPVPSLGPRLLLGGQGARELAGASQRVAPAKLAAAGHRFRHPDIERALRHLLGRGG

SEQ ID NO: 61730 - protein, 543 aa, Mycobacterium avium
MIGIMYTVTCFAFFFIGGLMALLMRTELAAPGLQFLSNEQFNQLFTMHGTIMLLLYATPVVFGFANLVLPLQIGAPDVAFPRLNAFSFWLFLFGGLIAASGFIVPGGAADFGWTAYTPLSDAVHSPGAGGDLWITGLIVAGLGTILGAVNMITTVVCMRAPGMTMFRMPIFTWNILVTSILILIAFPILTAALFGLAADRHLGAHVYDAANGGVLLWQHLFWFFGHPEVYIIALPFFGIITEIIPVFARKPVFGYTTLVYATLSIAALSVAVWAHHMFATGAVLLPFFSFMTYLIAVPTGIKFFNWIGTMWKGQLTFETPMLFCVGFLLTFLLGGLTGVMLASPPLDFHVTDTYFVVAHFHYVLFGTIVFATFAGVYFWFPKMTGRLLDERLGKLHFWLTFIGFHTTFLVQHWLGDLGMPRRYADYLPSDGFQPYNVASTVGAFILGASMFPFVWNVFKSWRYGEVVTVDDPWGYGNSLEWATSCPPPRHNFTELPRIRSERPAFELHYPHMVERLRAEAHVGRAHGPADKDVTRLDDVQVRS

SEQ ID NO: 61731 - protein, 254 aa, Mycobacterium avium
MAASIGCPAMTTMWGAPLHRRWRGSNLRDPRQAKFLTLASLKWVLRNRAYTPWYLVRYWRLLKFKLANPHIITRGMVFLGKGVEIHATPELAQLEIGRWVHIGDKNTIRAHEGSLRFGDKVVLGRDNVINAYLDIELGDSVLMADWCYVCDFDHRMDDINVPIKDQGIVKSPVRIGPDTWVGVKVTVLRGTSIGRGCVLGSHAVVRGVIPDYSIAVGAPAKVVKNRQLSWESSAAQRAELAAALADIERKKASR

SEQ ID NO: 61732 - protein, 505 aa, Mycobacterium avium
MASRWRTKSVEQSIADTDEPDTRLRKDLTWWDLVVFGVAVVIGAGIFTVTASTTGDITGPAIWVSFVIAAGTCALAALCYAEFASTLPVAGSAYTFSYATFGEFLAWIIGWNLLLELAIGAAVVAKGWSSYLGTVFGFSGGTVKFGAAQLDWGALVIVGGVATLIALGTKLSSRFSAVITGIKVSVVVFVVVVGVFYIKRANYSPFIPKPEAGGQAKGIDQSVLSLLTGAHTSHYGWYGVLAGASIVFFAFIGFDIVATMAEETKHPQRDVPRGILASLGIVTLLYVAVAVVLSGMVSYTQLKTMPGRGQANLATAFTANGIHWASKIISIGALAGLTTVVMVLMLGQCRVLFAMARDGLLPRALAKTGSRGTPVRITVLVALVVAVTASVFPITKLEEMVNVGTLFAFVLVSAGVMVLRRTRPDLERGFKAPWVPVLPIASIGACVWLMLNLTALTWVRFGIWLVVGTAIYAGYGYWHSVQGRRDAGEPDRSDALAADPNSPVP

SEQ ID NO: 61733 - protein, 408 aa, Mycobacterium avium
MELLRGALRTYAWGSRTAIAEFTERPVPAAHPEAELWFGAHPGDPAWLETDNGEITLLDALRADPEGQLGPGSRARFGDVLPFLVKVLAADEPLSLQAHPSAEQAAEGYLREERLGIPLNSPVRNYRDTSHKPELLVALYPFEALAGFRPASRTVELLRALAVSDLDPFIELLGDQSDADGLRALFTTWITAPQPDIDVLVPAVLDGAIAYLSSGATEFAAEAKTVLELGERYPGDAGVLAALLLNRVSLAPGEAIFVSAGNLHTYLRGFAVEVMANSDNVLRGGLTPKHVDVPELLRVLDFAPTTEDQLRPRVRREGFGRIYETPTDEFAVALLELEDEYVGHEVDATCSHDGPQILLCIQGCTTVHGKSGSLRLKRGMAAWVAADDAPIRLVAHEPTKLFRATVGL

SEQ ID NO: 61734 - protein, 210 aa, Mycobacterium avium
MLIAIEGVDGAGKRTLAEGLRKAFEAAGQSVATLAFPRYGRSVTADIAAEALHGEHGDLASSVYAMAMLFALDRAAAVGDIEGLRRDHDVVIMDRYVASNAAYTAARLHQDADGPAVAWVHTLEYGRLKLPAPDRQVLLAVSAELAAERARSRAESDPGRARDSYERDDGLQQRTGAVYAQLAAAGWGGAWRVVDADVDPARLAADLAAE

SEQ ID NO: 61735 - protein, 212 aa, Mycobacterium avium
MNKAELIDVLTQKLNTDRRQATAAVENVVDTIVRAVHKGDSVTITGFGVFEQRRRAARVARNPRTGETVKVKPTSVPAFRPGAQFKAVVSGAQRLPSEGPAVKRGVVGGAAKKTAAKKAPAKKAAAKKAPAKKAAAKKAPAKKAAVKKAPARKAATKAPVRKAATKAPAKKVAAKKAPAKKAATKAPAKKAASKAPARKAAAKKTTARRGRK

SEQ ID NO: 61736 - protein, 343 aa, Mycobacterium avium
MRIGVLTGGGDCPGLNAVIRAVVRTCDSRYGSSVVGFQDGWRGLLENRRIQLHNDDRNDRLLAKGGTMLGTARVHPDKLRAGLNQIKQTLDDNGIDVLIPIGGEGTLTAAHWLSEENVPVVGVPKTIDNDIDCTDVTFGHDTALTVATDAIDRLHSTAESHQRVMLVEVMGRHAGWIALNAGLASGAHMTLIPEQPFDVEEVCRLVKRRFQRGDSHFICVVAEGAKPIPGSISLREGGIDEFGHERFTGVAAQLGAEVEKRINKEVRVTVLGHVQRGGTPTAYDRVLATRFGVNAADAAHAGEYGQMVSLRGQDIGRVPLADAVRQLKLVPESRYDDAAAFFG

SEQ ID NO: 61737 - protein, 493 aa, Mycobacterium avium
MNEIIRSDAATLAARIAAKELSSVEATQACLDQIAATDERYHAFLHVAADEALGAAAVVDEAVAAGERLPSPLAGVPLALKDVFTTVDMPTTCGSKILQGWRSPYDATVTTKLRAAGIPILGKTNMDEFAMGSSTENSAYGPTRNPWNVERVPGGSGGGSAAALAAFQAPLAIGSDTGGSIRQPAALTATVGVKPTYGTVSRYGLVACASSLDQGGPCARTVLDTALLHQVIAGHDIRDSTSVDAPVPDVVGAARAGAAGDLKGVRVGVVKQLRGEGYQPGVLASFEAAVEQLTALGAEVSEVDCPHFEYALAAYYLILPSEVSSNLARFDAMRYGLRIGDDGSHSAEEVMALTRAAGFGPEVKRRIMIGTYALSAGYYDAYYNQAQKVRTLIARDLDAAYESVDVVVSPATPTTAFGLGEKVDDPLAMYLFDLCTLPLNLAGHCGMSVPSGLSPDDDLPVGLQIMAPALADDRLYRVGAAYEAARGPLRSAI

SEQ ID NO: 61738 - protein, 98 aa, Mycobacterium avium
MSQISRDEVAHLARLSRLALTDAELDSFAGQLDAILTHVSQVQAVDVTGVEPTDNPLKDLNVTRPDEPMPCLTQAEALAEAPEAVDGRFAVPQILGDE

SEQ ID NO: 61739 - protein, 470 aa, Mycobacterium avium
MVRTALFNWAYARHTGGTFVFRIEDTDAARDSEESYLALLDALRWLGLDWDEGPEVGGPYGPYRQSQRGEIYRDVVAKLVEAGEAYYAFSTPEEVEARHIAAGRNPKLGYDNFDRHLTDSQRAAFLAEGRQPVVRLRMPDEDLGWDDLVRGSTVFAAGSVPDFALTRANGDPLYTLVNPCDDALMKITHVLRGEDLLPSTPRQLALYQALIRIGVAERIPQFAHLPTVLGEGTKKLSKRDPQSNLFAHRDRGFIPEGLLNYLALLGWAIADDRDVFSLDEMVAAFDVVDVNSNPARFDQKKADALNAEHIRMLTAADFAARLRDYLDVHGHRLALDDAAFATAAELVQTRIVVLGDAWDLLKFLNDDEYAIDPKAAAKELGPDGAAVLDAALPALDAVTDWAAPQIEAALKTALIDGLGLKPRKAFGPIRVGATGTTISPPLFESLQLLGRDRSLRRLRAARERAGQHSA

SEQ ID NO: 61740 - protein, 434 aa, Mycobacterium avium
MQTDPVATPDVGAGTRWSIMVVSLLATASSFLFINGVAFLIPSLQGARGIRLDEAGLLASMPSWGMVVTLVAWGYVLDRVGERVVMTTGSALTALAAYAASSAHSMVLIAVYLFLGGMAAASCNTAGGRLVSAWFPPHQRGLAMGIRQTAQPLGIALGAMVIPELAEHGPQAGLRFTALACVFGAVASVIGIVDPPRKPRASASDQELASPYRGSLTLWRIHAVAGLMMMPQTVTVTFMLVWLIRNLHWSVAAAGALVTLSQLLGALGRVAVGRWSDRLGSRMRPVRYIAAAAVLVLLLLAWADYLNSRWQAGLMVAISVIAVLDNGLEATAITEFAGPYWSGRALGIQNTTQRMMAAAGPPLFGALISAAKYPPAWLLCALFPLAAMPLVPTRLLPPGLETRARRQSVRRLRWWRAVRSHALPDIVRRPGQPG

SEQ ID NO: 61741 - protein, 693 aa, Mycobacterium avium
MSSAEADSVPPEVRRQWQELAETVREHQFRYYIKDAPIISDAEFDALFNELLALEERHPELRVADSPTQLVGGAGFATDFAEAAHLERMLSLDDVFDTDELIAWSNRVENEIGKDPHYLCELKIDGVALSLVYRDGRLERAATRGDGRVGEDVTLNARTIDDVPERLSPSDDFPVPALLEVRGEVFFLLADFEALNASLVEDGKAPFANPRNSAAGSLRQKNPAVTARRKLRMICHGIGRTEGFSPKTQHEAYTALSVWGLPVAEQTARVRGLAAVQERIGYWGEHRYELQHEIDGVVVKVDDVALQRRLGATSRAPRWAVAYKYPPQEAQTKLLDIRVNVGRTGRVTPFAFMTPVKVAGSTVGLATLHNAAEVKRKGVLIGDTVMIRKAGDVIPEVLGPVVDLRDGTEREFVMPTTCPECGTPLAPAKEGDADIRCPNARSCPAQLRERVFHVAGRGALDIEGLGYEAATALLKAGVIADEGDLFALTEDDLLRTELFRTKAGTLSANGTRLLQNLQKAKKVALWRVLVALSIRHVGPTAARALATEFGDLDSIMSASTERLAAVEGVGPTIAAALTEWFTVDWHRAIVDKWRGAGVRMADERDASVPRTLEGLTVVVTGSLAGFSRDDAKEAILARGGKAAGSVSKKTDYVVAGDSPGSKYDKAVELGVPILDEDGFRKLLAEGPPETPAD

SEQ ID NO: 61742 - protein, 333 aa, Mycobacterium avium
MFYDDDADLTIIQGRKVGVIGYGSQGHAHSLSLRDSGVQVKVGLKEGSKSRAKVSEQGLDVDTPAAVAKWADVIMLLAPDTAQADIFKNDIEPNLSDGDALFFGHGLNIHFGLIKPPAEVTVAMVAPKGPGHLVRRQFVDGKGVPCLIAVDQDPTGKGEALALSYAKAIGGTRAGVIKTTFKDETETDLFGEQAVLCGGTEELVKAGFDVMVEAGYPPEMAYFEVLHELKLIVDLMYEGGIARMNYSVSDTAEFGGYLSGPRVIDAGTKDRMREILRDIQNGDFVKKLVANVEGGNKQLEQLRKENAEHPIEVVGKRLRDLMSWVDRPITETA

SEQ ID NO: 61743 - protein, 168 aa, Mycobacterium avium
MSPQTHTLSVLVEDKPGVLARVAALFSRRGFNIESLAVGATEQKDMSRMTIVVSAEETPLEQITKQLNKLINVIKIVELEDGNSVSRELALIKVRADAGTRSQVIEAVNLFRAKVIDVSPEALTIEATGDRGKIEALLRVLEPFGIREIVQSGVVSLSRGPRGIGTAK

SEQ ID NO: 61744 - protein, 622 aa, Mycobacterium avium
MSAPTRRPAPDAPGAAGIAPAPPAPAAKPAAGKPKRIGPEQVTGAQSVIRSLEELGVEVIFGIPGGAVLPVYDPLFDSKKLRHVLVRHEQGAGHAASGYAHATGKVGVCMATSGPGATNLVTALADAQMDSIPVVAVTGQVGRTLIGTDAFQEADISGITMPITKHNFLVRSGNEIPQVLAEAFHIAASGRPGAVLVDIPKDVLQGQCTFSWPPRIHLPGYKPTTKPHSRQIREAAKLIAAARKPVLYVGGGVIRGEASEQLRELAELTGIPVVTTLMARGAFPDSHRQHLGMPGMHGTVAAVAALQRSDLLIALGTRFDDRVTGKLDTFAPEAKVIHADIDPAEIGKNRHADVPIVGDVKAVIAELVEMLRHDGAPGNLDIADWWAYLDDVQSTYPLSYGPQSDGSLGPEYVIEKLGQIAGPDALYVAGVGQHQMWAAQFISYEKPRTWLNSGGLGTMGFAIPAAMGAKMGRPEAEVWAIDGDGCFQMTNQELATCAVEGIPIKVALINNGNLGMVRQWQTLFYEERYSQTDLATHSHRIPDFVKLAEALGCVGLRCEREEDVVDVINAARAINDRPVVIDFIVGADAQVWPMVAAGTSNDEIQAARGIRPLFDDETEGHA

SEQ ID NO: 61745 - protein, 329 aa, Mycobacterium avium
MAVGPPGRQPYGGGVRDESTLRQLGEFGVIDRLVAGRRQPAAVTLGPGDDAALVTTGDGRVVVSTDMLVQDRHFRLDWSTPHDIGRKAIAQNAADIEAMGARPTAFVVGFGAPGQTAAAQVDALVDGMWDEAQRVGAGIAGGDLVSCPQWVISVTALGELDGRSPVCRAGAEPGALIAVAGDLGRSAAGFDLWRNQIGGFDELRRRHAVPQPPYGQGAVAAAGGAQAMIDVSDGLIADLRHVAEASGVGMDVSTAALAADRDAVAAAAAAVGVDAWPWVLTGGEDHALVACFPGPAPAGWRIIGRVLDGPARVLVDEREWSGPAGWQSY

SEQ ID NO: 61746 - protein, 369 aa, Mycobacterium avium
MNASQRVRVAVVFGGRSNEHAISCVSAGSILRNLDPRRFEVVAIGITPQGSWVLTDGDPAALAISDRQLPEVTSASGTELALPADPGRSGQLVSLPPGASEVLASVDVVFPVLHGPYGEDGTIQGLLELAGVPYVGAGVFASAAGMDKEFTKKLFAAEGLPIGDYAVLRPSQSTLSLQDRERLGLPVFVKPARGGSSIGVSRVSSWDELDAAVAAARDHDPKVIVEAAIAGRELECGVLEMPDGTVQASTVGEIRVAGVRGREDSFYDFATKYLDDTAELDVPAKVDDEIADAVRELAIRAFKAVDCQGLARVDFFLTETGPVLNEINTMPGFTTISMYPRMWAASGVDYPSLLATMVETALTRGVGLR

SEQ ID NO: 61747 - protein, 310 aa, Mycobacterium avium
MTSPAARLRRYEIGKVIALTNPASGHGAAVAAAQRAIARLHRRGVEVVEIIGDDAQDARHLVGAALDKGADAVMVTGGDGVFSNALQVLAGTDIPAGIVPAGTGNDHAREFGIPTKDPEAAADIIVDGWAETVDLGRIRADNGFDKWFGTVAATGFDSLVTDRANRMRWPHGRLRYYVAMLAELSQLRLLPFRLVLDGAREIDADITLAAFGNTRSYGGGMRICPAADHADGLLDITMVHEASRAKLVRLFPTVMKGTHVELEQVSTARAKSIHVECPGINVYADGDFACPLPAEISAVPGALRILRAGP

SEQ ID NO: 61748 - protein, 928 aa, Mycobacterium avium
MLKRLKRVADYVNTLSDEVEKLTDAELRAKTDEFKKRHADGESLDDLLPEAFAVAREAAWRVLDQRPFDVQVMGAAALHFGNVAEMKTGEGKTLTSVLPAYLNGIGGKGVHVVTVNDYLAKRDSEWMGRVHRFLGLDVGVILAQMTPDERRVAYNADITYGTNNEFGFDYLRDNMAHSLDDLVQRGHNFAIVDEVDSILIDEARTPLIISGPADGASNWYLEFARLAPLMEKDVHYEVDLRKRTVGVHELGVEFVEDQLGIDNLYEAANSPLVSYLNNALKAKELFHRDKDYIVRDGEVLIVDEFTGRVLYGRRYNEGMHQAIEAKEHVEIKAENQTLATITLQNYFRLYDKLSGMTGTAQTEAAELHEIYKLGVVPIPTNKPMIRTDQSDLIYKTEEAKYIAVVDDVVERYQKGQPVLIGTTSVERSEYLSRQFQKRRIPHNVLNAKYHEQEAGIVAVAGRRGGVTVATNMAGRGTDIVLGGNVDFLTDQRLRERGLDPVETPDEYEAAWHEELPKVKAEAAAEAKEVIEAGGLYVLGTERHESRRIDNQLRGRSGRQGDPGESRFYLSLGDELMRRFNGAALEAMLNRLNLPDDVPIEAKMVTRAIKSAQTQVEQQNFEVRKNVLKYDEVMNQQRKVIYAERRRILEGENLKEQALEMVRDVVTAYVNGATAEGYAEDWDLDALWTALKTLYPVGIDHATLTRRDADGGFDDLTREELLEALLKDAERAYAAREAELEEIAGEGAMRQLERNVLLNVIDRKWREHLYEMDYLKEGIGLRAMAQRDPLVEYQREGYDMFMAMLDGMKEESVGFLFNVTVEAVPAPQVAPVQTPEGLAELGAPAEQGGTATAARDEAPTQLRAKGIDNEAPAMTYSGPSEDGSAQVQRNGGDAKTPAGVPAGASRRERRAAARQQGRGAKPPKSVKRR

SEQ ID NO: 61749 - protein, 205 aa, Mycobacterium avium
MAGMTGPDVVPPSVELVQRRLAETIAVKQQMQNGVVAAQAVEVARAMIDCLRAGGKVILFGNGGSAQDAGHLAAELMGRFAFDRPGLAAISLPDATAAITAIGNDYSYDEVFARQVLAAGRAGDVVVGLTTSGNSANVVRALEAARQAGMTTVTLTGAGGGKVADVAQICIRIPSDDTGRIQEASLHLGHSICEMVEAALFPRPS

SEQ ID NO: 61750 - protein, 278 aa, Mycobacterium avium
MTTGRLLLGATPLGQPSDASPRLLDALARADVVAAEDTRRVRTLAKALDVAITGRVISMFDRVEAARVDSLLEAIRSGATVLVVSDAGMPVISDPGFRLVTACVQAGLPVGCLPGPSAVMTALAVSGLPAEKFCFEGFAPRKKAARRGWLDSLADERRTCVFFESPRRLPACLQDAVERLGGERRAAICRELTKVHEEVVRGTLDELAAWAGDGVLGEITVVLAGATPRTDLPSLVAEVEQRVADGARIKDACGEVAAAQPGVRSRQLYDAVLKARRD

SEQ ID NO: 61751 - protein, 196 aa, Mycobacterium avium
MATTGKAALRERLLAARRRVADDVRAAEARMLREQLEFMVTSGSTVCAYVPVGAEPGSVEMLDMLLRRAGRVLLPVARTAADDTPLPLCWGEYRPGTLTTGRWGLLEPAQPWLPASALADAALVLVPALAVDRRGVRLGRGRGFYDRSLGDRDPRARLVALVRDAELLDELPAEPHDVPMTHALTPQRGLVTLGAR

SEQ ID NO: 61752 - protein, 302 aa, Mycobacterium avium
MSCPNVVVPRTAIVPAAGLGTRFLPATKTVPKELLPVVDTPGIELVAAEAAEAGAERLVIVTSEGKDGVVAHFVEDLVLESTLEERGKTAMLDKVRRAPRLIKVESVVQSEPLGLGHAIGCVEPRLADDEDAVAVLLPDDLVLPTGVLGTMSKVRAHYGGTVLCAIEVTPEEISAYGVFDVEPVPDDDPDVLRVKGMVEKPKAEDAPSMFAAAGRYVLDRAIFDALRRIDRGAGGEVQLTDGIALLISEGHPVHVVVHRGSRHDLGNPGGYLKAAVDFALDRDDYGPDLRQWLVARLGLSEQ

SEQ ID NO: 61753 - protein, 510 aa, Mycobacterium avium
MTFWSLIAEAARRGSPRPLLADEHGRSMTARQLYDAACVAAAALAERGVRPGAVVSWQLPTTLETMVLMAALARLGAVQNPIIPVLRESEVRFITGQLNTEYFVAPGLWRGFDHGGLARALSAERGFEVITVDLAAPPAAGALRLPGADPDSLPAPPQSADEARWIYYSSGTTAAPKGIRHTDSSVIAGSAGVVGMVGATSSDVDPIAFPVAHIGGAAMLATALLTGMRLALFEAFDPAATPLAIAAHNPTFLGTATPFFVAYLEAQRAQGNRPLFPSLRGCLAGGAPITAELSRRVRDTFGVAGIANAWGMTEFPCATSPSLTAAPEVLDHTVGPPVPGVEVRVVDGAENELAAGQEGELRLKGPQCFLGYADPTLDADAFDDQGWLRTGDLGLIDADGNVRVTGRTKDAIIRNAENISALEIENALAAHPAVADVAVIGIPDPRTGERVCAVVVPATADGVTLESLVQHCRSRGLSRYKHPEHLVVVDTLPRNQFGKVIKKDLRDAFG

SEQ ID NO: 61754 - protein, 644 aa, Mycobacterium avium
MNARVEQLEFQAEARQLLDLMVHSVYSNKDSFLRELISNASDALDKLRLEAFRNKDLDVDTSDLHIQIEVDKDARTLTIRDNGIGMTRAEVVDLIGTLAKSGTAELRQQLREAKNAQNEAASEELIGQFGIGFYSSFMVADKVELLTRKAGESEATKWESSGEGTYTIESVENAPQGTSVTLHLKPEDTEDELHDYTSEFKIKSLVKKYSDFIAWPIRMEVERRTPATEEGGEETVTREVETLNSMKALWARPKDEVSEEEYKEFYKHIAHAWDDPLEVIAMKAEGTFEYQALLFIPSHAPFDLFNRDAHTGIQLYVKRVFIMGDCDQLMPEYLRFVKGVVDAQDMSLNVSREILQQDRQIKAIRRRLTKKVLSTIKELQSERPDDYRTFWTQFGRVVKEGLLSDFDNQETLLQLCSFASTHSEEEATTLAQYVERMKEGQTQIFYATGETRQQILKSPHLEAFKAKGYEVLLLTDPVDEVWVGTVTEFDGKPLQSIAKGEVDLSAEGEESQAEREEQQKEFADLLAWLKDTLSDHVKEVRLSNRLTDSPACLITDAFGITPALARLYRASGQDIPVGKRILELNPKHPLVTGLRQAHQDRADDPSVAETAELLYGTALLAEGGALDDPARFAEILADRLARTL

SEQ ID NO: 61755 - protein, 613 aa, Mycobacterium avium
MNNNLFGNGDLQGGSTITQQYVKNALVGSAQHGVSGLMRKAKELVIATKMSGEWSKDEVLQSYLNIIYFGRGAYGISAAAKAYFDKPVEQLTVSEGALLAALIRRPSTLDPAVDPKGALARWNWVLDGMVETKALPAKDRAAQVFPQTVPPDQARAQNQTTGPNGLIERQVTKELMELFNIDERTLNTQGLQVTTTIDPKAQQAAEKAVSKYLDGQDPDMRAAVVSVDPHDGAIRAYYGGSDANGFDFAQAGLQTGSSFKVFCLIAALEQGIGLGYQVDSSPLTVDGIKITNVEGESCGTCNIAQALKMSLNTSYYRLMLKLKGGPQAVADAAHQAGVATSFPGVDHTLSEDGKGGPPNNGIVLGQYQTRVIDMASAYATLAASGVYHRPHFVQKVVNSDGQVLFDAGKSDNNGEQRIPKAVADNVTAAMEPIAGYSRGHALAGGRPSAAKTGTTQLGDTTSNKDAWMVGYTPSLSTAVWLGTAKGDQPLVTASGGPVYGSGLPSDIWKATMDGALKGTPNESFPKPAEVGGYAGVPAPPPPPKAPPSETVIQPTIEVAPGITIPVGPPTTVTLAPAPPAGGPPGGPEPGGGVPPGPGGGVPPGGPQAPPPPP

SEQ ID NO: 61756 - protein, 96 aa, Mycobacterium avium
MRPYEIMVILDPTLDERTVAPSLETFLNVVRKDGGSVEKVDIWGRRRLAYEIAKHAEGIYVVIDLKAEPATVSELDRQLSLNESVLRTKVMRTDKH

SEQ ID NO: 61757 - protein, 168 aa, Mycobacterium avium
MAGDTTITVVGNLTADPELRFTPSGAAVANFTVASTPRIYDRQSGEWKDGEALFLRCNIWREAAENVAESLTRGSRVIVTGRLKQRSFETREGEKRTVVEVEVDEIGPSLRYATAKVNKASRSGGGGGGFGGGSRQQSAPASSAPADDPWGSASASGSFGGGDDEPPF

SEQ ID NO: 61758 - protein, 84 aa, Mycobacterium avium
MAKSNKRRPAPEKPVKARKCVFCAKKDQAIDYKDTALLRTYISERGKIRARRVTGNCVQHQRDIAIAVKNAREVALLPFTSSAR

SEQ ID NO: 61759 - protein, 152 aa, Mycobacterium avium
MKLILTADVDHLGAVGDTVEVKDGYGRNFLLPRGLAIVASRGAQKQADDIRRARETKAVRDLDHANELKTAIEALGPVTLPVKTAGDSGKLFGSVTAGDVVAAIKKAGGPNLDKRIVRLPKAHIKALGTHPVAVHLHPEVDVEVALEVVPQS

SEQ ID NO: 61760 - protein, 827 aa, Mycobacterium avium
MRYGQDVSTLTYAQCQLSNVCSDCVDQGRRESVAVVDDLTSGMDSSSPSEDFGRQPPQDLAAEQAVLGGMLLSKDAIADVLERLRPGDFYRPAHQNVYDAILDLYGRGEPADAVTVAAELDRRNLLRRIGGAPYLHTLISTVPTAANAGYYATIVAEKALLRRLVEAGTRVVQYGYAGAEGADVAEVVDRAQAEIYEVAERRTTEDFVPLEDLLQPTMDEIDAIASNGGVARGVPTGFTELDEVTNGLHAGQMIIVAARPGVGKALALDTPLPTPTGWTTMGDVAVGDELLGDDGRPTRVVAATDVMLGRPCYEVEFSDGTVIVADAAHQWLTETRVSRKSAQAAAVGYNRYKNQRTFAAVRTTAEIAETLRCPAQDRRLNHSVVNARALELPDREFLVPPYTLGAWLGDGTSAAAQITAADPEIIMRIEAEDSGAGVGTLQARLRTIGVLGNKHIPTEYLRGSEAQRRALLAGLLDTDGTVTVGGAVQFSVTNQRLARDVNELIVSLGYRCQTSTKRVQGRSETSSIAYTLTFSTADKVFALERKAIAHKERRAVTGTSRGGSRFIVDVRPIEPVAVRCVEVDNDSHMYLASRAMVPTHNSTLGLDFLRSCSIKHRMASVIFSLEMSKSEIVMRLLSAEAKIKLSDMRSGRMSDEDWTRLARRMSEISEAPLYIDDSPNLTMMEIRAKARRLRQKADLRLVVVDYLQLMSSGKKVESRQLEVSEFSRQLKLLAKELEVPVVAISQLNRGPEQRTDKKPMLSDLRESGSLEQDADMVILLNRPDAFERDDPRGGEADFILAKHRNGPTKTVTVAHQLHLSRFANMAR

SEQ ID NO: 61761 - protein, 213 aa, Mycobacterium avium
MTAQNPNLAALSAAGVSVWLDDLSRDRLRSGNLQELIDTKCVVGVTTNPSIFQKAFAEGHAYDSQIAELAARGADVDATIRTVTTDDVRNACDVLTREWENSDGVDGRVSIEVDPRLAGDTDKTIAQAVELWKIVDRPNLFIKIPATQAGLPAITAVLAEGISVNVTLIFSVERYRAVMDAYLAGMEKAREAGHDLFKMHSVATIFAWRVDTD

SEQ ID NO: 61762 - protein, 699 aa, Mycobacterium avium
MTTLEEISALTQPHLPDDWSELDSAAVDTIRVLAADAVQKVGNGHPGTAMSLAPLAYTLFQRVMRHDPSDTHWLGRDRFVLSAGHSSLTLYLQLYLGGFGLELSDIESLRTWGSKTPGHPEFRHTKGVEITTGPLGQGLASAVGMAMASRYERGLFDPDAAAGTSPFDHFIYVIASDGDIEEGVTSEASSLAAVQQLGNLIVFYDHNQISIEDDTNIALCEDTAARYEAYGWHVQRVEGGENVVAIEEAIAAAKAVTDRPSFIELRTIIGYPAPNAMNTGKAHGAALGEEEVAAVKKILGFDPDKTFQVRDKVIAHTRKLVDRGREAHQKWQTDFDAWAQREPERKALLERLTAEKLPDGWDADLPHWEPGSDAIATRKASGAVLNAVAPKLPELWGGSADLAESNLTTINNADSFGPPSISTKEFTASWYGRVLHFGVREHAMGAILSGIVLHGPTRAYGGTFLQFSDYMRPAVRLASLMDIDTIYVWTHDSIGLGEDGPTHQPIEHLAALRAIPKLSVVRPADANETAYAWRTILARGNGSGPVGLVLTRQGLPVLEGTDADGVARGGYILGSDGEEAGQEPDVILIATGSEVQLAVEAQKLLADKDIVARVVSMPCVEWFESQPDDYRDSVLPPSVSARVAVEAGVAQSWHKLVGDTGKIISIEHYGESADYKTLFREFGFTAEAVAAAAEEVVDN

SEQ ID NO: 61763 - protein, 324 aa, Mycobacterium avium
MHAIEVSETGGPEVLRYVETPTPTAGPGQVLIKAEAIGVNYIDTYFRSGQYPRELPFIIGQELCGTVAAAGDGVDGFKVGDRVVSAAATGGYAEYATAPASLTAHVPDGVAADVAASALLKGLTAHYLLTSVYPVQAGDTVLVHAGAGGVGLILTQWAHLLGARVITTVSTPEKARRSAQAGANEVLSYPDDADEFGNRIRALTDGAGVAAVYDGVGASTFDASLASLAVRGTLALFGAASGPVPPFDPQRLNAAGSVFLTRPSLAHFIRTGQEFSWRAEELFAAIAAGDITVEVGGRYPLADAARAHRDLQGRKTTGSIVLLP

SEQ ID NO: 61764 - protein, 223 aa, Mycobacterium avium
MHQRLATLAAARLYLCTDARRERGDLAEFADAALAGGVDVIQLRDKGSPGEQRFGPLEARDELAACEILADAARRHGALFAVNDRADIARAAGADVLHLGQGDLPLDVARAFVGPDVLLGLSSHDRDQMTAAAAGPADYFCVGPCWPTPTKPGRAAPGLALVRAAAELRTGKPWFAIGGIDAQRLPEVLDAGARRVVVVRAITAADDPAAAARRLSSALAAAR

SEQ ID NO: 61765 - protein, 108 aa, Mycobacterium avium
MAYVIAEPCVDIKDKACIEECPVDCIYEGARMLYIHPDECVDCGACEPVCPVESIYYEDDLPPEHSQYLQINADFFTELGSPGGAAKVGLTENDPAPVKNLESRVDAS

SEQ ID NO: 61766 - protein, 238 aa, Mycobacterium avium
MSTLVLTAHGSRDPRSAANAEAVADRLRRMRPGLDVRLAFLELNAPNFVDVLAGLPDSRRAVVAPLLLASAYHARLDIPEQIARAGAHGIRQADVLGEDDRLVAVLRGRLAEIGVSPLDDDLGVMVVAIGSSNTAANARTAKVASRLAAGTRWACATTAFATRPEASVARAADQLRRRGARRLVIAPWFLAPGFITDGVSTFARDNGIRMAAPLGAHRLVAETVLDRYDEALSADAAA

SEQ ID NO: 61767 - protein, 474 aa, Mycobacterium avium
MNYLVIGLYIVSFALFIYGLMGLTGPKTAVRGNLIAAVGMAIAVAATLIKIRHTDQWVLIIAGLVVGVVLGVPPARYTKMTAMPQLVAFFNGVGGGTVALIALSEFIETSGFSAFQHGESPTVHIVVASLFAAIIGSISFWGSIIAFGKLQEVISGAPIGFGKAQQPINLLLLAGAVAAAVVIGLHAHPGSGGVSLWWMIGLLAAAGVLGLMVVLPIGGADMPVVISLLNAMTGLSAAAAGLALNNTAMIVAGMIVGASGSILTNLMAKAMNRSIPAIVAGGFGGGGVAPGGGDGGDKHVKSTSAADAAIQMAYANQVIVVPGYGLAVAQAQHAVKDMAALLEEKGVPVKYAIHPVAGRMPGHMNVLLAEAEVDYDAMKDMDDINDEFARTDVAIVIGANDVTNPAARNEASSPIYGMPILNVDKAKSVIVLKRSMNSGFAGIDNPLFYAEGTTMLFGDAKKSVTEVAEELKAL

SEQ ID NO: 61768 - protein, 365 aa, Mycobacterium avium
MTNAQANAVKVGVVAESGADERRVALVPKAVASLVGSGLAVVVESGAGERALLPDALYTEAGADIGDAWAADIVVKVAPPTADEVAKLHSGQTLIGFLAPRNADNSIGALKQAGVQAFALEAIPRISRAQAMDALSSQGNVAGYKAVLLAASESTRFFPMLTTAAGTVKPASVLVLGVGVAGLQALATAKRLGARTSGYDVRPEVADQVRSVGAQWLDLGIDAAGEGGYARELTEEERAQQQKALEEAIAGFDVVITTALVPGRPAPRLVTAAAVESMKPGSVVVDLAGETGGNCELTEPGKTVVKHDVTIAAPLNLPATMPEHASELYSKNITALLDLLIKDGKLAPDFDDEVVAAACVTRESA

SEQ ID NO: 61769 - protein, 590 aa, Mycobacterium avium
MNDAREAVEHHPEEGSHVQDGVVEHPEAEDFDNAAALPTDPTWFKHAVFYEVLVRAFFDANADGAGDLRGLLAQLDYLQWLGIDCIWLPPFYDSPLRDGGYDIRDFYKVLPEFGTVEDFVALLNAAHERGIRVITDLVMNHTSESHPWFQESRHDPDGPYGDFYVWSDTSDRYADARIIFVDTEESNWTFDPVRRQFYWHRFFSHQPDLNYDNPAVQEAMIDVIRFWLGLGIDGFRLDAVPYLFEREGTNCENLPETHAFLKRVRKVVDDEFPGRVLLAEANQWPADVVEYFGDPSTGGDECHMAFHFPLMPRIFMAVRRESRFPISEILAQTPQIPEMAQWGIFLRNHDELTLEMVTDEERDYMYAEYAKDPRMKANVGIRRRLAPLLDNDRNQIELFTALLLSLPGSPVLYYGDEIGMGDVIWLGDRDGVRTPMQWTPDRNAGFSKANPGRLYLPPSQDPVYGYQAVNVEAQRDTSTSLLNFTRTMLAVRRRHEAFAIGTFEELGGSNPSVLAFVRQVSNDGDTVLCVNNLSRFPQPIELNLQHWSGCIPVELTGHVEFPRIGHLPYLLTLPGHGFYWFQLTACEEDT

SEQ ID NO: 61770 - protein, 182 aa, Mycobacterium avium
MSEFTIPGLTDKQAARLTELLQKQLSTYNDLHLTLKHIHWNVVGPNFIGVHEMIDPQVEAVRGFADDVAERIAALGASPQGTPGAIIKDRSWDDYSVGRDTVQAHLAALDLVYNGVIEDIRQYIDETDELDQVTQDLLIGQAAQLEKFQWFVRAHLESAGGQLAHKGKSTERAAAQSARGKS

SEQ ID NO: 61771 - protein, 366 aa, Mycobacterium avium
MTHNKITLTPEQAEEFGRELDALKERVMADLGEKDADYIRRVIKAQRALEVGGRALLFLPPAWLLGTTMLGLSKILDNMEIGHNVMHGQYDWMRDPAISGRSFEWDTACPADQWRHSHNYMHHTHTNIVGMDRDIGYGILRMSEDQPWQPYFLGNPLYAFLLMVLFQYGVALHELETERIRSGEIRLADKREVLREIWQKTRRQTLKDYVAFPLLAGPFAPFVFTGNLTANLIRNVWSYMIIFCGHFPDGTQEFTVEETQDESRGMWYFRQILGSANLTGGKLFHLLSGNLSHQIEHHLFPDMPARRYAEIAPEVQAICQRYGVAYNRGPLLRQFGTVVRKIVKLSFPNAWIPGAAKPADREPVAA

SEQ ID NO: 61772 - protein, 364 aa, Mycobacterium avium
MFTQTVQASGRVLARTVRQRVLGSELLDLLTGPHGVDRYTELVAPTWTLGEARAKVTDVRRTTPRSVTLTLDPNDTFLSSHTVTAGQYVNLTVEIDGRRHTRCYSPANREGAATLELTIGRHDGGLVSNHLYDHARRGMVVGLAGVGGDFVLPDPRPRRVLFVSGGSGITPVMAMVRTLVSQRHRGEIAFIHYAPTPAEACYRDELAALPSVRVLHGYTRSAGGDLSGRFGPDHLAAAMPAPDAVFVCGPTSLVDAVREHCDNVYTESFTPPVLEASADPSGGRVTFSDSGVDVVDDGRSLLEQAEAAGLSPQNGCRMGICHTCTRRKTAGTVRNLVTGAVSTAPDEDVQICVSVPVGDVDLSL

SEQ ID NO: 61773 - protein, 70 aa, Mycobacterium avium
MPTSEYQVSGMSCGHCEAAVHSEVARIPGVDGVSVSADTGRLVVTSAVPIDADAVLGAVDEAGFQAVLVA

SEQ ID NO: 61774 - protein, 343 aa, Mycobacterium avium
MSTATGSRRIFSGVQPTSDSLHLGNALGAISQWVTLQDDWGDDWDAFFCVVDLHAITIAQDPAALRRRTLVTAAQYLALGIDPARSTVFVQSHVPAHTQLAWVLGCFTGFGQASRMTQFKDKSLRQGADSTTVGLFTYPVLQAADVLAYDTGLVPVGEDQRQHLELARDVAQRFNARFPDTFVVPEMLIPKVTAKIYDLADPTSKMSKSASTDAGLVNLLDDPALSAKKIRSAVTDSEREIRFDTDAKPGVSNLLSIQSAVSGVDIDKLVQGYAGRGYGDLKKDTADAVVEFVTPIKARVDELMADPAELEAVLAAGAQRAQDVAGKTVERVYDRLGFLPRRG

SEQ ID NO: 61775 - protein, 584 aa, Mycobacterium avium
MIQQHRYDVVIVGAGGAGMRAAVEAGPRVRTAVLTKLYPTRSHTGAAQGGMCAALANVEEDNWEWHTFDTVKGGDYLADQDAVEIMCKEAIDAVLDLEKMGMPFNRTPEGRIDQRRFGGHTRDHGKAPVRRACYAADRTGHMILQTLYQNCVRHDVQFFNEFYALDLVLTQTPSGPVASGVVAYELATGDIHVFHAKAVVLATGGSGRMYKTTSNAHTLTGDGIGIVFRKGLPLEDMEFHQFHPTGLAGLGILISEAVRGEGGRLLNGEGERFMERYAPTIVDLAPRDIVARSMVLEVLEGRGAGPHKDYVYIDVRHLGEDVLESKLPDITEFARTYLGVDPVHELVPVYPTCHYVMGGIPTTVTGQVLRDNTSTVPGLYAAGECACVSVHGANRLGTNSLLDINVFGRRAGIAAANYARGHDFVDMPPDPAAMVVRWVADILSEHGNERVADIRGTLQQSMDNNAAVFRTEETLKQALTDIHACKERYSRIRIHDKGKRFNSDLLEAIELGFLLELAEVTVVGALNRKESRGGHAREDYPNRDDVNYMRHTMAYKQGTDLLSDIALDFKPVVQTRYEPKERKY

SEQ ID NO: 61776 - protein, 378 aa, Mycobacterium avium
MGLIAAGTMVASGRVHRPGWVETSGGHIAACGTGPPPRPADREFPDGTAVPGFVDMHVHGGGGASYTDPDGIAKAAAFHLRHGTTTTMASLVTGSPAELLGGVRALAEATRDRTVAGIHLEGPWLSRARCGAHDARRMRDPDPHEIDAVLSAGGGAIRMVTLAPELPGADAAIRRFVDAGVVVAVGHTNADYRQTRHAIALGATVGTHLFNAMPPLHHREPGPALALLRDPRVTVELIADGVHVHPDVVHAVIDAAGPERVALVTDALAAAGRPDGAFRLGPVHIDVVAGVARVHGTTTIAGSTATMDRLFRTVAGSGTDRDAALAAAVQMTSTTPARALGLDRVGSLRAGHEANLVVLDDDWRVRAVMVRGDWLADP

SEQ ID NO: 61777 - protein, 450 aa, Mycobacterium avium
MARGSRRGLLVGLTAASVGVIYGYDLSIIAGAQLFVTEDFGLSTRQQELLTTMAVIGQIGGALFAGVLANAIGRRRSVLLILSGYAVFALLAAFSVGLPMLLTARLLLGLTIGVTVVVVPVYVAESAPTAVRGALLTAYQLAIVSGLIVGYLSGYLLAGTHSWRWMLGLACVPAVLLLPLVFRMPDTARWYLLKGRVDDARRALLRVEPAARVDDELAEIGRAVSEEAASLPAMLAEMVRSPYRRATVFVVVLGFLIQITGINAIIYYSPRIFEAMGFTGNFALLALPALVQVAGLVAVGTALLLVDRVGRRPILLCGTAMMIVADVVLVAVFGRGPGGVIAGFAGVLLFIFGYTMGFGSLGWVYASESFPSRLRSIGSSTMLTSNLVANAIVAAVFLTLLHSLGGAGTFAVFAVLAVVAFAFVHRYAPETKGRQLEDIRHFWENGGRWD

SEQ ID NO: 61778 - protein, 405 aa, Mycobacterium avium
MPTPPDVFSPAKLGPITLRNRIIKSATFEARTPDALVTDDLIEYHRLPAAGGVGMTTVAYCAVSPGGRTEGNGIWMRPEAVPGFRRLTDAIHAEGAAVSAQIGHAGPVANARSNKAHALAPVRFFNPIGMRFAKKATREDIDEVIAAHANAARLAIEAGFDAVEIHLGHNYLASSFLSPLINRRNDEFGGSLQNRAKVARGMVMAVRRAVEKEGTPIAVTAKLNMADGVRGGISTEESLTTAKWLESDGGLDAIELTAGSSLVNPMYLFRGDAPLKEFAGAFKPPLRWGMRMTGKKFLREYPYREAYLLRDAKLFRAELKMPLILLGGITNRETMDLAMAEGFEFVAMARALLAEPDLINRIAADGAAHRVHSACTHCNQCMPTIYSRTHCVVTGAPDRHTSAAT

SEQ ID NO: 61779 - protein, 541 aa, Mycobacterium avium
MAKTIAYDEEARRGLERGLNALADAVKVTLGPKGRNVVLEKKWGAPTITNDGVSIAKEIELEDPYEKIGAELVKEVAKKTDDVAGDGTTTATVLAQALVREGLRNVAAGANPLGLKRGIEKAVEKVTETLLKSAKEVETKDQIAATAAISAGDQSIGDLIAEAMDKVGNEGVITVEESNTFGLQLELTEGMRFDKGYISGYFVTDAERQEAVLEDPFILLVSSKVSTVKDLLPLLEKVIQAGKPLLIIAEDVEGEALSTLVVNKIRGTFKSVAVKAPGFGDRRKAMLQDMAILTGGQVISEEVGLSLESADISLLGKARKVVVTKDETTIVEGAGDSDAIAGRVAQIRTEIENSDSDYDREKLQERLAKLAGGVAVIKAGAATEVELKERKHRIEDAVRNAKAAVEEGIVAGGGVALLHAIPALDELKLEGDEATGANIVRVALEAPLKQIAFNGGLEPGVVAEKVRNSPAGTGLNAATGEYEDLLKAGVADPVKVTRSALQNAASIAGLFLTTEAVVADKPEKAAAPAGDPTGGMGGMDF

SEQ ID NO: 61780 - protein, 404 aa, Mycobacterium avium
MAAMRSVAEHQRVVAGLIRARPPVAVPLAQAQGLVLAEDVVAGLALPVFDNSAMDGYAVRAEDIAGATPERPVVLPVAEDIPAGRTDELTLQPGTAHRIMTGAPVPAGATAVVPVEDTDGGVDVVSIRAPREPGKHIRRAGEDVSPGTTVLRRGQVVTPAVLGLAAALGIAELSVIPRQRVLVISTGSELVAPGAALRPGQIYESNSIMLAGAVRDAGAELVAVTTAEDEVAQFSSIIDRYAAGTDLIITSGGVSAGAYEVVKDAFGREGDQGVEFVKVAMQPGMPQGVGRVAGATIVTLPGNPVSALVSFEVFIRPALRAAMGLPDPERPHRSAVLAESLTSPRGKRQFRRAVLDDDAGTVVSYGPPASHHLRWLASANGLLDIPEDVVEVPEGTTLEVWDLR

SEQ ID NO: 61781 - protein, 430 aa, Mycobacterium avium
MPMSVVGTPKSAEEIQKDWDTNPRWKDVTRTYTAEDVVALQGTVVEENTLARRGAEVLWEQLHDLEYINALGALTGNMAVQQVRAGLKAIYLSGWQVAGDANLSGHTYPDQSLYPANSVPTVVRRINNALLRADQIAKVEGDTSVKNWLAPIVADGEAGFGGALNVFELQKAMIAAGVAGSHWEDQLASEKKCGHLGGKVLIPTQQHIRTLTSARLAADVCDVPTVVIARTDAEAATLITSDVDERDQPFITGERTKEGFYRVRNGLEPCIARAKAYAPYSDLIWMETGTPDLELAAKFAEGVKAEFPDQMLAYNCSPSFNWKKHLDDATIAKFQKELAAMGFKFQFITLAGFHALNYSMFDLAYGYARNQMTAYVELQEREFAAEERGYTATKHQREVGAGYFDRIATTVDPTSSTTALTGSTEEGQFH

SEQ ID NO: 61782 - protein, 465 aa, Mycobacterium avium
MTSHYDVVVLGAGPGGYVAAIRAAQLGLSTAIVEPKYWGGVCLNVGCIPSKALLRNAELAHIFTKEAKTFGINGEATFDYGAAFDRSRKVAEGRVAGVHFLMKKNKITEIHGYGRFTDPHTLAVELNDGGTETVTFDNAIIATGSSTRLVPGTSLSANVVTYEEQILSRELPESIIIAGAGAIGMEFGYVLHNYGVEVTIVEFLPRALPNEDADVSKEIEKQFKKLGVKILTGTKVESISDDGSQVTVVVSKDGNSQELKAAKVLQAIGFAPNVEGYGLEAAGVALTDRKAIGITDYMRTNIEHIYAIGDVTGKLQLAHVAEAQGVVAAETIAGAETLALGDYRMMPRATFCQPNVASFGLTEQQARDEGHDVVVAKFPFTANGKAHGVGDPSGFVKLIADAKYGELLGGHLVGHDVSELLPELTLAQKWDLTATELARNVHTHPTMSEALQECFHGLTGHMINF

SEQ ID NO: 61783 - protein, 507 aa, Mycobacterium avium
MTVFARPGSAGALMSYESRYDNFIGGQWVAPARGRYFENPTPVTGQTFCEVARSDEADVDKALDAAHAAAPAWGKTAPPERAAILNKIADRIEENLESLAVAEVWDNGKPIREALAADIPLAADHFRYFAGALRAQEGSLSQIDDDTVAYHFHEPLGVVGQIIPWNFPILMGAWKLAPALAAGNAVVLKPAEQTPVSVLYLMSLIGDLLPPGVVNVVNGFGAEAGKPLASSNRIAKIAFTGETTTGRLIMQYASQNLIPVTLELGGKSPNIFFSDVMAKADDYQDKALEGFTMFALNQGEVCTCPSRSLIQADIYDEFLELAAIRTKAVRQGDPLDSETMLGSQASNDQLEKVLSYIAIGKDEGATIITGGERAELGGDLSGGFYMQPTIFAGNNKMRIFQEEIFGPVVAVTSFTDYDDAISIANDTLYGLGAGVWSRDGNTAYRAGRDIQAGRVWVNCYHAYPAHAAFGGYKQSGIGRENHKMMLDHYQQTKNMLVSYSNKAQGFF

SEQ ID NO: 61784 - protein, 533 aa, Mycobacterium avium
MPFDHRQLRDKWYSAGWYSDRTCLDAFEAGAVEHKDVPLTFVIGDSVSSPTVCEIHDRAVALAASLQRLGVRDGDAVAVQLTNRVECAVAYQAVLLCGAVLVPIVHIYGMAEVAFVLDQSAAKVLIMPERHGSIVYSKRLQDLSRIDSLQHVVMLDAEPGEGYLAWSQLDTPAARYRRPAVAADDVCLLLYTSGTTSAPKGVQHTNNTVLAEQRTMPALLAGKPDDVSLVTFPPGHIAGVGSMLRPLLSGARTVFMDGWDPARAVEVVHRFGVTCTAGTPFHLAGILDLGDTGDKLASLREFLVGAAPVAEEIGRRAAQAGISTFRSYGATEHPTVTGEHEGQPQWARLGTDGKPLPGSEIRIVGSDGTDCPIGIGGEVVVRGPDQFIGYQDSALNTEAFTDDGWFRTGDLGHLDAHGRLTITDRIKDVIIRGGETISSGQVEEVLNAHPAVADGVAVAAPDSRYGDVVAAVVVLKPGYALNLDDLRAHFAASGLARQKTPERLAIVDELPRTSLGKVRKAQLRSDHFGAARR

SEQ ID NO: 61785 - protein, 496 aa, Mycobacterium avium
MTDTATETLVQFDLLIGGESSSAASGLTYDSVDPFTGRPWARVPNAAAADVDRAVGAARAALNGPWGALTATARGKLLHRLGEIIAREADQLAELEVRDGGKLVREMVGQMRSLPDYYFYYGGLADKLQGDVIPVDKPNYFVYTRHEPVGVVGAITPWNSPLLLLTWKLAAGLAAGCTFVVKPSDHTPTSTLAFAKLFAEAGFPPGVINVVTGWGPETGAALASHPGVDKVAFTGSTATGIHVGKAAIENMTRFSLELGGKSAQVVFADADLDAAANGVIAGVFAATGQTCLAGSRLLVDRSVADALVEKIVARAATIKLGDPKDPTTEMGPVSNLPQYEKVLSHFASAREQGATVAYGGEPASDLGGFFVKPTVLTGVDPSMRAVAEEIFGPVLAVMTFEDEDEAVAAANGTEFGLAAAVWTKDVHRAHRVAAKLRAGTVWVNAYRVVAPHVPFGGIGYSGIGRENGIDAVKDFTETKAVWVELSGETRDPFTLG

SEQ ID NO: 61786 - protein, 251 aa, Mycobacterium avium
MNGISVEHDGAVLRIRLDRPEKLNAVDTPMLEELSVHIRDAEADESVRAVLLTGAGRAFCSGGDLTGGDTAGAADAANRVVRAITSLPKPVIAGVHGAAVGFGCSLALACDLVVAAPASYFQLAFTRVGLMPDGGASALLPLLIGRARTSRMAMTAEKISAATAFEWGMISHITSADEYESVLTDVLRSVSGGPTLAFGWTKRALAAATLAELEPVQAIEAEGQLALVETADFREGARAFRERRTPNFRGH

SEQ ID NO: 61787 - protein, 716 aa, Mycobacterium avium
MTVTAIDPAEQAHPAPSAGTKRVQGGLLDPKMLWRSTPDALRKLDPRTLWRNPVMFIVEIGAAWSTVLAIVGPTWFAWLTVIWLWLTVLFANLAEAVAEGRGKAQAETLRRAKTQTMARRLRDWAPGSTGIEEAVAATALQQGDIVVVEAGQVIPGDGDVVEGIASVDESAITGESAPVIRESGGDRSAVTGGTTVLSDRIVVQITQKPGESFIDRMIALVEGANRQKTPNEIALNILLAALTIIFVFAVATLQPLAIYSKVNNPGVPDTQALNTSGVTGIVMVSLLVCLIPTTIGALLSAIGIAGMDRLVQRNVLAMSGRAVEAAGDVNTLLLDKTGTITLGNRQAAAFIPLAGVPPEELADAAQLSSLADETPEGRSVVVFAKQHFGLRARTPGELSQAQWVAFSATTRMSGVDLDGHSLRKGAASSVAEWVRSQRGSVPHQLGEIVDGISAGGGTPLVVGESVDGRARVLGVIHLKDVVKQGMRERFDEMRRMGIRTVMITGDNPLTAKAIADEAGVDDFLAEATPEDKLQLIKREQAGGKLVAMTGDGTNDAPALAQADVGVAMNTGTSAAKEAGNMVDLDSDPTKLIEIVEIGKQLLITRGALTTFSIANDIAKYFAIIPAMFVALFPGLDLINVMRLHSPQSAILSAVIFNAIIIVLLIPLSLRGVRYTPSSASKLLSRNLYIYGLGGIVAPFIGIKAIDLIVQFVPGMS

SEQ ID NO: 61788 - protein, 408 aa, Mycobacterium avium
MDRSAGPEFAGDMTSAPLAGITVVSLEQAVAAPYATRQLADLGARVIKVERPQGGDFARGYDRTVHGESSYFVWLNRGKESLTVDLKQPEGRRIVERLLEGADVLVQNLAPGAAARMGLDTESVARAHPRTITATISGYGQDGPWRDRKAYDLLVQAEAGLLSVTGSPAEVARTGVSIADIAAGMFAFSGILTALYTRATTGAVRPVSVSLFDALVEWMSQPLYYGRYGGKAPPRTGARHPTIAPYGPVTAGDGGTVLLGVQNSAEWLRFCEIVLERRDLVDEPRFATNPDRVAHRDELESIITTVAARLSAEELEARLQSAGVAHARMNGVDHLWLHPVLVGRDRWHEIQTPGGPAAALPPPAGLAGVDPVIGDVPALGEHSRKILHELGYSAQATDELIAAGVTTA

SEQ ID NO: 61789 - protein, 1611 aa, Mycobacterium avium
  MISC_FEATURE (768)..(768): X=any amino acid
MKIPGVSSVVAGVAGGAAQVVRAGVSTAAGAAGALQTLASPVAELAGPVIQSMAQTTGRAIGLDGSADGAPAIVPPVRWHSGRRVHLDLDPLLPFPRWHEYAPAVEEPVRRIPGVAKAHVEGSLGRLVVELADDADNAAVLDEVRSTVASVAADISWSKAEAAPPSAPFADPGNPLAILVPLTAAALDLVAMGAAVTGWVTRLPAAPQTTRAAAALINHQPRMVSILEARLGRVGTDIALAATTAAAHGLTQSFGTPLLDLTQRTLQISEAAAHRRVWRDREPQLASPDRPQAPVVPVISSAKSEVPRHSWAAAAAGEASHVVVGGTIDAAMDKAKGSMAGPVESYVDSAANGSLIAAVSALVAGGGTEDAAAAIEAGVPRAAHMGRQAFAAVLGRGLANSGQLVLDPGALRRLDRVKVVVIDGAALRGDHRAVLRVRGEAPGWDDDRVYEVADALLHGEEAPEPDPDELPATGARLRWVPSQGPSAMPAQGLESADLIVDGDRVGRVDVGWEVDPYAIPLFQTAHRTGARVVLRHVAGTEDLTASVGATHPPGTPLLNVVRELRADRGPVLLITALHRDFASTDTLAALAIADVGVALDDPRAATAWTADIITGTDLADAVRILSAIPVARSASESAVHLAQGGTTLAGLLLVTGEQEKGASPVSFRRWLNPVNAAAATALVAGTFSATRVLRLPDPTPQPLTAWHALDPEIVYSRLAGGARPLAVETEPSWRRRLDDLSYSPALAPLRAPLQNVLRLASATRTELXDPLTPILAVGAAASAIVGSNIDALLVAGVMTVNAITGGAQRLRAESAAAELFAEQDQMVRRVVVPAVATTRRRLEAARHATRTATVSAKSLRPGDVIDLAAPEVVPADARLLEAEDLEVDESLLTGESLPVDKQVEPVAVNDPDRASMLFEGSTIVAGHARAIVVATGVGTAAHRAISAVADVETAAGVQARLRELTSKVLPLTLAGGAAVSTLALLRRASLRQAVADGVAIAVAAVPEGLPLVATLSQLSAAQRLTARGALVRAPRTIEALGRVDTICFDKTGTLTENRLRVVCAVPDDVNPHDPFPELTAPQSAELVRAAARASARPQEGQGHAHATDEAILTAASSLNGQRDSDWSMIAEVPFESSRGFAAAIGTVGNANGNPSDTPVLILKGAPEVILPRCRFADPEADQQRAEAVVRGLAEQGLRVLAVAQRGWKHDTDDDDTDADAVDAAAHNLELLGYVGLADTARASARPLIEALLDAERDVVLITGDHPITARAIARQLGLPADARVVTGAELAGLDEDACAKLVADVQVFARVSPEQKVQIVAALQRCGRVTAMVGDGANDAAAIRMADVGIGVSGRGSSAARGAADIVLTDQDLSVLLDALVEGRSMWAGVRDAVTILVGGNVGEVLFTIIGTAFGAGRAPVGTRQLLLVNLLTDMFPALAVAVTSQYVEPDEAEYPSAADAEAARREHRRAVLTGPTPSLDAPLMRQIVTRGAVTAAGATAAWAIGRWTPGTERRTATMGLTALVTTQLAQTLLTRRHSPLVVATALGSAGVLVGIVQTPVLSQFFGCTPLGPVAWTGVLGSTAGATAISALAPNWLAKQVAALEPGQQDA

SEQ ID NO: 61790 - protein, 198 aa, Mycobacterium avium
MSAPRIGVLALQGDTREHLAALREAGAESMPVRRRGELEAVDGLVIPGGESTTMSHLLKDLDLLEPLRGLLADGLPAYGACAGMILLASEILDAGAGGREALPLRAIDMTVRRNAFGRQVDSFEGDIAFAGLDVPVRAVFIRAPWVERAGDGVEVLARAAGHVVAVRQGARLATAFHPEMTGDRRIHRLFVDLVTGVV

SEQ ID NO: 61791 - protein, 303 aa, Mycobacterium avium
MNTAHSPDGSGRTGTARVKRGMAEMLKGGVIMDVVTPEQAKIAEGAGAVAVMALERVPADIRAQGGVSRMSDPDMIEGIISAVTIPVMAKARIGHFVEAQILQSLGVDYIDESEVLTPADYTHHIDKWKFTVPFVCGATNLGEALRRINEGAAMIRSKGEAGTGDVSNATTHMRAIGGEIRRLMSLSEDELYVAAKELQAPYELVVEVARAGKLPVTLFTAGGIATPADAAMMMQLGAEGVFVGSGIFKSGDPAQRAAAIVKATTFYDDPDVLAKVSRGLGEAMVGINVEQIAQPERLAERGW

SEQ ID NO: 61792 - protein, 341 aa, Mycobacterium avium
MAAQMREPKVVVLGGGSWGTTVASICARRGPTLQWVRSRETADDINENHRNSRYLGNDVVLSDTLRATTDFCEAANTADVVVMGVPSHGFRGVLTELARELRPWVPVVSLVKGLEQGTNMRMSQIVEEVLPGHPAGILAGPNIAREVAEGYAAAAVLAMPDQHLATRLSGLFRTRRFRVYTTDDVVGAEMAGALKNVFAIAVGMGYSLGIGENTRALVIARALREMTKLGVAMGGSPDTFPGLAGLGDLIVTCTSQRSRNRHVGEQLGAGKPIDEIIASMNQVAEGVKAASVIMEFANEFGLTMPIAREVDAVINHGSTVEQAYRGLIAEVPGHEVHGSGF

SEQ ID NO: 61793 - protein, 727 aa, Mycobacterium avium
  MISC_FEATURE (375)..(375): X=any amino acid
MIGSDPGLLRLRMATRTTAALGLSLLALWLLTRATGQPLTVALLGVVITMVASRSVNEPDPRQQRITMALLPVPAAVAITAAAVLAPHPVAGDVVFVLIVFAAAYIRRFGARGRALGMVAFMSYFFTLYLRARVSELPWMIGAVAVGTVCTYVMTSHVLPDRPERVLRATIRALRARMAIVIDTTAEAVRTGRLDERRRRRMRARTVRLNETALMVQSQIEDRADPGTLWPGVTAEQLAPWLLDAELAIEWVATAGRRAAALGAELPEAVRAELVSALTQLGRAIRLPEPGGLRDAASRARRLLDAATDDRPAGTEVRRLALAIINAATATADVRAIVDGAAGAAVPDVAGSERPPAAAGVAAEEPAEQEEEQPXGLRPTTRQAIQVSVAASLAIITGELVSPARWYWAVIAAFVIFAGTNSWGETLTKGWQRLLGTMLGVPAGVLVATLLTGHEAAALAGIFVCLFCAFYFMTVTYSLMTFWITTMLALLYGLLGQFSFGVLMLRIEETALGAVIGATVAVVVLPTNTRTAIRADTRAFLTSLSALIEACAAAMSGGAASPSEQARQLDRDLQQFRVTAKPLLAGVAGLAGRRGIRRALRIFTACDRYGRALARSSEQYRGSPGPGPQLAQAFSAAAAQTRRNLDALLEAIDSGHPPTLVSAADELDAAETAARQHDSDGDGETRPDVRRFLTAVHALRQIERAVISTATNLGGREDVRTATAAPR

SEQ ID NO: 61794 - protein, 462 aa, Mycobacterium avium
  MISC_FEATURE (414)..(414): X=any amino acid
MQDIQRADDALPTASRAERLRGVIRHDLPSSLVVFLVALPLSLGIAIASNAPVLAGLIAAIVGGIVVGALGGSPLQVSGPAAGLTVVVAGLVSDFGWGVTCFITVAAGAVQVLLGLSRVARAALAISPVVVHAMLAGIGITIALQQTHVLLGGKSKSTAWHNLIGLPGQIIGAHRPGVLLGVLVIVILVAWRWVPAKVRRVPGPLVAIVAVTVISVVFPFHVRRIDLDGSPLDALQLPDLPHGNWSGVAVGVITVALIASVESLLSAVSVDRMHNGPRTDFNRELVGQGAANMISGAVGGLPVTGVIVRSSTNVNAGARSRASAIMHGVWILLFTIPFAGLVDEIPTAALAGLLIVIGIQLLKPAHIETAMKHGDLAVYVVTAVSVIFLNLLHGVMIGLALAIALTGWRVIRAXIEAAQLDGEWRVTIEGAACTFLALPRLTRVLASVPRGATVTVAIAVHY

SEQ ID NO: 61795 - protein, 531 aa, Mycobacterium avium
MTVLQSTLDREATAFTDAASAAMAKLEEIDTELANALAGGGPKYVERHHARGKLTARERIELLVDQDSPFLELSPLAAWGSSFKVGASTVTGIGVVEGVECMIVANDPTVKGGTSNPWTLKKILRANQIAFENRLPVISLVESGGADLPTQKEIFIPGGRMFRDLTRLSAAGIPTIALVFGNSTAGGAYVPGMSDHVVMIKERSKVFLAGPPLVKMATGEESDDESLGGAEMHARVSGLADYFAVDELDAIRIGRRIVARLNWVKQGPTPKPVTEPLFDTEELIGIVPADLRIPFDPREVIARIVDGSEFDEFKPLYGSSLVTGWARLHGYPIGILANARGVLFSEESQKATQFIQLANRSNTPLLFLHNTTGYMVGKDYEEGGMIKHGSMMINAVSNSTVPHISLLIGASYGAGHYGMCGRAYDPRFLFAWPTSKSAVMGGAQLAGVLSIVARAAAEARGQQFDEQADAAMRAAVEGQIEAESLPLVLSGMLYDDGVIDPRDTRTVLGMCLSAIANGPIEGTSNFGVFRM

SEQ ID NO: 61796 - protein, 282 aa, Mycobacterium avium
MSKVPTIELNDGARIPQLGFGVYQIKPDETAAAVRAALDIGYRHIDTAEMYGNEREVAQGIRDAGLDRSEVFVTSKLNNGFHEPDAARRAFDATLKALGSDYVDLFLIHWPLPTLYGGDFVSTWRVLEEFARDGRARSIGVSNFQVPHLERLATETDTVPAVNQVEVHPYFTNEKVRGYAREHGIAIEAWSPIAQGDVLGDAVINRIADGLGRTAAPVVLRWHIQRGDIVFPKTVNPDRMKSNFELFDFELDERAMEAISALDRGESGRRGPNPDTFDYIPR

SEQ ID NO: 61797 - protein, 404 aa, Mycobacterium avium
MGPVLRWITAGESHGRALVAVLEGMVAGVEITSTDISEQLARRRLGYGRGARMSFERDAVSVLSGVRHGLTLGGPIAVEIGNTEWPKWETVMATDPVDPAQLADSARNAPLTRPRPGHADYAGMLKYGFDDARPVLERASARETAARVAAGTIARSFLRQALGVEVLSHVIAIGPSAPYEGPPPGPGDLPAIDASPVRAYDEAAEQAMIAEIEAAKKDGDTLGGVVEVVALGLPVGLGSFTSGDNRLDGQLAAAVMGIQAIKGVEIGDGFATARRRGSQAHDEMYPGPDGVVRSTNRAGGLEGGMTNGQPLRVRAAMKPISTVPRALATVDMATGDEAVAIHQRSDVCAVPAAGVVVEAMVALVLARAALQKFGGDSLAETRRNIDAYRRAVAEREAPAARGTA

SEQ ID NO: 61798 - protein, 156 aa, Mycobacterium avium
MSKPLRGRHQARKRAVDLLFEAEARGLSPAEVVDVRTGLADTNPEVAPLQPYTAAVARGVGDHAAHIDDLISSHLQGWTLDRLPAVDRAILRVAVWELLYADDVPEPVAVDEAVQLAKELSTDDSPGFVNGVLGQVMLVTPQIRAAARAVRGPRDT

SEQ ID NO: 61799 - protein, 695 aa, Mycobacterium avium
MADISAIYVAAPEPETGKSTVALGLLHRLTATVAKVGVFRPITRDGQDRDYILELLLSRTTAGLSYQQCVGVTYQQLHADGDAAIATIVDAYHAMAELCDVVVIVGSDYSELGQAIRPAELSTNARIAVNLGAPILLTVSGKGRTAAEVATVVQVCLAELDAQHAHTAAVVANRCEPAELDAVAEALRGFPQRCYVLPDEPLLSAPTVTELEKAVAGSPVSGEESLREREVTGILVAGMTADHVLERLADGMAVITPGDRSDVVLAVASAHAAEGFPSLSCIVLNGGFALHPSIAALVAGLRLRLPIVATALGTYDTASAAAAARGRVTATSQRKIDTALELMDRHVDIADLLEQLAIPIPTVTTPQMFIHQLTLQARADRKHIVLPEGDDDRILRAAGRVLQRRVADLTILGDEARIRQRSGELGVDLSDVKVIDPRTSALRPEFAQQYAQLRKAKGVTIEQAREIMRDATYFGTMLVYTSQVDGMVSGAAHTTAHTVRPAFEIIKTVPDVSTVSSIFLMCLPDRVLAYGDCAIIPNPTPEQLADIAISSARTAAQFGIEPRVAMLSYSTGDSGTGADVEKVRTATQLVRQRNPDLPVEGPIQYDAAIEPSVAATKLRDSPVAGRATVLIFPDLNTGNNTYKAVQRSAGALAIGPVLQGLRKPVNDLSRGALVEDIVNTIAITAIQAQGLPGGR

SEQ ID NO: 61800 - protein, 336 aa, Mycobacterium avium
MADQEMTMREALNLALDQALAADERVFLLGEDIADPGASGPTAGLSTKYGCDRVLDTPISEAAIVGAAIGAAIDGLLPVAEIMIMDFIGIAADQLINNAAKLRFMTAGRTSAPLTVRTQVYAGLSTGATHSQSLEAWFMHIPGLKVIVPATPRDGKGLLSSAIFDPDPCLFIETIRLQGKKGLVPVEPGFRIPLGQADIKRPGTDVSLIGYGRPVHDALAAAAMLGDQGVSAEVVDLRTLVPLDVDTVVASVRRTRRAVIVHDAVQFAGPGAEVAAILHSRLFSELAAPVERVAARFVPNPAAAALEAQVYPSPERIAAAALKTLGRTLTGATAHG

SEQ ID NO: 61801 - protein, 572 aa, Mycobacterium avium
MRPRCSGDPGSVRAVDVDLAPPGPLAAGGLRVTALGGISEIGRNMTVFEHLGRLLIIDCGVMFPTHDEPGVDLILPDLRHIEDRLDDIEALVLTHAHEDHIGGIPYLLKLRPDIPVVGSKFTLALVAAKCREHRLKPVFVEVSEGRKSTHGVFECEYFAVNHSIPDALAIAVHTGAGTVLHTGDIKLDQLPLDGRPTDLPGMSRLGDAGVDLFLCDSTNAELPGVGPSESEVGPTLHRLIRGAEGRVIVACFASNVDRVQQIIDAAVALGRRVSFVGRSMVRNMGIARELGFLRVADADVIDIGAAELMPPERVVLITTGTQGEPMSALSRMSRGEHRSITLTAGDLVVLASSLIPGNEEAVYGVIDELAKIGARVVTNAQARVHVSGHAYAGELLFLYNGVRPRHVMPVHGTWRMLRANSKLAARTGVPEESILLAENGVSVDLVAGRASISGAVPVGKMFVDGLVDGDVGDITLGERLILSSGFVAVTVVVQRGTGRPVAPPHLHSRGFSEDPKALEPAVRRVEEELEALVAENITDPSRIAQGVRRTVGKWVGETYRRQPMIVPTVIEV

SEQ ID NO: 61802 - protein, 266 aa, Mycobacterium avium
MPIPTPYEDLLRLVLDRGTAKSDRTGTGTRSLFGQQLRYDLSAGFPLITTKKVHLKSVVYELLWFLRGDSNVDWLHRHGVTIWDEWASDTGDLGPIYGVQWRSWPTPSGEHIDQISAALDLLRTDPDSRRIIVSAWNVGEIPRMALPPCHAFFQFYVADGRLSCQLYQRSADLFLGVPFNIASYALLTHMMAAQAGLSVGEFVWTGGDCHIYDNHVEQVRLQLSREPRPYPELVLAHRDSIFDYTYDDVVVHNYDPHPAIKAPVAV

SEQ ID NO: 61803 - protein, 181 aa, Mycobacterium avium
MTRAEVGLVWAQSTSGVIGRGGDIPWNVPEDLTRFKEVTMGHTVIMGRRTWESLPAKVRPLPGRRNVVVSRRPDFVAEGARVAGSLEAALAYAGSDPAPWVIGGAQIYLLALPHATRCEVTEIEIDLRRDDDDALAPALDDSWVGETGEWLASRSGLRYRFHSYRRDPRSSVRGCSPSRPS

SEQ ID NO: 61804 - protein, 328 aa, Mycobacterium avium
MAGPAHGVSRAEGRAMTTVALETQLQGYLDHLTIERGVAANTLSSYRRDLRRYTKHLSDRGISDLAKVGEDDVSDFLVALRRGDPDTGAAALSAVSAARALIAVRGLHRFLAAEGLAELDVARAVRPPTPGRRLPKSLTIDQVLALLEAAGGESPADGPLTLRNRALLELLYSTGARISEAVGLDVDDVDTQARSVLLRGKGGKQRLVPIGRPAVAALDAYLVRGRSELARRGRGTPAIFLNVRGGRLSRQSAWQVLQDAAERAGITSGVSPHMLRHSFATHLLEGGADVRVVQELLGHASVTTTQIYTMVTVHALREVWAEAHPRAR

SEQ ID NO: 61805 - protein, 247 aa, Mycobacterium avium
MVEAQGIRLQKVLSQAGIASRRAAEKLIVDGRVEVDGQVVTELGTRVDPDAAVIRVDGARVVLDESQVYLALNKPRGVHSTMSDDRGRPCIGDLIERRVRGNKNLFHVGRLDAETEGLILLTNDGELAHRLMHPSHEVPKTYLATVTGSIPRGLGKTLRAGIELDDGMARVDEFAVVDAIPGKTLVRVTLHEGRNRIVRRLLAAAGFPVESLVRTDIGPISLGKQRPGSIRALGRDEVGRLYQAVGL

SEQ ID NO: 61806 - protein, 228 aa, Mycobacterium avium
MSADVVVAIDGPAGTGKSSVSKGLARALGARYLDTGGMYRMVTLAVLRAGIDPADADAVGRAAQAVRMSVDYHPDGDRYFLGGEDVSTEIRGDKVTAAVSAVSSIPAVRTRLVGLQREMASGPGSIVVEGRDIGTVVLPDAPVKIFLTASAETRARRRNDQNVAAGLADDYEAVLAEVRRRDHLDSTRRVSPLRAAPDAVVVDTSDMTEAQVIDHLRDLVRQRSEVAR

SEQ ID NO: 61807 - protein, 466 aa, Mycobacterium avium
MTHDGTWSDESDWEAVEFELDEAAQAPPAPVVAVVGRPNVGKSTLVNRILGRREAVVQDVPGVTRDRVSYDALWTGRRFVVQDTGGWEPDAKGLQQLVAEQASVAMRTADAVILVVDALVGATTADEAAARILLRSGKPVFLAANKVDSDKAEADAAMLWSLGLGEPHPISAMHGRGVADLLDEVLAALPEVSEVAPRPGGPRRVALVGKPNVGKSSLLNKLAGDQRSVVHDVAGTTVDPVDSLIELGDRVWRFVDTAGLRRKVGQASGHEFYASVRTHSAIDAAEVVIVLIDASAPLTEQDQRVLSMVIEAGRALVLAFNKWDLVDEDRRELLEREIDRELVQLRWAPRVNISAKTGRAVAKLVPAMETALASWDTRIATGPLNSWLKEVVAATPPPVRGGKQPRILFATQAAARPPTFVLFTTGFLEAGYRRFLERRLREAFGFEGTPIRINVRVREKRGARRR

SEQ ID NO: 61808 - protein, 261 aa, Mycobacterium avium
MWGSVLGLGMLAALNPVRLGLALLMISRPRPGPSLLAYWIGGLTVCVPELLIPVLLLNFTPMFGHPSHASPSTGSALGKIQIGLGVVGLSIAAVLTVRFAARQRAAAPPPDDRTSELSAAPGATIAMPRLLTRAQDVSPDDRSVLRRLLGRMHSAWESGASWVAWVIGVISVPVDGVLFIVAIIAASGASVTAQVSASVAFVVLMYAVVEVILVGYLATPGKTQSLLLVLHDWVRTYHRQILVALFTVVGVSQLAQGLHLV

SEQ ID NO: 61809 - protein, 601 aa, Mycobacterium avium
MCGVTGEVRLDGRAPDVAAVSAMAAVLTPRGPDAGGAWSQGRVALGHRRLKIIDLTEAGAQPMVDSELGLSIAWNGCIYNYKELRSELSGYGYRFFSHSDTEVLIKAYHRWGDDFVSHLFGMFAFAIVERDSGRVLLGRDRLGIKPLYLTEDSHRVRFASTLPALLAGGGVDTRIDPVALHHYMSFHSVVPAPATILRGVRKVPPASLVAIEPDGKRTVTTYWAPDFTRHADRADWSERDWEDAVLSTLRLAVKRRLVADVPVGCLLSGGVDSSLIVGLLAEAGQHGLSTFSIGFESAGGVKGDEFQYSDIVAQRFETNHHQIRIDSARMLPALDGAIGAMSEPMVSHDCVAFYLLSQEVARHVKVVQSGQGADEVFAGYHWYPPMGDPAAATLDGAVAQYRRAFFDRDTAGVAQLVGPGILAPGDPSLRFVTEHFAQAGAETGIDRALRLDTTVMLIDDPVKRVDNMTMAWGLEGRVPFLDHELVELAATCPPEYKIAHEGKGVLKQAARRVIPSEVIDRPKGYFPVPALTHLEGPYLDMVRDALYAPTAKERGLFNTDAVDALLANPNGKLTPLRGNELWQIALLELWLQRHGVTGPVA

SEQ ID NO: 61810 - protein, 321 aa, Mycobacterium avium
MPRGAARGGKRTAVTPAERTVLMVVHTGREEATETARRVQKVLGDNGIALRVLSAEAVDRGPLHLAPDDMRAMGVEIEVVDADPLAARGCELVLVLGGDGTFLRAAELARNADIPVLGVNLGRIGFLAEAEAEAIDKVLEHVVARDYRVENRMTLDVVVRHHGTVSDHGWALNEVSLEKGPRLGVLGVVVEIDGRPVSAFGCDGVLVSTPTGSTAYAFSAGGPVLWPDLEAILVVPNNAHALFGRPMVTSPAATIAIEIEADGHDALVFCDGRREMLIPAGSRIEVKRCDTAVKWARLDSAPFTDRLVRKFRLPVTGWRGN

SEQ ID NO: 61811 - protein, 583 aa, Mycobacterium avium
MRKHPQTATKHLFVSGGVASSLGKGLTASSLGQLLTARGLYVTMQKLDPYLNVDPGTMNPFQHGEVFVTEDGAETDLDVGHYERFLDRDLSGSANVTTGQVYSTVIAKERRGEYLGDTVQVIPHITDEIKGRILAMAQPDAQGNRPDVVITEIGGTVGDIESQPFLEAARQVRHDLGRENVFFLHVSLVPYLAPSGELKTKPTQHSVAALRSIGITPDALILRCDRDVPEALKNKIALMCDVDIDGVISTPDAPSIYDIPKVLHREELDAYVVRRLNLPFRDVDWTEWDDLLRRVHEPHETVRIALVGKYVELSDAYLSVTEALRAGGFFHHAKVEMVWVASDDCESASGAAAALGEVHGVLIPGGFGIRGIEGKIGAIHYARTRGLPVLGLCLGLQCIVIEAARAAGLAGANSAEFDPDTPDPVISTMADQVDIVAGAADLGGTMRLGAYPAVLEEDSIVARAYGTTQVSERHRHRYEVNNAYRDKIAESGLRFSGTSPDGHLVEFVEYPPDVHPFIVGTQAHPELKSRPTRPHPLFVAFVGAAMDYKAGELLPVEIPEQSSNGIQHRDSAARPIPEPAARG

SEQ ID NO: 61812 - protein, 117 aa, Mycobacterium avium
MMAEAKKAAPKKAATAASKDADAKGPKHTPPNPKVRGRRKTRIGYVVSDKMQKTIVVELEDRVKHPLYGKIIRTTKKVKAHDENSIAGIGDRVSLMETRPTSATKRWRLVEILEKAK

SEQ ID NO: 61813 - protein, 217 aa, Mycobacterium avium
MKFVDDPEQAVLDAAKDMLRRGLVEGTAGNISARRSDGNIVITPSSVDYRDMQLDDLVLIDPAGSVLQAAQGRSPSTEMQLHLACFAAFDDIGCVIHSHPVWATMFAIAHQSIPACIDEFAVYCGGDVRCAEYAASGSPDVGANAVKALQGRGAALIANHGLVAVGPRPDKVLHITALVERTAQIVWGARALGGPVPIPEDVNRNFAAVYGYLRANP

SEQ ID NO: 61814 - protein, 122 aa, Mycobacterium avium
MIQQESRLKVADNTGAKEILCIRVLGGSSRRYAGIGDVIVATVKDAIPGGNVKRGDVVKAVVVRTVKERRRPDGSYIKFDENAAVIIKPDNDPRGTRIFGPVGRELREKRFMKIISLAPEVL

SEQ ID NO: 61815 - protein, 105 aa, Mycobacterium avium
MKVRKGDTVLVIAGKDKGAKGKVLKAYPDRERVLVEGVNRIKKHTAISTNQRGAQSGGIVTQEAPIHVSNVMVVDSDGKPARVGYRLDEETGKRVRISKRNGKDI

SEQ ID NO: 61816 - protein, 187 aa, Mycobacterium avium
MTTTEKVQPRLKERYRNEIRDSLQQQFGYANVMQIPTVTKVVVNMGIGEAARDAKLINGAVNDLALITGQRPEIRRARKSIAQFKLREGMPIGARVTLRGDRMWEFLDRLTSIALPRIRDFRGLSPKQFDGVGNYTFGLAEQSVFHEIDVDKIDRVRGMDINVVTSATTDDEGRALLRALGFPFKEN

SEQ ID NO: 61817 - protein, 453 aa, Mycobacterium avium
MMQEIPAAQEEELLSAFISSLRTVDLRRKILFTLGIVVLYRVGAALPSPGVNYPNVQQCIKEASGGAAGQIYSLINLFSGGALLKLTVFAVGVMPYITASIIVQLLTVVIPRFEELRKEGQSGQAKMTQYTRYLAIALAILQATSIVALAANGGLLQGCSLDIIADQSIFTLVVIVLVMTAGAALVMWMGELITERGIGNGMSLLIFVGIAARIPAEGKTILDSRGGMIFAAVLVAALIIIVGVVFVEQGQRRIPVQYAKRMVGRRMYGGTSTYLPLKVNQAGVIPVIFASSLIYIPHLITQLIRSGSGGVGNSWWDKFVGSYLSDPSDPVYIGIYFGLIIFFTYFYVSITFNPDERADEMKKFGGFIPGIRPGKPTADYLRYVLSRITLPGSIYLGAISVLPNLFLQIGNGGAVQNLPFGGTAVLIMIGVGLDTVKQIESQLMQRNYEGFLK

SEQ ID NO: 61818 - protein, 181 aa, Mycobacterium avium
MRVVLLGPPGAGKGTQAQKLSEKLGIPQISTGELFRSNIENGTKLGLEAKRYLDAGDLVPAELTNQLVDDRLSEPDAANGFILDGFPRSLQQAKALHEMLERRGTDIDAVLEFRVSQDELLARLKARGRADDTDEVILNRMKVYRDETAPLLDYYRDQLKTVDAVGTLDEVFARALRALGK

SEQ ID NO: 61819 - protein, 61 aa, Mycobacterium avium
MAKKALVNKAARKPKFAVRGYTRCNKCGRPRAVFRKFGLCRICLREMAHAGELPGVQKSSW

SEQ ID NO: 61820 - protein, 132 aa, Mycobacterium avium
MTMTDPIADFLTRLRNANSAYHDEVTLPHSKLKANIAQILKNEGYISDFRTEDARVGKSLIVQLKYGPSRERSIAGLRRVSKPGLRVYAKSTNLPRVLGGLGVAIISTSSGLLTDRQAARQGVGGEVLAYVW

SEQ ID NO: 61821 - protein, 179 aa, Mycobacterium avium
MSRIGKQPVPVPAGVDVTIDGQKVSVKGPKGTLDLTVAEPITVSRNDDGAIVVTRPNDERRNRSLHGLSRTLVSNLVTGVTQGYTTKMEIFGVGYRVQLKGSNLEFALGYSHPVVIEAPEGITFAVQSPTKFSISGIDKQKVGQISANIRRLRRPDPYKGKGVRYEGEQIRRKVGKTGK

SEQ ID NO: 61822 - protein, 135 aa, Mycobacterium avium
MAQTQADTAARKPVGQSVSATRRVSRLRRHARLRKKIAGTPERPRLVVNRSARHIHVQLVNDENGTTVAAASSIEDDVRSLQGDKKARSVRVGQLIAERAKAAGIDSVVFDRGGYTYGGRIAALADAARENGLQF

SEQ ID NO: 61823 - protein, 225 aa, Mycobacterium avium
MMAEQPAGGQGAGDSRDSRGDRDSRGRRGDGGRGGRDRDGDKSNYLERVVAINRVSKVVKGGRRFSFTALVIVGDGNGMVGVGYGKAKEVPAAIAKGVEEARKGFFRVPLIRGTITHPVQGEAAAGVVLLRPASPGTGVIAGGAARAVLECAGVHDILAKSLGSDNAINVVHATVAALKLLQRPEEVAARRGLPIEDVAPAGMLKARRESDALASAAAAREAAAQ

SEQ ID NO: 61824 - protein, 71 aa, Mycobacterium avium
MSQLKITQVRSTIGARWKQRESLRTLGLRRIRHSVIREDNPQTRGLIAVVSHLVEVAPADASSAGTGGSKK

SEQ ID NO: 61825 - protein, 146 aa, Mycobacterium avium
MTIKLHDLKPARGSKTPRTRVGRGEGSKGKTAGRGTKGTKARKNVPVTFEGGQMPIHMRLPKLKGFRNRFRTEYEIVNVGDINRLFPQGGSVGVDELVAKGAVRRNSLVKVLGDGKLTVKVEVSAHKFSGSAREKITAAGGSVTEL

SEQ ID NO: 61826 - protein, 595 aa, Mycobacterium avium
MFAVLSSIPGLSKGADEIRALAGRVDTARHHGVPNGCVLELDLRSMPPETSGFDPLALVTGGSRSASLRDTVDAIHRAAEDPRVAGLIARVQLAPSPSAAVQELREAIVAFTAAKPSLAWAETYPGTLSYYLASAFGEIWMQPGGSVGLIGFASNATFLRDALDKAGIEAQFVARGEYKSAVNRFTEHGFTEAHREAVTRMLDSVQEQVWQAVAESRKLDTDALDALADRAPLLRQDALDSGLVDRIGFRDQAYDRIAELVGVQDVSPDTEPPRLYVSRYAGAARSRLSPPVPSLPGRRRPPTVAVINVDGTLVDGRGGPHFLPFGAATVGSDTIAPALREAAADDAVSAIVLRVNSPGGSVTASETLWREVKRARERGKPVVASMGAVAASGGYYVSVAADAIVANPATITGSIGVITGKLVIRDLLGRLGVGSDTVRTNANADAWSIDAPFTPEQRAHREAEADLVYTDFVSRVAEGRNLTTDAVERVARGRVWTGADAHERGLVDELGGFRIAVRRAKILAGLDEDADVRIVTYPSGSLLDVLRPRASSQPAAVSLPDALGALTVKILGAILDNVERSCSGASALWLGPSRL

SEQ ID NO: 61827 - protein, 101 aa, Mycobacterium avium
MAGQKIRIRLKAYDHEAIDASARKIVETVVRTGASVVGPVPLPTEKNVYCVIRSPHKYKDSREHFEMRTHKRLIDILDPTPKTVDALMRIDLPASVDVNIQ

SEQ ID NO: 61828 - protein, 217 aa, Mycobacterium avium
MARKGILGTKLGMTQVFDENNRVVPVTVVKAGPNVVTRIRTPEQDGYSAVQLAYGEISPRKVNKPVTGQYAAAGINPRRFLAELRLDNPDAAAEYQVGQELTAEIFTDGSYVDVTGTSKGKGFAGTMKRHGFRGQGASHGAQAVHRRPGSIGGCATPARVFKGTRMAGRMGNDRVTVQNLLVHKVDTENGVLLIKGAVPGRTGGLVMVRSAVKRGEK

SEQ ID NO: 61829 - protein, 217 aa, Mycobacterium avium
MALKLDVKAPGGKVEGSIELPAELFDAPANIALMHQVVTAQRAAARQGTHSTKTRGDVSGGGRKPYRQKGTGRARQGSTRAPQFTGGGVVHGPKPRDYSQRTPKKMIAAALRGALSDRARNGRIHAITELVSGQTPSTKSAKAFLGTLTERKQVLVVIGRSDEAGAKSVRNLPGVHILAPDQLNTYDVLRADDVVFSVEALRAYIAANTGTPEEVSA

SEQ ID NO: 61830 - protein, 100 aa, Mycobacterium avium
MATVTDPRDIILAPVISEKSYSLLDDNVYTFVVHPDSNKTQIKIAIEKIFSVKVASVNTANRQGKRKRTRTGFGKRKSTKRAIVTLAPGSKPIDLFGAPA

SEQ ID NO: 61831 - protein, 280 aa, Mycobacterium avium
MAIRKYKPTSPGRRGASVSDFSEVTRSTPEKSLVRPLHGHGGRNAHGRITTRHKGGGHKRAYRVIDFRRNDKDGVNAKVAHIEYDPNRTANIALLHFLDGEKRYIIAPQGLSQGDVVESGPNADIKPGNNLPLRNIPAGTVIHAVELRPGGGAKLARSAGSSIQLLGKEGSYASLRMPSGEIRRVDVRCRATVGEVGNAEQANINWGKAGRMRWKGKRPSVRGVVMNPVDHPHGGGEGKTSGGRHPVSPWGKPEGRTRHPNKASNKLIVRRRRTGKKHGR

SEQ ID NO: 61832 - protein, 93 aa, Mycobacterium avium
MPRSLKKGPFVDGHLLKKVDAQNEKNTKQVIKTWSRRSTIIPDFIGHTFAVHDGRKHVPVFVTEAMVGHKLGEFAPTRTFKGHIKDDRKAKRR

SEQ ID NO: 61833 - protein, 180 aa, Mycobacterium avium
MTTTEFPSAVAKARFVRVSPRKARRVIDLVRGRSVTDALDILRWAPQAASEPVAKVIASAAANAQNNNGLDPATLVVATVYADEGPTAKRIRPRAQGRAFRIRKRTSHITVVVESRPAKDQRSAKSSRTRRAEASKAAAKAPAKKAPAKKAPAKKAPAKTAAKKTPAKTSETSDAKGGSD

SEQ ID NO: 61834 - protein, 280 aa, Mycobacterium avium
MGQKINPHGFRLGITTDWKSRWYADKQYADYVKEDVAIRRLLSTGLERAGIADVEIERTRDRVRVDIHTARPGIVIGRRGTEADRIRADLEKLTGKQVQLNILEVRNPESQAQLVAQGVAEQLSNRVAFRRAMRKAIQSAMRQPNVKGIRVQCSGRLGGAEMSRSEFYREGRVPLHTLRADIDYGLYEAKTTFGRIGVKVWIYKGDVVGGKRELAAAAPAGAERPRRERPSGTRPRRSGASGTTATGTEAGRAAASADESTAAGQPAEAAPAAEPQSTES

SEQ ID NO: 61835 - protein, 138 aa, Mycobacterium avium
MLIPRKVKHRKQHHPRQRGIASGGTAVNFGDYGIQALEHAYVTNRQIESARIAINRHIKRGGKVWINVFPDRPLTKKPAETRMGSGKGSPEWWVVNVKPGRVLFELSYPNEQTARAALTRAIHKLPIKARIVTREDQF

SEQ ID NO: 61836 - protein, 349 aa, Mycobacterium avium
GAATPAPDASSATHTPAAPIGPGAPSGTPGASAVASPAPTAATAPPSSAAAPAPPPANVSRETADEFDTPIGAAAERAMRILHTTYPPLRRPKHRRVFTVANQKGGVGKTTTAVNLAAALALQGLKTLVIDLDPQGNASTALGITDRQSGTPSSYEVLLGEVSVHDALRQSPHNERLFCIPATIDLAGAEIELVSMVARENRLRTALADLDNLDFDCVFIDCPPSLGLLTINALVAAPEVMIPIQCEYYALEGVSQLMRNIEMVKAHLNPQLEVSTVVLTMYDGRTKLADQVAEEVRRYFGSKVLRTVIPRSVKVSEAPGYSMTIIDYDPGSRGAMSYLDASRELAERD

SEQ ID NO: 61837 - protein, 309 aa, Mycobacterium avium
MLFRQLEYFVALASERHFARAARACYVSQPALSEAIRKLEQELNVPLVRRGQKFEGLTPEGERLVLWARRILADHDALKQEVAALQTGLTGELRLGVIPAASSIVALLTDPFCAAHPLVRVQLETSLRSAEIVQRLRRFELDAGVLYPDRQDVADLLVTPLYTEQQVLIAGAELLPDPSETISWSDALTLPMCLLNQGMRGRRLIDDALAAQELTVTPQLETDSVATLLAHVGTGRWASIIPQTWIHSLRPPAGARILRLENPTVTATVALVTSATEPGSVLTRALVQTARGAGINDVLRKAAPGYSAG

SEQ ID NO: 61838 - protein, 389 aa, Mycobacterium avium
MEEEPVAKCVMVLYPDPVDGYPPKYARDSIPVINSYPDGSSLPTPSKIDFTPGELLGCVSGALGLRKFFEDGGHELVVTSDKDGPDSEFERELPDADIVISQPFWPAYITKERFAKARNLKLALTAGIGSDHVDLTEAQARGVTVAEETWSNSISVAEHTVMQILALVRNFVPSHQWIRDGGWNIADCVQRSYDVEGMDVGVIAAGRIGRAVLERMKPFGVNLHYFDVHRLSPEYEKQLGVTYHPDVESLARSVDVVSIHSPLIAQTHHMFNEKLLKSMRRGSYIVNTARAEETDHKAIVAALESGQLAGYAGDVWFPQPPPPHHPWRTMPNHAMTPHISGSSLSAQARYCAGTREILEDWFAGRPIRSEYLIVEGGKFAGTGAKSYAQ

SEQ ID NO: 61839 - protein, 494 aa, Mycobacterium avium
MLFLRRGMPIGQPYRGRTYFRVRTVGSMARDGRPANRPTADTRRTQVAPASSEASKPAAQRSAQRRPVAVLGGNRIPFARSDGAYAEASNQDMLTAALEGLVDRFGLAGERLGVVVGGAVLKHSRDFNLTRECVLGSQLSSYTPAFDLQQACGTGLQAAIAAAEGIAAGRYDVAAAGGVDTTSDAPIGLGDNLRRTLLKLRRAKSNVQRLKLVGTLPATLGVEIPVNSEPRTGLSMGEHQAITAKQMGITRVAQDELAAASHRNMAAAYDRGFFDDLVTPFLGLYRDDNLRPDSSPEKLAKLRPVFGVKAGDATMTAGNSTPLTDGASVALLGTEEWAAAHSLTPLAYLVDAETAAVDYVNGRDGLLMAPTYAVPRLLARNGLSLQDFDFYEIHEAFASVVLAHLQAWESEDYCKERLGLDAALGSIDRSKLNVNGSSLAAGHPFAATGGRILAQAAKQVAQRKAELKGADKPVRALISICAAGGQGVAAILEA

SEQ ID NO: 61840 - protein, 388 aa, Mycobacterium avium
MALSRPLAAHAAVLAAVSALMIGCAHRAAPPPAHSSTSNTPAAAPAPRVCVDPPAAPATLNLRDKLAQLLMVGVKNADDARNVVNGYHVGGIFIGSWTDLTIFQGPLADIAAKAGPLPLAVSVDEEGGRVSRLKSLIGTSPSPRELAQTQTVQQVHDLAADRGKKMRDLGITIDFAPVVDVSDEPDDAVIGNRSFGADPAKVTEYAGAYAQGLRDAGLLPVLKHFPGHGHGSGDSHTGGVVTPPLDDLQNNDLVPYRTLVTTPPVGVMVGHLQVPGLTDDVPASLSPEAVQLLRNGVGYKGPPFTGPVFSDDLSSMAAISDRYGVSEAVLRSLLAGVDVALWVTTDEVPAVLDRLQKAVASGELPAQRVDESLVRVATMKGRGPACGH

SEQ ID NO: 61841 - protein, 408 aa, Mycobacterium avium
MPGCTRSPGRAHRQTVVVSDDQRVGGVRSFLPAVEGMRACAAMGVVVTHVAFQTGHSSGVDGRLFGRFDLAVAVFFALSGFLLWRGHAAAARDLAPRPRTGHYLRSRVVRIMPAYLVAVVVILTLLPDADHPSPTVWLANLTLTQIYVPLTLTGGLTQMWSLSVEVGFYLALPVLALLARRLPVTARVPAIAALGALSWAWGWVPVHPGSGLNPLNWPPAFFSWFAAGMLLAEWVHGGIGRPVRLAQSRTGRVLLAVVAVAAYLVAASPLAGPEGLVPGTPAQFAVKTAMGSLVAFALIAPLVLDRMDTPHRVLGTTVMVTLGRWSYGLFIWHLAALAMVFPVLGTFPFTGRMPAVLVLTLIFGFAIAAVSYALVESPCREALRRWEKRHQPAAPRQLIDAEADAIAP

SEQ ID NO: 61842 - protein, 326 aa, Mycobacterium avium
MSELNTARGPIDTAALGVTLMHEHVFIMTTEIAQNYPEAWGDEEQRVADAIDRLNELKARGVDTIVDLTVIGLGRYIPRIARVAAATELNIVVATGLYTYNDVPFYFHYLGPGAELGGPEIMTDMFVRDIEQGIADTGIKAGILKCATDAPGVTPGVERVLRAVAQAHKRTGVPISTHTHAGLRRGLDQQRIFEEEGVDLSRVVIGHSGDSTDVGYLEELIAAGSYLGMDRFGIDAISPFEDRVNIVAQMCERGHADKMVLSHDANCYFDALPEELVPQVMPNWHYLHIHNDVIPALKQRGVTDEQLHTMLVDNPRRIFERQGPYG

SEQ ID NO: 61843 - protein, 568 aa, Mycobacterium avium
MLGETSDFQPATIVANGRCRMSKAAELIVKCLENEGVSVVFGLPGEENIRFVQALAASPIRYVLTRHEQAASFMAEMYGRVTGRAAVVSATLGPGAINMQLGVADATTNSTPLVAISAQVGHDREFKESHQYVDLVSMFAPITRWAAGIPTARAIPEMVRKAFKLAESERPAAVYLAVPEHIDADETDYDLGPLPRNVVRPDAPSPRQVERAAQILRNAKRPVVLAGHGAARADATKALVRFSEEFGIQVANTFHGKGVMPDDHPNSIGTLGFMRHDYVNFGFDHADAVIAVGYELQEFDPVRINPQADKKIIHMHRFPAEVDAHYSVDVGIIGDISDSLNALTDALSGHRFEHAADVPGSGLLTDEFARGQQDSRYPLAPARVVADTRAALGRSDVVLVDTGATKMWMARLYPTYERNTCLISNGLSTMSFALPGALGVKLAQPQSKVLAVVGDGAFLMNSQEIETAVRERIPLVVLIWEDGGYGLIEWKMDLELGAHYYVKFANPDVVTYAESFGAKGYRISHADELLPTLRAALDDDGVSLISCPVDYSENLRLTNRLGELDETL

SEQ ID NO: 61844 - protein, 886 aa, Mycobacterium avium
MKAGHTEVPSASVILDDPNLLFVNAGMVQFVPYFLGARTPPYPTATSIQKCIRTPDIDEVGITTRHNTFFQMAGNFSFGDYFKREAIELAWTLLTGSVEQGGYGLDPERIWTTVYFDDDEAVRLWQEIAGLPAERIQRRGMEDNYWSMGIPGPCGPSSEIYYDRGEEFGVGGGPIANEDRYVELWNLVFMQSERGEGTSKTDFEILGPLPRKNIDTGMGVERVAFVLQGVHNVYETDLLRPVIDAVAARAPRPYDAGNHDDDVRYRIIADHSRTAAILIGDGVTPGNDGRGYVLRRLLRRVIRSARLLDIEGPIVGDLMATVRDAMGPSYPELVTDFDRIARIAVAEETAFNRTLAAGSKLFDEVASTTKATGAKSISGSDAFTLHDTYGFPIELTLEMASEAGLQVDEVGFRELMAEQRRRAKADAAARKHAHADLTAYRELVDAGPTEFTGFDELSSEARILGIFVDGKRVPVVTHGGDGADRVELVLDRTPLYAESGGQIADEGTISGTGAGESARAAVTDVQKIAKTLWVHRVNVESGEFVEGDTVIAAVDPQWRRGATQGHSGTHMVHAALRQVLGPNAVQAGSLNRPGYLRFDFNWQGPLTEEQRTQIEEVTNQAVQADFEVHTFTEQLEKAKAMGAIALFGESYPEQVRVVEIGGPFSLELCGGTHVHNSAQIGPVTILGESSVGSGVRRVEAYVGLDSFRHLAKERALMAGLASSLKVPSEEVPARVANLVERLRAAEKELERMRLASARAAAGNAAAGAERIGNVRVVAQRMSGGMTAADLRSLVGDIRGKLGSDPAVVALIAEGEGGSVPYAVAANPAAQDLGIRANDLVKQLAAPVDGRGGGKADLAQGSGKDPAGIDAALDAVRSEIAAIARVG

SEQ ID NO: 61845 - protein, 450 aa, Mycobacterium avium
MPEAVSDGLFDLPGAPPPGDHGLGVPAGAPLAVRMRPASLDEVVGQDHLLAPGSPLRRLVEGSGVASAILYGPPGSGKTTLAALISQATGRRFEALSALSAGVKDVRAVIESARTALLRGEQTVLFIDEVHRFSKTQQDALLSAVENRVVLLVAATTENPSFSVVAPLLSRSLILQLRPLSADDIRTVVRRAIDDPRGLGGRVPVAPEAVDLLVRLAAGDARRALTALEVAAEAGESVTVQTVEQSLDEAAVRYDRDGDQHYDVISAFIKSVRGSDVDAALHYLARMLVAGEDPRFIARRLMILASEDIGMADSAALQVAVAAAQTVALIGMPEAQLTLAHCTVYLATAPKSNAVTTALGAAMSDIKAGKAGLVPAHLRDGHYSGAAALGHAQGYQYSHDHPDGVVAQQYPPDELVGVDYYRPTGRGAEREIAGRLDRLRAIIRNKRGRS

SEQ ID NO: 61846 - protein, 705 aa, Mycobacterium avium
MKDPDERARTVEAQMTDDERFSLLVAVMGAGDMWPVRDERIPADVPMSAGYVPGVPRLGVPPLLMSDAGLGVTNPGYRPGDTATALPAGLALAATFDPALARAAGELIGREARSRGFNVQLAGAMNLARDPRNGRNFEYLSEDPLLTAAMVAESVAGIQQQGVISTVKHYSLNCNETNRHFLDAVIDPDAHRESDLLAFELAIERAQPGAVMTAYNKVNGVYAAANSVLLNDVLKDAWAYRGWVMSDWGATPGWECALGGLDQECGAQIDALLWQAESFGAPLRDAYADGRLPKDRLSDMVRRILRSIFAVGVDRSDRAPAPDLNAHNDIALRIARQGIVLLTNRGLLPLRPDSPARIAVIGGYAQLGVPAGFGSSTVVPAGGYAAVVPIGGTALEAGLRNLYLLPSSPLQELRKLLPENTIDFDPGISPAEAVAAAQRADIAIVFAVRAEGEGFDLADLSLPSGQDELIGAVAAANPNTVVVLQTGNPVTMPWLGAVNAVVQAWYPGQAGATAIAEVLTGRVNPGGRLPITFPVDLHQTPRPQLPGAGLPWGTPSTIDYVEGADVGYRWFAAKGHVPMFAFGHGLSYTRFEHRDLVVRGGDTITAGFTVVNTGDRAGADVPQLYLTAMPGKPCLRLLGFERVELGPGESRHVTIDADPRLLAHYDGSIRSWRIAAGSHTVALGISATTLRSTATVELTARTFGR

SEQ ID NO: 61847 - protein, 277 aa, Mycobacterium avium
MNRTERSFDGVGGVRIVYDVWTPEVAPRAVLVLAHGFGEHARRYDHVARRFGAAGLVTYALDHRGHGRSGGKRVLVRDIHEYTTDFDTLVGIATREHHGLKCIVVGHSMGGGIVFAYGVERPDNYDLMVLSGPAVAAQDQVSPLLALAAKVLGVIVPGLPAQELDADAVSRDPEVVAAYRNDPLVYHGKVPAGVGRALLQVGETMPQRAPALTAPLLVVHGSDDRLIPVAGSRRLVECVGSADVELKVYPGLYHEVFNEPEREQVLDDVVGWITARL

SEQ ID NO: 61848 - protein, 314 aa, Mycobacterium avium
MTINASAPQRQGAVAVVDTVTALPAAVAGDGGTADPFEPLTVGAMVDRVSAMAVEKAAHPWAFLMRSLVGGAMVAFGVLLALVVSTGVKTPGVASLLMGLAFGMSFVLILVSGMSLITADMAAGFLAVLQRALSIRSYVVLVAVGLVGNIVGALVFVTVCAAAGGPYLGAFADRAATVGTQKAGQPFWTALLLAVLCTWFLQTSMCMFFKARSDVARMALAFYGPFAFVIGGTQHVIANVGFVGLPLLLNLFHPIAARGDIGWGFGDHGLLTNIGVTTVGNLIGGTVFVALPFWIIAHLQRRRLLSTGALRPDG

SEQ ID NO: 61849 - protein, 307 aa, Mycobacterium avium
MQPQVDVQPPADTGEADGLSPASLTVTIGLGPSLFGDRFGLAARRPAVFTDLPPLNGDNLDPRLHGGDLSVQACADDPQVCYHAVRNLARLGRNIVSPFWAVLGFGRASAGPGQHTPRNLLGFKDGTRNIASQAEYDRFVWVDDSDQPWMNGGTYQVVRKIRMLLETWDVDRIGNQQRIFGRTKEEGAPLSGRHEFDTPDFTAKGADGNPLIDPMSHVGLAARENNDGIMIRRRSYNYTDGLDANGQLNAGLLFISYQKDPQDFIRLQNRLGAHDLLNEYIRHIGSAIFAVPPAPAEGHYIAQSLFR

SEQ ID NO: 61850 - protein, 1024 aa, Mycobacterium avium
MACRFPGAPDPGSFWRLLRDGREVTRFAGEAAEFDADFFNLSPREAAAMDPRQRLALELAWELLEDAFIVAETLRGEAVSVYLGAMTDDYAALTLRDVPDNVDHHTFTGVSRGMIANRISYLLGLRGASMTVDSGQSSSLVAVHLGCESVRSGQAPLAIAGGVHLNLADEIALLEREFGAVSVSGHTYAFDRRADGYVRGEGGGLVLLKPLAAARRDGDRIHAVIRATAVGNAGHGAPAQTLPSAAAEADVIGRALAEAGLGGADIDYVEAHGTGTRVGDAVETQALGRIFAERSHHPVSVGSVKTNIGHAASAAGIAGLLKAVLAIEHAAIPPNLHFERPDPDIDLNRLGLRVNTALAPWPDRGGPRRAGVSSFGMGGTNAHVIVEQDAAQQNPTPASAPADVALPWVLSARSERALALQAQRLSAHLAERPQASPLDVGWSLVSARAVFEHRAVLVGCERGVLATGLAGVASGRPDAATVVGRARATGKTVLVFPGQGSQTLGMGRQLYERFVVFARALDEAVAVVDEHSRLSVREVMWGADPELLQSTEFAQPALFVFEVALAALWESLGVTPDVVMGHSVGEIAAACVAGVLSLRDAARLVAARGALMAALPPGGVMVAVTATEAQVAPLVGGGVSIAAVNGPDAVVLSGEQEAVSAVAERLAGSGARVHRLAVSHAFHSALMEPMLDGFAAAAAGIEPRPPRIPLVSNLTGQLAGPGYGTPQYWVEHVRRPVRFVDGVRLAESQGAGVFLEVGPGAALTAAVDQSLSTEGATAIATLPKDRPETESALHAAGHLFTRGHRLDWAGVFAGLPARRVDLPTYAFARERFWLGGASLAGAPAGAAPVGGGTRAPELAHRLHALPRDEQQRVLRELVCEHAAAVLGHPGGDAIDPDRAFADLGFDSLIGVELRNRLTTHTGTALSRTLIFDYPTPAALADHLRQQLLHDEDPESDDERIWSALRRIPLRELRRTGLLDKLLLLAGMPETATTDAKISDADIDSLSPDALIAMALNSADDDEAE

SEQ ID NO: 61851 - protein, 490 aa, Mycobacterium avium
MSSPGDTAVLVLAAGPGTRMRSDTPKVLHTLGGRSMLSHLLHAIAKVAPQHLAVVLGHDHERIAPLIADWADDLGRPIDVALQERPRGTGDAVRCGLSALPDDYAGVLVVTSGDTPLLDADTVADLIAGHTATRAAVTVLTTTLSDPSGYGRILRTQDNEVTAIVEHADATESQREIREVNAGVYAFDTAALRSALNRLSADNAQQELYLTDVIAILRGDGLPIRARHVDDSALVAGVNNRVQLAQLGAELNRRIVAAHQLAGVTVVDPATTWIDVDVTIGRDTVIHPGTQLLGRTQIGGHCVVGPDTTLTDVSVGDGASVVRTHGTGSSVGAGATVGPFAYLRPGTVLGDDGKLGAFVETKNATIGTGTKVPHLTYVGDADIGEHSNIGASSVFVNYDGESKRRTTVGSHVRTGSDTMFVAPVTVGDGAYTGAGTVVREDVPPGALAVSAGPQRNIEGWVRRKRPGSAAARAAEAAEKAAGGRPAGEAE

SEQ ID NO: 61852 - protein, 538 aa, Mycobacterium avium
MTARAAPDTAQTSLAYRRGWWVRSTLADAARAAAQRTPERIALVDNEVRLNCATLYAQAGELAAALLARIPAGSVVSFMLPNWHEAAVIYLAATLAGMVVNPILPSLRDHDLRFVLEDAGAAMVFVPHRYGGHDYPAMLDRVTAAMSAAPQVVVLRGPDTGRTGRHTPYRCMLGGPPGGLPALDPDAVRMILYTSGTTSRPKGVLHTHNSIHALICQIRDHWAIDPGDTFLVPSPLAHIGGSIYAFECPLLLGTTAVLMDRWDPARAVALMTAHRCTHMAGATPFLQQLLSAAANAGTRLPDLKVFICGGASVSPSLIRRAAAYFDRAVVTRVYGCTEVPVATVGAPRPQEADYAADTDGRPGIAEIKLVAHPAAPTGDGEICVRGPQMLRGYRHPEDDAESFDAAGFFRTGDLGRWALADSADRYLVVTGRAKDVIIRSGENISAKEVEDLLADHPGIAEIAVVGLPDERTGERACAVIVPTPGASPDVASLLALLVSKGVAKFKAPEQVVLWDALPKNDAGKVLKHRIRAALSKDG

SEQ ID NO: 61853 - protein, 230 aa, Mycobacterium avium
MSRAELDKNPRDVASMFDGVARRYDLTNTVLSLGQDRYWRKATRSALGIGPGQKVLDLAAGTAVSTVELNKSGAWCVAADFSVGMLAAGAARRVPKVAGDATRLPFADDVFDAVTISFGLRNVVDTQAALREMARVTRPGGRLVVCEFSTPSNALFATVYKEYLMRALPRVARAVSSNPDAYVYLAESIRAWPDQAALADQIAGAGWAGVRWRNLTGGIVALHAAHRPPR

SEQ ID NO: 61854 - protein, 412 aa, Mycobacterium avium
MTTAATRADLVVVGAGPAGSAAAAWAARAGHDVLVVDAARFPRDKACGDGLTPRAVAECERLGLGGWLDSRIRHRGLRMSGFGAQVQVDWPGPSFPSTGSAVARTELDDRIRRVAEDSGARMLLGTKAVGVQRDSSAAVTSLMLADGTGVQCRQLIVADGARSSLGRTLGRRWHQETVYGVAARGYLSTPRADDPWLTSHLELRGPDGARDKVLPGYGWIFPLGNGEVNIGVGALSTSRRPAELALRPLIDHYTDLRRDEWGFVGRPRAVASALLPMGGAVSGVAGPNWMLIGDAAACVNPLNGEGIDYGMETGRLAAGLLGCPDLSQEWPALLREHYARGFSVARRLALLLTYQRFLPATGPVAMRSTTLMRIAVRVMANLVTDDDADWVARAWRGAGRLSRLIDRRAPFS

SEQ ID NO: 61855 - protein, 343 aa, Mycobacterium avium
MHTSMFGRVNTPATVVAGVDFGDPAFAATVRDGVGRIEQLMDTELRSADDIMTELLTHLFKAGGKRFRPLFTVLSAQIGPDPDAAEVTIAGAVIELVHLATLYHDDVMDEAEVRRGTPTANVRWGNNVAILAGDYLFATASRLVSRLGPEAVQLIAETFAQLVTGQMRETRGRKEGSDPIEHYLKVVYEKTACLIAAAGRFGAMFSGADADQVERLSRLGGIVGTAFQISDDIIDIDSDSHESGKLPGTDVREGVHTLPMVYALREPGPDAARLRELLVGPIDDDEVVAEALTLLRASPGMAKAKQSLREYAAQAHRELDQLPDVPGRRALQTLVDFTISRHG

SEQ ID NO: 61856 - protein, 228 aa, Mycobacterium avium
MTKRILNVVTNVAHYDEPEHPTGPWLSELTHAWHVFDEHGLEQTLVSPSGGKVPLEPRALKFPNYDKTAKAWRADPGKMALLESTRSPDEIDSADYDAISFTGGHAVMYDFPDSIGLQRITREIYERGDIVASVCHGYCGLLNTTLSDGSYLIAGKKMTGFSWREEVLARVDKLVPYNAEQRAKDRGALYEKAKLPFISYAVVDGNLVTGQNPASAKETAKKLASLLR

SEQ ID NO: 61857 - protein, 359 aa, Mycobacterium avium
MKWLAAWWGQPDHFDWLTGYLQDHGFGTATRRAMAVVGASLVLVPANVLWGATPFFPGLTLTVSVLAGMVGLGMAVLWLHGWPTRRQSVVFALTGSVAIGAGCLWQTEPLVGLMACSALSVTGGYNAFFHTAKFMGLNFGLAGAIGALQAARLAASGQAMLAFTGYFLVLELNVIVPLSIQIVVRALWLDLLRANRDPLTGLLNRRACNRAIIGRMLTGASHMFLAVAMVDLDRFKALNDTHGHAAGDEALIAVAGALTAACGDTTVVGRVGGEEFLVADIVTTEQLPGWGQQLCEAVAALDPPVTASVGTATLPLRDLVSEYAEHAFHQLVAQADSAMYEAKRCGGNQTRHRPAQVST

SEQ ID NO: 61858 - protein, 159 aa, Mycobacterium avium
MRVYLGSDHAGFELKQQIIAHLEQSGHQPIDCGAFSYDADDDYPAFCIAAATRTVADPDSLGIVLGGSGNGEQIAANKVPGARCALAWSVETAQLAREHNNAQLIGIGGRMHTVAEALAIVDAFVTTPWSKAPRHQRRIDILAEYERTHQAPPVPGAVG

SEQ ID NO: 61859 - protein, 426 aa, Mycobacterium avium
MARIGDGGDLLKCSFCGKSQKQVKKLIAGPGVYICDECIDLCNEIIEEELADADDVKLDELPKPIEIREFLEGYVIGQDTAKRTLAVAVYNHYKRIQAGEKGRDSRHEPVELTKSNILMLGPTGCGKTYLAQTLAKMLNVPFAIADATALTEAGYVGEDVENILLKLIQAADYDVKRAETGIIYIDEVDKIARKSENPSITRDVSGEGVQQALLKILEGTQASVPPQGGRKHPHQEFIQIDTTNVLFIVAGAFAGLEKIIYERVGKRGLGFGAEVRSKAEIDTTDHFAEVMPEDLIKFGLIPEFIGRLPVVASVTNLDRESLVKILSEPKNALVKQYTRLFEMDGVELEFTDDALEAIADQAIHRGTGARGLRAIMEEVLLPVMYDIPSRDDVAKVVVTKETVQDNVLPTIVPRKPSRTERRDKSA

SEQ ID NO: 61860 - protein, 260 aa, Mycobacterium avium
MSFRAPQHESVRPSPIFLALLGLTALGGALAWLAGSSPRPLAYLGVFVFVIAGWLVSLCLHEFGHAVTAWRFGDRDAAVRGYLTLDPRRYSHPALSLVLPMVIIALGGIGLPGAAVYVQTWFMTPARRTLVSLAGPAANLVLAAVLLALTRAFFTADHAVLWAGVAFLGFLQLTAVLLNLLPIPGLDGYDALEPHLSPETQRALAPAKQWGFFILLFLLLAPGLNRWFFGIVYWLFDFSGVPHWLAGAGNVLTRFWSRWV

SEQ ID NO: 61861 - protein, 182 aa, Mycobacterium avium
MVAVAEPELEELAELVRRLSVVHGRVTLSSGKEADYYVDLRRATLHHRASALIGRLMRELTSDWDYAVVGGLTLGADPVATAIMHAPGRPIDAFVVRKSAKTHGLQRLIEGSEVAGKRVLVVEDTSTTGNSALTAVRAVQQAGGQVLGVATVVDRATGAAEAIEAEGLPYRSVLGLADLGLG

SEQ ID NO: 61862 - protein, 142 aa, Mycobacterium avium
MAPKKKVVGLIKLQIQAGQANPAPPVGPALGQHGVNIMEFCKAYNAATENQRGQVIPVEITVYEDRSFTFALKTPPAAKLLLKAAGVGKGSAEPHKNKVAKVSWDQVKEIAETKKADLNANDIDAAAKIIAGTARSMGITVE

SEQ ID NO: 61863 - protein, 235 aa, Mycobacterium avium
MSKRSKAYRAAAEKVDRDNLYTPLQAAKLAKETSSTKQDATVEVAIRLGVDPRKADQMVRGTVNLPHGTGKTARVAVFAVGEKAEQAQAAGADIVGSDDLIEKIQGGFLDFDAAIATPDQMAKVGRIARVLGPRGLMPNPKTGTVTPDVAKAVADIKGGKINFRVDKQANLHFVIGKASFDEKALAENYGAALDEVLRLKPSASKGRYLKKITVSTTTGPGIPVDPSITRNFAEA

SEQ ID NO: 61864 - protein, 147 aa, Mycobacterium avium
MSDEGDVANDAASDGADTTDDRAGGGRTAVVTRPQRPTGKRSRQRTAGDADAEPSDEAEVSAPEKAEKAKRKKAAKPKKSADTRANPFVFVYNYLKQVVAEMRKVIWPNRKQMLTYTSVVLAFLAFMVALVGLADFGLTKLVLLVFG

SEQ ID NO: 61865 - protein, 256 aa, Mycobacterium avium
MTTFDGDPSAGDAVDLRETDEATEAADEAAETTEDAAESAETQGEPAEEVDPAAALKAELRSKPGDWYVIHSYAGYENKVKANLETRVQNLDVGDYIFQVEVPTEEVTEIKNGQRKQVNRKVLPGYILVRMDLTDDSWAAVRNTPGVTGFVGATSRPSALSLDDVVKFLLPRGATKKVAKGAASTAAAAEAGGLERPAIEVDYEVGESVTVMDGPFATLPATISEVNGEQQKLKVLVSIFGRETPVELTFSQVSKL

SEQ ID NO: 61866 - protein, 788 aa, Mycobacterium avium
MATDRIANPWGTRTPYAPGTRWPERIDTYLADGVTAESVDRWVQSAAVLHSNGDGLDIAVKDGRIVGVRGRAVDRVNHGRLDPKDLFGWQANASADRLTTPLLRVRGALRPCDWDTAMERIVARSRELLDRHGPSSIGFYTSGQLFAEEYYTQAAIAHGAIGTNHVDGNTRLCTATAAEALKESFGCDGQPGSYTDVDHADVIALFGHNVAETQTVLWARMLDRLAGSDPPAIVCVDPRLTPVARHATVHLAPLPGTNVALMNGLLHEIIGNGWIDRDYIDAHSVGFDELQCRVSEFTPEWVAEICGVAATDLRRAARLIGTAQRLLSTVLQGFYQSHQATAAAVQVNNIHLVRGMLGRPGCGVLQMNGQPTAENTRECGADGDLAGFRNWSNDSHVAELADLWNLEPLQIPHYGPPTHAMQMFRFAEEGTLRMLWVTATNPAVSLPELPRIRDILSQQRLFLVVQDIFLTETAALADVVLPAAAWAEKTGTFTNADRTVHLSEKAVEPPGSARSDLEIFLDYARRMDFRDKDGRPFPPWTDPESAFEAWKKCSAGRPCDYTGLSYAKLRGGSGIQWPCNTDHPDGIERLYEDGRFPAAPDYCEAYGKDLITGAPLQPDEYRSLNPSGKAIIKAAQYLPPHERPGPDYPFALITGRTIYHFHTRTKTARAQQLQDAAPEVWVEVSERDARRLGIEAGDLVHVSTPRGRITCAARVGGIRDGVLFVPFHYGYWDRDGGDHQRAGNELTATDWDPASKQPSFKTAAARLDMAPTHTAAPVSEAVAAGSPS

SEQ ID NO: 61867 - protein, 463 aa, Mycobacterium avium
MTTTITPVPQPAAAPERHKGRHWIDDWRPEDPEFWETTGKAIARRNLIFSIFAEHVGFSVWMLWSIVVVHMTAGPHGHPSASGWALTASQALCLVAVPSGVGAFLRLPYTFAVPVFGGRNWTTISAALLLIPCLLLAWAVSHPGIPFGVLVAIAATAGFGGGNFASSMANISFFYPEKDKGWALGLNAAGGNIGVAVVQKVIPPVVIAGGGVALSRAGLFYVPLAVVAAVCAFLFMNNLTEIKADVKPVWQSLRHADTWIMSLLYIGTFGSFIGYSAAFPTLLKTVFGRGDIALAWAFLGAAIGSVIRPLGGKLADRVGGARITAASFVMLAVGAAAALWSVKAVNLPAFFASFMFLFVATGIGNGSTYRMISRIFKIKGELAGGDPDTMVTMRRQAAGALGVISAVGAFGGFIVPLAYAWSKSQFGSIEPALRFYVVFFLGLLAVTWYCYLRKHNAITRVGI

SEQ ID NO: 61868 - protein, 833 aa, Mycobacterium avium
MVGHRFVEALRARDTEGRWRITVFAEEADAAYDRVGLTSYTESWDRALLALPGNDYQGDPQVRLVLNQRVTEIDRATKSVVTADGQRHHYDTLVLATGSYAFVPPVPGHELPTCHVYRTLDDLDAIRADAQRAAQTDHARAGVVIGGGLLGLEAANALRQFGLATHVVEMMPRLMAQQIDEAGGALLARMIGDLGISVHVGTGTEAIEPVEGPDGSTTVRVRLSDGQVIDAGLVIFAAGIRPRDELAVAAGLARAERGGVLTDLSCRTSDPDIYAIGEVAAIDGRCYGLVGPGYTSAEVVADRLLDGSAEFGEADLSTKLKLLGVDVASFGDAMGTTENCLEVAINDAVNRTYAKLVLSDDAKTLLGGVLVGDASSYGVLRPMVGSELPGDPLALIAPASSGGGTALGVGALPDSAQICSCNNVTKGDLKCAIADGCADVAALKSCTSAGTSCGSCVPLLKQLLEAEGVEQSKALCEHFSQSRAELFEIISATEIRTFSGLLERFGRGKGCDICKPVVASILASTGSEHILEGEQASLQDSNDHFLANIQKNGSYSVVPRVPGGDIKPEHLILIGQIAQDFGLYTKITGGQRIDMFGARVDQLPAIWKRLVDGGMESGHAYGKALRTVKSCVGTDWCRYGQQDSVQLAIDLELRYRGLRAPHKIKMGVSGCARECAEARSKDVGVIATEKGWNLYVGGNGGMTPKHAQLLASDLDTETLVRYIDRFVMYYIRTADRLQRTAPWVESLDGGLDHVREVVCEDSLGLAEEFEAAMERHVRNYKCEWKGVLDDPDKLSRFVSFVNAPDAVDSTVAFTEHAGRKIPVSIGMPKIRQG

SEQ ID NO: 61869 - protein, 200 aa, Mycobacterium avium
MGTARQAVSDEQFWLVEHSPARTRVLDAALDLFAANGVSGTSLQMIADAVGITKAAVYHQFRTKEQIVIAVTERELGRLVPALEEAEAHDDGPQARDALLVRVIEMAVRDRRLVRTLQFDPVVVRLLAEHEPFQRFMDRLYRVLLSDAGLDGRIEAAMFSGALSTAVMHPLVVDIDDETLLDRVTDLSRRLLGLPRKPVE

SEQ ID NO: 61870 - protein, 103 aa, Mycobacterium avium
MATYAIVKTGGKQYKVAVGDVVKVEKLDSEPGSNVSLPVALVVDGAKVTSDAAALAKVAVTGEVLEHTKGPKIRIHKFRNKTGYHKRQGHRQQLTVLKVTGIK

SEQ ID NO: 61871 - protein, 715 aa, Mycobacterium avium
MAENTIKWDKDADGIVTLTLDDPTGSANVMNEHYKESMHNAVERLVAEKDSITGVVITSAKKTFFAGGDLKSMINLGPENAGEAFDTVEAVKRDLRALETLGKPVVAAINGAALGGGLEIALACHHRIAADVKGLVVGLPEVTLGLLPGGGGVTRTVRMFGIQNAFMNILSQGTRFKPDKAKEIGLVDELVGSVEELVPAAKAWIKANPDAHEQPWDKKGYKMPGGTPSSPALAGILPSFPALLKKQLKGAPMPAPRAILDAAVEGAQVDFDTASRIESRYFTQLVTGQVAKNMIQAFFFDLQHINGGGSRPEGIEPVKINKIGVLGAGMMGAGIAYVSAKAGFDVVLKDVSLEAAQKGKGYSEKLEAKALQRGKTTEEKSKSLLDRITPTADAADFKGVDFVIEAVFENQELKHKVFQEIEDIVEPNALLGSNTSTLPITGLATGVKRQEDFIGIHFFSPVDKMPLVEIIKGEKTSDEALARVFDYTLAIGKTPIVVNDSRGFFTSRVIGTFVNEALAMLGEGVAPASIEHAGSQAGYPSPPLQLSDELNLELMHKIAVATRKGIEDAGGTYEPHPAEAVVEKMIEIGRPSRLKGAGFYEYVDGKRTRLWPGLQETFNSGSTSIPLQDMIDRMLFAEALETQKCLDEGVLTSTADANIGSIMGIGFPPYTGGSAQFIVGYSGAGGTGKEAFVARAKELAARYGDRFLPPASLTS

SEQ ID NO: 61872 - protein, 418 aa, Mycobacterium avium
MGSTGADEYGDRVAVAGDAELERVRAVHQMRSYRIGSVLRVGVVGLMVAAMIIGTARSEWPQESVLILLYGIIALGAVALAFAPFRRWIGIGRLAGVGRLEPFAFTVVDILALTIFQLLSTNGIYPLLIMAMLPVLLGLDVSSRRAAVVLIFSMLGFAIAVLQDPVMSSSVRLPEAGFRFLLYGFLCCAAFLVVRIEERHTRSVAGLSALREELLAQTMNASDVSQRRISEFIHDGPLQDILAVRQELVELDAAVPDDERIGRALAGLQLASERLRQATFELHPAVLEQVGLGAAVQQLAEFTAQRSGIEISTDIDYSGRSAIDAVVFGVVRELLSNVVQHSRARTAAIMLGRTDGTCVLHVVDDGVGFNQETVARRLGEGHIGLASHRARVEAAGGELVFLDVPVGTHVCVEVPLRN

SEQ ID NO: 61873 - protein, 425 aa, Mycobacterium avium
MTFSLRPARLGERAPRPGPLPREVWILSWANVMVALGYGVISPALPTFARSFGVSIKAVTFLVTVFSLSRLCFAPISGLLTERLGERRIYIGGLLIVAVSTAACAFSQAYWQLMLCRVFSGVGSTMFYVSALGLMIHISPADARGRIAGLFTTSFMVGAVGGPAVGGLAAGWGLTAPFVVYGVAMLGVALVLFLGLRNSALAAPPPPTRSTVTMREALRVRAYQSALLSNFATGWSAFGLRMALVPLFVSDVMGRGIGTIGVVLAAFAGGNALAVVPSGYLSDRMGRRTLLIVGLVTSGAATVWLGFVASLPVFLVAAGVVGVVTGIYMSPLQAAVADILGNEARAGLPVATVQMMSDLGAIVGSMAVGWAAEQIGYGWGFFISGVVLLIAAVGWVMAPETRTATELEADLMAASRTSSRCEQQL

SEQ ID NO: 61874 - protein, 684 aa, Mycobacterium avium
MTVPATDSWPAPIRVPAGTTAAAAVRDAGLPGRGAPDAVVVVRDASGTLRDLSWVPDTDAEVVPVAANTDEGRSVIRHSAAHVLAQAVQELFPQAKLGIGPPITDGFYYDFDVPEPFTPEDLDKLEKRMRQIVKEGQLFSRRVYESKEQARAELAGEPYKLELVDDKSGDPDIMEVGGDELTAYDNLNPRTRERVWGDLCRGPHIPTTRHIPAFKLTRSSAAYWRGDQNNASLQRIYGTAWESQEALDDHLRLIEEAQRRDHRKLGSELDLFSFPDEIGSGLAVFHPRGGVVRRELEEYSRRKHIEAGYEFVNTPHITKAQLFHTSGHLDWYADGMFPPMHLDAEYDDDGTVRKPGQDYYLKPMNCPMHTLIYRSRGRSYRELPLRLFEFGTVYRYEKSGVVHGLTRARGFTMDDSHIFCTREQLHGELASLLRFVLELLGDYGLTDFYLELSTKDPDKFVGSDEMWEQATTSLADVAAESGLELVPDPGGAAFYGPKISVQARDALGRSWQMSTIQVDFNFPERFELEYTASDGTRQRPVMIHRALFGSIERFFGILTEHYAGAFPAWLAPVQAVGIPVADEHVPYLESVAAQLKSHGVRVEVDASDDRMAKKIVHHTAQKVPFMLLAGDRDVAAGAVSFRFGDRTQINGVPRDSAVDAIVKWIADRENSVPSAELVKVSSGE

SEQ ID NO: 61875 - protein, 550 aa, Mycobacterium avium
MGAQTALTLLLAAIAVIVLVDWISERTRLPSATLLVLVGIGQALLPGPTIGLEPDVVMTCILPPLLYHAALESSLVGIRRNLRTVVSLSVVLVLLTAASVGVAFSLLVGGATLAVGMVLGAAVAPTDPVAALAVARKEGLPLNIVTLIEGEGLLNDATALTTLAVAVTVARGAAFSAPSAIREFVLAAVGGLVVGQVFAYARRLLRRWRHDVLTANAISLATPFLTYLVAEKLSASGVLAVVVCGLIVGHDSPRVESGASRLQTRAVWRLVNFLLEGVVFLLIGHQVPVILDELGGYALSTILVAVGVTVAVVLLVRPLWLLLTQALPRSLHTRLGNVDDSATDDAEPRPERTRERLSGREIVVLSWAGTRGVVSLAAIFAVPVLTEGNAPFPDRDLLLFCTLVVVLVTLIGQGVTFGPLVRALGLRAKTTDELRLRNRARAAALRAALDRLDSLDPEDGADVDPRVIDVVRQQLSAQLERYEHRLTLLSDVDELPAAPAYEAAVGLRRVAIDAQRDELVRWRDAGMLPDQSLRAIERELDHEESMLPMG

SEQ ID NO: 61876 - protein, 952 aa, Mycobacterium avium
MPDRPGILGRLTGRYALLVVGLWVLAAAVANVAVPQLERVVDSHARSFMPPSAPSAVAAARAAQLFDQTPSNNFVYVVLERNQRLGAGDRQFYDALAAALGSDHRHVYAVTDLWSQPATAAGAQSTDGQAVSVMVRLAGMLGTAQARDSVNAVRATAQKLGPPAGLQVHVTGPGATIVDEFSAIDRQMLGITAATIGLILLLLLVVYRSPVAAAIPLISVGLALALARAVVAALGQANVVEVSLFSVALMAAMTLGAGTDYAIFLVGRYHEARRGGVAPAQALTVAYRSIAPVVIGSALTVSVALACLVFAHVGSFRSAGLPCAIGILATMVAALTLTPALMSLAVRRRYLEPRPSRTARRWRRVGTTVARWPGPILVAALGLTLLVALPLAGMRIGFNEPAATPSSTDSNRGYASAGRHFPENALLPDVIAIRADHDLRNPAGLIAIERITRHIMAVPGVRAVQSASRPDGKVPEQATLSYQAGVLGRQFGDTVDSLTQRLARVSELDGALAQTQQAVDGLGNGLHGGSAGLADMSGAADDMRAGMDGLQRNVTTVSGYLDPLRDLVGRTPDCAANPICSMVDRVLAPVDSLVQTSAQLGSGAAKLTTGSNTAATAMAGLPQNVDAMKSALVQARSATRDLLGLSDTLGPQMRQLTDYLNEISTQFQGSAAADFYLPQRALTDPRYTAVLNHLISQTGRAAYLLVYGDGAEWGADSAERAEQVRAAIKEATKEGTLTPVEVDLAGVGPVTADLQRFVADDTRLLVGAALVLIFLIVTAMLRSPVAGLVVVGTVVTSYASAIGASVLIWQHLLHQELHWAVAPIAFIALIAVGADYNLLLALRIKQEAAAGLRTGIIRAFGGTGGVVTVAGIIFGLTMLALLTSSVLSIAQIGTTIAVGLLLDTLVVRAFIVPSIVALLGRWFWWPSPLPRRGVARVVKTVEPQPVSVATAV

SEQ ID NO: 61877 - protein, 297 aa, Mycobacterium avium
MSNQQQAERMTSGKGFIAALDQSGGSTPKALRLYGIEDSAYSSEKEMFDLIHQMRSRIITSPAFTGDRVLAAILFEQTMDRDIEGKPSTTYLWETKGVVPILKIDKGLAEASDDVQLMKPIPGLDELLQRAVSKGVFGTKERSVIGGANPAGIAAVVAQQFELAHQVLSHGLVPIIEPEVTISIADKAKAEGILRDEITKQLDSVPDGQRVMLKLSLPTEANFYRPLIEHPKVMRVVALSGGYSREEANELLAKNAGLIASFSRALTEGLTVDQSDEQFNATLDKAIQSIYDASVAG

SEQ ID NO: 61878 - protein, 361 aa, Mycobacterium avium
MTLGAERERRLTGWLRGRLPDADDVRVEGIDRVSFGHSAEMMTMSVIATRRGRDERRDVVLRLRPSPPALLEPYDLARQFGILRALADTDVRAPRALWLEPTGDVLGRPFFVMERVAGEVYEMQPPADASDDTVARMCESLAEQLAAIHAVDLTRTGLAPLDDGAGHLDRELGHWAAEMNRVKRGPLPALERLHRALLSGKPAPCPRITLVHGDAKPGNFAFTGGEVSAVFDWEMTTVGDPLTDIGWLEMLWMQPVGINSHPAALPIDALLAHYQSASGIEPVNRPWYRAFNAYKMAVICLIGAMLVEDGHSDDQKLVLAAYGTGLLTKAGLAELGIDEPLDDGPVLPRQERIQQVLARAQ

SEQ ID NO: 61879 - protein, 336 aa, Mycobacterium avium
MKASVVTSPDRAEVIDVERPGVGPRDVLVRMRACGICGSDAFYISIGGVPPRQGHTPLGHEPAGEVVEVGAEVTGLAVGDHVVINPMAAPSGIIGNGGASGALADYLLIENAVRGTSLEVIPDHIPWEVAALNEPMAVARHGVNRCQPRPTDKVVVFGAGPIGLGATLAFKSLGVQHIVVIDLIPGRLDKAVRIGADAVVNSAEEDVAARLVELHGPGESMFPGKAGTDIYLDAAGAPAVVSTALAAAKKGATLGIVGVHKEPVPVDLINVMSNEITIVGSMGYPDEIFEVTGDLVRNWEKYALIVSHTIPFDRVGEALELARTPGAADKVVVTFC

SEQ ID NO: 61880 - protein, 398 aa, Mycobacterium avium
MSTPLPPLVAPADQLTADEMARYSRQLIIPGLGVDGQKRLKNARVLVIGAGGLGAPTLLYLAAAGVGTIGIVEFDAVEESNLQRQIIHGVADVGRSKAASARDSIAAINPLVDVRLHEFRLDASNAVELFGHYDLIVDGTDNFATRYLINDAAVLAGKPYVWGSIYRFEGQASVCWEDAPDGRGLNYRDLYPEPPPPGAVPSCAEGGVLGVVCAAIASVMSTEVIKLITGIGESLLGRLMIYDALEMSYRTIAIRRDPCDASRPAITTLVDYEQLCGAAPAASTDAATGGAEAAITPRQLRELLDSGAKLALIDVREPVEFDIVHLDGAQLIPQSSINSGEGLAKLPADRMPVLYCKTGVRSAQALAVVRQAGFSDAVHLQGGIVAWAQQMQPDMILY

SEQ ID NO: 61881 - protein, 239 aa, Mycobacterium avium
MTRSSCQSSDAAREADRAADSPAPRLSADHPGVNELFAVLAYGEIAAFYRLTDEAKMAPDLRGRISMASMAAAEMQHYEQLRDALESRGVDVVSAMSKYVSALENYHRLTMPSTWLEALVKTYVGDALAADLYLEIADGLPDEVADVVRAALAETGHSQFVVAEVRAAVTSSSKQRSRLALWARRLLGEAITQAQYLLADHDELVDLVVSGAGGLGQLNAFFDRLQQTHERRMRELGLG

SEQ ID NO: 61882 - protein, 504 aa, Mycobacterium avium
MSAPTDQATERVQALVGDGQLTRAQAGGKAWSIQHMLSLNIPVPPGFVLTTDVCREYHDRGRVLPAGVTRDIARAMENLESRSGRRFGHVDHPLLVSVRSGAAISMPGMMDTILNLGMNSSIEEALAAETGDARYAADTRHRFTEQFTRVVGVEPPENHWEQLDLAIRAVLESWNSKRALAYRRSHGIPDDGGTAVTVQAMVFGNLDDRSGTGVLFSRDPLSGAAQPYGEWLPRGQGEDVVSGRKDALHLDHLAATMPSVHRDLLAAAATLERHGRDMQDIEFTVQSGKLWLLQSRAAKRSPQAALRCAVQLQREGVISTKEALDRLTAEHVRALQRPTLDPAAVAASPPVASGKPASPGIATGLVVIDADEAEDLADKGRAVILARPTTDPDDVAAMSASVAVVTELGGSTSHAAVVCREMAVPCVVGCGMDSVTALAGRVVTVDADTGTVHLGELPVRPLLEADDEDLRTIERWLRDDLENYDPSYDVVALIERRQQRGATR

SEQ ID NO: 61883 - protein, 382 aa, Mycobacterium avium
MQISGTLLLQLGALLATLAVLGAAARRFALSPIPVYLLAGLALGKGGLLPLATGGQFITTSAPIGVVLLLLTLGCEFSVAEFSSSMRHHLPSAAVDVVLNAAPGAIAGWLLGLDGVAILCLAGVTYISSSGVVARLLEDLRRLGNRETPAVLSVLVLEDFAMAAYLPLFAVLASGGGWLHAVVGMVVAVSALVAAFAASYRWGHHVQRLVEHPDSEQLMLRVLGITLIVAAMAESLHASAAVGAFLVGLTLTGETATRTRQVLAPLRDLFAAIFFLAIGYSVDPHELIPMLPAALILAAATAATKVATGIFAARHDGVARRGQLRAGTALIARGEFSLIIIGLAGSSLPAVAALATSYVFIMAIAGPVLARYTGPRPAAPAT

SEQ ID NO: 61884 - protein, 583 aa, Mycobacterium avium
AIARRVHGHAEAIAAALGTAVVHDRYFDTVLARVPGRAHEVIAAAKARGINLWRVDDDHVSVACDEATTDEHVAAVLEAFGVAPAEPVASEIATRTSEFLTHPAFTQYRTETAMMRYLRTLADKDIALDRSMIPLGSCTMKLNAAAEMEPITWPEFARQHPFAPASDTPGLRRLIGDLENWLVAITGYDAVSLQPNAGSQGEYAGLLAIHDYHASRGEPHRDICLIPSSAHGTNAASAALAGMRVVVVGCHDNGDVDLDDLRAKVTDHRDRLSTLMITYPSTHGVYEHDIAEICAAVHDAGGQVYVDGANLNALVGLARPGKFGGDVSHLNLHKTFCIPHGGGGPGVGPVAVRSHLAPFLPGHPHAPELPQGHPVSSAPYGSASILPISWAYIRMMGADGLRAASLTAITSANYIARRLDEYFPVLYTGENGMVAHECILDLRPITKATGVTVDDVAKRLADYGFHAPTMSFPVAGTLMVEPTESETLTEVDAFCDAMIAIRGEIDRVGAGEWPVEDNPLRGAPHTAECLVTTDWDHPYSREQAAYPLGKDFRPKVWPPVRRIDGAYGDRNLVCSCPPVEAFA

SEQ ID NO: 61885 - protein, 489 aa, Mycobacterium avium
MSSSVTPSRPTTGTAQIGVTGLAVMGSNIARNFARHGYTVALHNRSIAKTDALLKEHGDEGEFVRCETIAEFLDALEKPRRVLIMVKAGDPTDAVINELADAMEPGDIIIDGGNALYTDTIRREQAMRERGLHFVGAGISGGEEGALNGPSIMPGGPAESYRSLGPLLEEISAHVDGVPCCTHIGPDGAGHFVKMVHNGIEYSDMQLIGEAYQLLRDALGKTAEQIADVFDEWNSGDLDSFLVEITAQVLRQTDAKTGKPLVDLILDEAEQKGTGRWTVKSALDLGVPVTGIAEAVFARALSGSVAQRRATTGLASGRLGEKPSDAAQFTEDIRQALYASKIIAYAQGFNQIQAGSAEYGWDITPGDLATIWRGGCIIRAKFLNRIKDAFDENPDLPTLIVAPYFRSAIEAAIDGWRRVVVTATRLGIPIPGFSSALSYYDALRTERLPAALTQGLRDFFGAHTYGRIDEDPDKRFHTLWSADRREVPA

SEQ ID NO: 61886 - protein, 195 aa, Mycobacterium avium
MPLLTIGDQFPAYELTALIAGDLSKVDAKQPGDYFTTITSEDHAGKWRVVFFWPKDFTFVCPTEIATFGKLNDEFEDRDAQVLGVSIDSEFVHFNWRAQHEDLKNLPFPMLSDIKRELSLATGVLNADGVADRATFIVDPNNEIQFVSVTAGSVGRNVEEVLRVLDALQSDELCACNWRKGDPTLNATELLKASA

SEQ ID NO: 61887 - protein, 459 aa, Mycobacterium avium
MTAKWVGRCLECGTWGTVDEVPALSAVAGRRPRLTAASQAVPITSIKPDASRHRSTGVDELDRVLGGGVVPGSVTLLAGDPGVGKSTLLLEVAHRWAQSGRRALYISGEESAGQIRLRADRIGCGGDQVYLAAESDLHTVLEHVATVKPALVIVDSVQTMSTTEADGVAGGVTQVRAVTAALTAAAKANGVALILVGHVTKDGAIAGPRSLEHLVDVVLHFEGDRNGSLRMVRGIKNRFGAADEVGCFLLHDNGIAGVTDPSNLFLDQRSAPVPGTAITVTLDGKRPLIGEVQALLASPSGGSPRRAVSGIDHSRAAMITAVLEKHGKLPVAVNDIYLSTVGGMRLTDPSSDLAVAIALASALSELPLPTTAVMIGEVGLAGDLRRVSGMARRLSEAARQGFSIALIPDGDDPRREIVPSGMRALRAPTIGAALQHMVDIAEPRKGWTHRALGPQNDTL

SEQ ID NO: 61888 - protein, 252 aa, Mycobacterium avium
MAGIDLNADLGEGFGVWRLGDDDAMLGIVSSANVACGFHAGDPAGLLRVCRSAAERGVRVGAQVSYRDLAGFGRRFIDVAADELLADVVYQIGALQAIAHAAGSSVCYVKPHGALYNTIVTHPAQAAAVAEAVRLVDPGLPVLGMAGSVFFDEAARRGLRVVAEAFADRAYRPDGRLVSRREPGAVLADPAAIAERVLAMVETGAVTAVDGTRLALSVESVCVHGDSPGAVQIATAVRDRLRAAGVEIRAFC

SEQ ID NO: 61889 - protein, 235 aa, Mycobacterium avium
MVPETGLAPETGSSGAVAAVVPAAGSGERLAAGIPKAFCEIDGASMLARAVAGLLDSKVVDHVVVAVPADRVDEAKRLLAAQATVVAGGADRTASVRLALAAVPGNPAFVLVHDAARALTPPALIARVVQALRDGHRAVVPALPLHDTVKAVDANGVVLGTPERDGLRAVQTPQGFATDLLLRAYAAGAGTAGFTDDASLVEHVGGQVQVVDGDPLAFKITTQLDLLLAETIVRR

SEQ ID NO: 61890 - protein, 468 aa, Mycobacterium avium
MTDRPRLRLHDTAAGAVRDFVPLRDGHVSIYLCGATVQGLPHIGHVRSGVAFDILRRWLIALGYDVAFIRNVTDIDDKILNKAAAAGRPWWEWAATYERAFSAAYDALDVLPPSAEPRATGHITQMVELIERLIEKGHAYTGDGDVYFDVLSYPEYGQLSGHRIDDVHQGEGVASGKRDQRDFTLWKGAKPGEPSWPTPWGRGRPGWHTECVAMAHEYLGPEFDIHCGGMDLVFPHHENEIAQSRAAGDGFARYWLHNGWVTMGGEKMSKSLGNVLAIPAMLQRVRPAELRYYLGSAHYRSMLEFSDTALQDAVKAYVGVEEFLHRVRVRVGAVEPGEPTPRFADALNDDLAVPAALAEVHQARAEGNRALDSGDHEGALRQARSIRAMMGILGCDPLHERWETRDESSAALAAVDVLVRAELQNREKAREQRNWALADEIRNRLKQAGIEVTDTADGPQWTLGGDGK

SEQ ID NO: 61891 - protein, 477 aa, Mycobacterium avium
MTTKVGEHAVVLGASMGGLLAGRSLADFFDRVTVVERDPLPDAHGARRGVPQGRHLHALLCRGAQAIEELFPGVLDQMVRDGAQYFDGQDLSQLYYNIGGHLMTRSGAAPGLTAYSATRPFLEDHVRGRLRGIPNVTLRDEHCVTRLVSTADRRRVVGAWVADGRTGETTAMPADLVVDATGRAAHTPTWLDSLGYDRPREDRVTVQLTYASQALRMTGEAPRELGLLIGIVPGRPRGCGLLHCEHDTWLLTVMGVGGEEPATLDLATLCDFIADCAPAHLLAAVRGAEPVGEPVRHRMPCSRWRRYDKLRRFPDGLLVTGDAICSFNPIYGQGMSVAALEALALRDCLSSGTTDLARRFFRAAAAPIRQAWQLSTNPDLALPEIEGTPPLIARAFNKYVDRVLTAAETDTVALNQFIRVTSLVDPATRLLRPSIMWRAARARGADHPGTAGGSGTPSSASTPRANVGKSVMSPSTP

SEQ ID NO: 61892 - protein, 272 aa, Mycobacterium avium
MSAGGSPLRNGDPAPARGTVPLTPDACPSWLRPLVDNVDDVPDAARRRLPADVLAMITTKAASALTSVRGAAREAAVLVLFSGPESGPPGGGPPTDADLLVTVRASTLRHHAGQAAFPGGAADPTDDGPVATALREAREETGIDVSRLHPLATMEKMFIAPSQFHVVPVLAYSPDPGPVAVVNEAETALVARVPLRAFINPANRLMVYRGDLGRRWAGPAFLLNEMLVWGFTGQVISALLDVAGWAQPWDTSDQRELDAAMALVGERGDALE

SEQ ID NO: 61893 - protein, 548 aa, Mycobacterium avium
MTTPLLSVEGLHVGFGEHAAVRGLDLRVLPGQTVAVVGESGSGKSSTAAAILGLLPPGGRITAGRIMFDGVDISAADRRALRSMRGRQIGYIPQDPMTNLNPVWKVGFQIREALRANTSDRDTRRRAVQLLEAAGMPDPAKQAARYPHQLSGGMCQRALIAIGLAGRPRLLIADEPTSALDVTVQRQVLDHLQRLTADLGTAVLLITHDLALAAERAESVVVVHDGVAVESGAAQSILQDPRHEYTRRLVAAAPALTVSGGARTGPRQPDRTQPEPADILVASDLTKLYREPRATLWRRTEFRAVDAVSFRLHRARTLAIAGESGSGKSTLALMVLGLLPPTSGTVVFDGTRIDDTLSGDQHLAFRRRVQPVFQNPYSSLDPMYSVFRAIEEPLRIHRVGDRRQRAKAVHDLVDQVALPSSVLNRLPRELSGGQRQRVAIARALALRPQVLVCDEAVSALDVLVQAQILELLARLQAELGLAYLFISHDLAVIRQIADDVLVMRAGRVVEQAPTEKLFTAPAQDYTRQLLDAIPRPRRGGDRLSSCDG

SEQ ID NO: 61894 - protein, 291 aa, Mycobacterium avium
MAERIRARGGFWRETWRRLRRRPKFIGAGLLILVILAVALFPALFTAADPTYADPAQSLLPPSRTHWFGTDLQGHDVYARTVYGARASVTVGLGAAAIVFVVGGALGALAGFYGGWIDAVVSRVTDVFFGLPLLLAAIVLMQVLHHRTVWTVIAILALFGWPQVARIARGAVLAVRASDYVLAAKALGMSRFQILIRHALPNALGPVIAVATIALGLFIVTEATLSYLGVGLPPSVVSWGGDINLAQTRLRAGSPILFYPAGALAATVLAFMMMGDALRDALDPASRAWRA

SEQ ID NO: 61895 - protein, 308 aa, Mycobacterium avium
MGWYIARRIAVMVPVFLGATLLIYAMVFLLPGDPVAAIAGDRPLTPAVAAALRARYHLDDPFLVQYLRYLGGVLRGDLGRAYSGLPVSDVLAHAFPVTLRLSLIALAVEAVLGIGFGVIAGLRQGGLFDSAVLITGLVIIAVPIFVLGFLAQFVFGVRLGIAPVTVGNAATFTRLLLPGIVLGSVSFAYVVRLTRSTVAVNAHADYVRTATAKGLSRPRVVTVHILRNSLIPVVTFLGADLGALMGGAIVTEGIFNIHGVGGVLYQAVTRQEAPTVVSIVTVLVLIYLVTNLVVDLLYAVLDPRIRYG

SEQ ID NO: 61896 - protein, 653 aa, Mycobacterium avium
MKPVTASNTANPPSYPPPPQFVEQANAGEQLYREAERDRLAFWAEQANRLSWATPFTEVLDWSRAPFAEWFADGTLNVAYNCVDRHVQAGHGDRVAIHWEGESPGDQRSLTYSELYTQVCKAANALTDLGLVAGDRVAIYLPLIPEAVIAMLACARLGVMHSVVFAGFTAKALQARIADAAAKLLITSDGQFRRGKPAPLKDAADEAVADPDSPVEHVVVVRRTGIDVSWTDGRDLWWHDVVDAAAPEHTPEPFPAEQPLFLLYTSGTTGKPKGIVHTSGGYLTQAAYTHYYVFDIKADTDVFWCTADIGWVTGHTYGVYGPLANGVTEVLYEGTPDTPTQHRHFEIIEKYGVTIYYTAPTLIRTFMKWGREIPDAHDLSSLRLLGSVGEPINPEAWRWYRSVIGADRLPIVDTWWQTETGATMISPLPGVAAAKPGSAMRPLPGISARIVDDHGDQLVPGIHHGEHVTGYLVLDQPWPSMLRGIWGDPDRYVETYWSRFAEQGWYFAGDSAYYDRDGAIWVVGRIDDVMNVSGHRLSTAEVESALVGHHGVAEAAVVGATDATTGQAICAFVVLCADYQVHDGIVDELRAEVAREISPIAKPREVHVVPELPKTRSGKIMRRLLRDIAENRELGDTSTLLDPGVFDAIRAAK

SEQ ID NO: 61897 - protein, 700 aa, Mycobacterium avium
MSIVAEENSAAQALDAPAESPPNPVIETPEPPTESLKTSSSASRRVRARLARRMTAQRSTLNPVLEPLVAMHREIYPKANVQLLQRAFEVADQRHASQLRHSGDPYITHPLAVATILAELGMDSTTLVAALLHDTVEDTGYTLAQLSEEFGEEVGHLVDGVTKLDRVVLGSAAEGETIRKMITAMARDPRVLVIKVADRLHNMRTMRFLPPEKQARKARETLEVIAPLAHRLGMASVKWELEDLSFAILHPKKYDEIVRLVAGRAPSRDTYLAKVRAEIINTLNASKIKATVEGRPKHYWSIYQKMIVKGRDFDDIHDLVGIRILCDEIRDCYAAVGVVHSLWQPMAGRFKDYIAQPRYGVYQSLHTTVVGPEGKPLEVQIRTRDMHRTAEYGIAAHWRYKEAKGRNGVPHPHAAAEIDDMAWMRQLLDWQREAADPGEFLESLRYDLAVQEIFVFTPKGDVITLPTGSTPIDFAYAVHTEVGHRCIGARVNGRLVALERKLENGEVVEVFTSKAANAGPSRDWQQFVVSPRAKAKIRQWFAKERREEALEAGKDAMAREVRRGGLPLQRLVNAESMSAVARELHYADVSALYTAIGEGHVSARHVVQRLLAELGGIDQAEEDLAERSTPTTMLRRPRSSDDVGVSVPGAPGVLTKLAKCCTPVPGDQIMGFVTRGGGVSVHRTDCTNAASLQQQSERII

SEQ ID NO: 61898 - protein, 350 aa, Mycobacterium avium
MTQAPDREKALELAMAQIEKSYGKGSVMRLGDEMRQPISVIPTGSIALDVALGIGGLPRGRVVEIYGPESSGKTTVALHAVANAQAAGGVAAFIDAEHALDPEYAKKLGVDTDSLLVSQPDTGEQALEIADMLIRSGALDILVIDSVAALVPRAELEGEMGDSHVGLQARLMSQALRKMTGALNNSGTTAIFINQLREKIGVMFGSPETTTGGKALKFYASVRMDVRRIETLKDGTNAVGNRTRVKIVKNKVSPPFKQAEFDILYGRGISREGSLIDMGVDQGFIRKSGSWFTYEGEQLGQGKENARTFLMENDEVANEIEKKIKEKLGIGAVVTDDLSDDGVLPAPVDF

SEQ ID NO: 61899 - protein, 194 aa, Mycobacterium avium
MTTGGGRGARRRILDTATELFYRDGINATGVERLAAEASVSKRTLYQHFPSKNAVVEEYLRGIQQAVGDPIHPEADATNRSPRARLLALFDTPAPGDALMRGCPFHNAAVEAGQTMPEVRSIVREHKRTYIDGLAELARRAGASDPQLLGNQLAVLYEGAAALSTSLNDPSPWAHARAAAHTLIDRAVSRDDGD

SEQ ID NO: 61900 - protein, 412 aa, Mycobacterium avium
MTILDGQLTATRVDSAIRLAEKRAAHNYSPLPIVAASAQGAWITDVDGRRYLDCLSAYSAVNFGHRHPEIVATAHAQLDTVTLVSRAVHSDKLGPFCAALAYLCDKDMVLPMNSGAEAVESGLKVARKWGAEVKGVPAGQANIIVADNNFHGRTISIVSFSSDAAARDGFGPFTPGFRSVPFGDAGALAQAIDDNTVAVLLEPIQGEAGIVVPPDDYLPAVRALCSEHNVLMIADEIQSGLARTGYTFACDRWRVVPDVYLLGKALGGGVVPLSAVVADREILGVLHPGEHGSTFGGNPLAAAIGTTVVSMLARGEYQARATALGAHLQRRLRALVGHGVDEVRGLGLWAGVDIDPSLGSGRQMSLRLAERGVLVKDTHGATLRFAPPLVVTAQEIDWAVGQLAAVLREAAS

SEQ ID NO: 61901 - protein, 506 aa, Mycobacterium avium
MAPENAVNTMCAYCGVGCGMVLQITTDPQTGRRHVAKSVGNKEHPANFGRLCTKGATTADLLAAPGRMDSAHARAGRGEPLEPIGTDQAITRCAKQLRAIIDEHGPDAFAMYVSGQMSLEAQYLANKLTKGFIGTNQIESNSRLCMASAGSGYKLSLGADGPPGSYQDFEHADVFFVIGANMADCHPILFLRMMDRVKAGAKLIVVDPRRTATAEKADLFLQIAPGTDLALLNGLLHLIVENGHTDGEFIAEFTEGWEVMPSFLEQYTPDRVSEITGIPEQDIRAAAQLIGEADNFMSCWTMGLNQSTHGTWNTNAICNLHLATGAICKPGSGPFSLTGQPNAMGGREMGYMGPGLPGQRSVASAADREFVEDVWGVPRGRLRTEVGTGTIDMFSRMADGQIKACWIICTNPVASVANRKTVLAGLERAELVIAQDAYLGTETSEYADVLLPAALWAETEGVMVNSERNITLSQPAVAAPGGAMPDWQIIARIACEMGFSEAFIYS

SEQ ID NO: 61902 - protein, 88 aa, Mycobacterium avium
MIFNKRGRGFVSADCQVTGRRPSFGNAVSHSHRRTPRRWSPNIQLKTYYLPSEGRRIRLRVSAKGIKVIDRDGIEAVVARLRRHGQQI

SEQ ID NO: 61903 - protein, 54 aa, Mycobacterium avium
MPRNEIRPLVKLRSTAGTGYTYITRKNRRNDPDRLVLRKYDPVVRRHVDFREER

SEQ ID NO: 61904 - protein, 501 aa, Mycobacterium avium
MSSLARTTRTDVVLVGAGIMSATLGALLRRLQPDWSMTFVERLDAVAAESSSPWNNAGTGHSALCELNYTPQRADGSIDIAKAVRINEQFQVTRQFWAYAVEDGMLTDRGFVTPIPHASFVRGARAVEYLRRRQQALAPNPLFAGIELIEDADEFARRLPLMADRRDFSEPTALNWARHGTDVDFGALSRQLIGFCVRGGATALFGHQVHNLTRESDGSWTLLIRNRRTGEKHRCNAKFVFVGAGGDALPLLQKSGIGEARGFAGFPIGGRFLRADNPVLTAAHRAKVYGAPAPGAPPLGALHLDLRYVNGKPWLVFGPYAGWSPKFLKHGHFTDLPRSVRPHNLVALLGVGVTQLTLLRYLIGQLRLSAPDRMRMLREFAPTAVDSDWELTVAGQRVQVIRRDRRRGGVLDFDTTVVAAGDGSIAGLLGGSPGASTAVPIMLDVLQRCFADRYRSWLPALKEMVPSLGVTLSDEPALYEEVYSWGTKILGLDELDEERPK

SEQ ID NO: 61905 - protein, 578 aa, Mycobacterium avium
MSQLFLRTLRDDPADAEVPSHKLLIRAGYIRPVAPGLYSWLPLGLRVLRRIEHIVREEMNAIGGQEILFPALLPRAPYEATNRWTEYGDSVFRLQDRRGNDYLLGPTHEELFTLTVKGEYSSYKDFPVLLYQIQNKYRDEARPRAGILRVREFVMKDSYSFDIDDAGLKAAYHAHREAYQRIFARLQVRYVIVSAVSGAMGGSASEEFLAESPVGEDTFVRCLESGYAANVEAVITARPDPQPVEGLPEAVVHDTGDTPTIATLVDWANRAGLGRTVTAADTLKNVLLKVRQPGGDWELLAIGLPGDREVDDKRLGAALEPAEYVLLDDADFARYPFLVKGYIGPKALKDNGVRYLVDPRVVDGTSWITGADEPGRHVVGLVAGRDFTADGTIEAAEVRDGDPSPDGAGPLVSARGIEVAHIFQLGRKYTDAFTADVLGEDGKPVRLTMGSYGLGVSRMVAVIAEQHHDELGLRWPASVAPFDVHLVIANKDAQARAGATALADDLDRLGVEVLLDDRQASPGVKFKDAELLGVPWIVVVGRGWADGVVELRDRFAGQTRELATGPSLAADIAAALRG

SEQ ID NO: 61906 - protein, 401 aa, Mycobacterium avium
MTESAYLVGLRLTGKKVVVVGGGTVAQRRLPLLIASGADVHVISRSATRSVEAMTGITLQLREYRDGDLDGAWYAIAATDDPRVNEAVVAEAERRRIFCVRADVAVAGTAVTPASFSYAGLSVGVLAGGEHRRSAAIRSAIREALQTGVITPEGPVGSDAVKGGVALIGGGPGDPELITVRGRRLLAQADVVVADRLAPPELLAELPPHVEVIDAAKIPYGRAMAQDAINDVMIERARAGSFVVRLKGGDPFVFARGYEEVLACADAGIPVTVVPGVTSAIGVPALAGVPVTHRAVNHEFVVVSGHLPPGHPESLVNWDALAALTGTIVLLMAVERIELFAEALLKGGRPADTPVLVVQHGTTAAQHTLRATLADTPEKIRAEGIRPPAIIVIGAVAAFGV

SEQ ID NO: 61907 - protein, 322 aa, Mycobacterium avium
MIGLPGAKQLHCLLVWCPSVSLSLWANAWLAGKAAPDDVLDALSVWAPKQSVTAYDAVAAGHTGLPWPDVHDAGTVTLLQTLRAAIGVPVGSGLMRGTINVVLPVPGDVRGLAPGTQFEQDALAAGEAVIVSNPHQPGAAVGLVPEFCYADDDDGSQDYALTELCALSWTVYSLPGAPVLDHHELGDAEYTLRSAVRSAAETLGAIGLGSAASDVDDPRGLVEQLLESARQHRIPDHAPSRALRVLENAAHVDAIIAVSAGLSRSDSPDRFAAPIAAGLEPLGTQSSSEARIAGDALRPLTAVVRSARMAAVTAILHSAWGD

SEQ ID NO: 61908 - protein, 301 aa, Mycobacterium avium
MPPPYGPGHAGFGLVSAAVLASLVLLGWAAVWIARRADPLQRLWQRATHNAVVDEALAWLRDRIGDRGRALARRFPVSEIAGVALLLGLAAVALLAVGFTEVLDDVLEGDGIAVIDHPVTRWLAAHRDLWLTTVLQAITVAGGPLFLAALALPISVVAAWRYRSWRPVLLAVVAGAGVPVMLFTAKALVGRHRPPLPFALVDADGYSFPSGHATGTAAMMAISAWLLTRWLIPGWTGRVLVWALAIGAVLLIGFSRIYLGVHYLSDVLSGWMLGTAWAFAVMLVGTWWDNTRPARERQRQA

SEQ ID NO: 61909 - protein, 639 aa, Mycobacterium avium
MGAKPFKPSIDWSAAFVDSLRWLAIAWVISAVCLFGVLLAFRFLTPWGRQFWRITRGYFVGAHSVRVWLMLGVLLLSVLLSVRLSVLLSFQSNDLYTALQKAFEGIASGNDAVKHSGIHGFWVSLGIFCLLAALWVTRFMADVYLTQRFIIAWRMWLTANLTDDWLAGRAYYRDLFIDNTIDNPDQRIQQDIDIFTANAGGTPNVPSNGTGSTLLFGAVNAVASVISFTAILWKLSGDLNLFGLVLPRAMFWTVLVYVFIATVVAVWLGRPLIWLSFNNEKLNAAFRYALVRLRDAAEAVGFYRGERVERAQLWQRFTPIIANYRRYVRRTIIFNGWNWSVTQIIVPLPLAIQAPRLFAGEIAFGDVTQTATAFNNIHDSLSFFRNNYDAFAAFRAAIIRLHGLVDANSKGRALPAILVKPSEETAVELRGIEVRTPEGDQLVDSLDIQLDEGDTLVITGRSGAGKTTLLRSLAELWPYASGTLCRPDGDNATMFLSQLPYVPLGTLRTVVCYPNSPDSIADSQLHEVLTKVALAPLISRLDEDQDWAKVLSPGEQQRVAFARVLLTRPKAVFLDEATSALDEGLEYALYQLVRAELPGCVMVSVSHRPTVEQHHDQQLHLLGGGPWQLSPVEKEPARV

SEQ ID NO: 61910 - protein, 185 aa, Mycobacterium avium
MTTILAIETSCDETGVGIARLDADGAVTLLADEVASSVDEHVRFGGVVPEIASRAHLEALGPTMRRALSAAGVTKPDVVAATIGPGLAGALLVGVAAAKAYSAAWGVPFYAVNHLGGHLAADVYQHGPLPECVALLVSGGHTHLLQVRSLGDPIVELGSTVDDAAGEAYDKVARLLGLGYPGGRV

SEQ ID NO: 61911 - protein, 113 aa, Mycobacterium avium
MNRLDFVDQASLRDDIPVFGPGDTVNVHVKVIEGAKERIQVFKGVVIRRQGGGVRETFTVRKESYGVGVERTFPVHSPNIDHIQVVTRGDVRRAKLYYLRELRGKKAKIKEKR

SEQ ID NO: 61912 - protein, 299 aa, Mycobacterium avium
MTDTADSSNPQSHAGDADPKVSTRNPDTRPDDDAGAPAPVPEPGTKPDAAAPTEGSKRSTLREFAILAVIAVLLYYVMLTFVARPYLIPSESMEPTLHGCTGCVGDRIMVDKVSYRFGAPRPGDVIVFKGPPSWNLGYKSIRSNNTALRWAQNALSFVGFVPPDENDLVKRVIAVGGQTVQCRAETGLTVNGKPLREPYLDRNTMAADPSVYPCLGSEFGPVTVPAGRLWVMGDNRTHSADSRAHCTSVPAEALKGVLCTGDPASGTVPVSNVIGKARFIVWPPSRWGGVGSVNPQQGQ

SEQ ID NO: 61913 - protein, 239 aa, Mycobacterium avium
MATTWPPRTVIRKSSGLRTLESALYRSGLGPVAGVDEVGRGACAGPLVVAACVLGPGKLESLAALDDSKKLTESVRERLFPVIRRYALAYHVVFIPPAEVDRRGVHVANIEGMRRAVAGLSLRPGYVLSDGFRVPGLAVPSLPVIGGDAVAACIAAASVLAKVSRDRLMVAMDAEHPGYGFADHKGYSTPAHSAALARLGPCPQHRHSFINVRRVANGSGGRVVADCKPDLPLQRDEGR

SEQ ID NO: 61914 - protein, 226 aa, Mycobacterium avium
MVNLCTMLNQMGAQVEGAGSPTMTITGVPRLYPTEHRVIGDRIVAATWGIAAAMTRGDISVTGVDPAHLQVVLHKLHDAGATVTQTDDSFRVTQYERPKAVNVATLPFPGFPTDLQPMAIALASIADGTSMITENVFEARFRFVEEMIRLGADARTDGHHAVVRGLPQLSSAPVWCSDIRAGAGLVLAGLVADGDTEVHDVFHIDRGYPLFVENLAILGAEIERVE

SEQ ID NO: 61915 - protein, 165 aa, Mycobacterium avium
MIEYRTVDSPIGLLTLAGRDPVLTNLRMVDQTYEPSRTGWTENPRAFAGAVEQLGAYFAGELTEFDIELDLRGSEFQRRVWRALQTIPYGETRSYGEIAEQIGAPGAARAVGLANGHNPIAIVVPCHRVIGASGKLTGYGGGLDRKQTLLALERRHSPASLTLFD

SEQ ID NO: 61916 - protein, 415 aa, Mycobacterium avium
MVVMPNGPVAHQAGTRGYRRMTAALCGAGLASFAAMYCTQALLPALSAHHRIGPATAALTVSLTTGALALSIIPASVLSERYGRTRVMLISGVASSVIGLLLPFSPSLGVLVFGRAVQGVALAGIPAVAMALLAEEVDASSLGSAMGRYIAGTTIGGLAGRIVPSVVVQVGTWRVALLACSLITLAGTAVFAVLVPRSRFFTPKPASVRAALRNLAGHLRNPVLAKLFAVGFVLMGGFVTVYNYLGYRLAARPFGLAPSVVGLLFLLYLVGTGTSVVAGRLADRRGRPLVLGAALPIAVAGLLLTVPPSLAAIVAGVGVFTGGFFAAHTVASGWVGAVAQRDRAEASALYLFSYYLGGSVAGAFGGVLYGVGGWSATVCFVVVLLMAGAALVALLVRDNGFRIGRRVVAGVASVK

SEQ ID NO: 61917 - protein, 503 aa, Mycobacterium avium
MSQRELHDVVVVGAGTAGSVVAARLTEDSTLRVLLLETGSARPPRASITPPAWPTLLQGEASWGDVTTVQTAIGRAVPFARGRGIGGSSTINAMVFARGHRDSYSRWRDNGAAGWSFDELLPYFKRSESTCGKDPSLRGQDGPMAVAPAAHPNPVLVACLCAAIQQGYPRAADISGGLEVGFGFTDLNIVDGKRQSAADAYLLPALDRPNLEFHSGATVHRLRIRGSRCTGVEYTTAEGRQVTAAAREIILCAGAIGSPHLLLASGIGPPNHLRSFRVDVALELPGVGANLQDHPIVPLVYRAARPVPAGRYNHGELLGLIRRHATGGPPEIQIFGVDSADVPGLGGADGYVLGVSVMQPVSRGRVGLSGPTIQEPPAIDPNYLSDDRDMGLMIEGLRIGRKIGMSQALDPWRAEELAPGDDAVDDAALRSYIQRSVASYFHPVGTCAMGTGPESVVDNQLRLHGIDNLRVIDASVMPSLPSNNTAATVYAIAERGADLVRLG

SEQ ID NO: 61918 - protein, 1042 aa, Mycobacterium avium
FVEYVWGVPRGRLRTEVGTGTIDMFSRMADGQIKACWIICTNPVASVANRKTVLAGLERAELVIAQDAYLGTETSEYADVLLPAALWAETEGVMVNSERNITLSQPAVAAPGGAMPDWQIIARIACEMGFSEAFSYSCAEEVFEEIKRFWNPTTGYDLRGVSYERLRRQPLQWPCPPQSTADRNPIRYLNDGVSQTQLVREDGTVPRLAFPTPSGRAVFFARPHLQPEEMPDDDYPFLLNTGRLPHQWHTMTKTGKVAKLNKLNPGPFVEIHPDDAARLGIGEHDRVEIASRRGRAVLPAVVSDRVRPGNCFAPFHWNDAFGEYLSINAVTNDAVDPISNQPEFKACAVTLTKVAVSHPDSAIGTGPSAGHDTPESAPTEVREISVSQVDALGELLGVATSFKPEFNELGRSYLAGMLTGLRSDVGRRAGGVPTLPPSAPFDSRTRLWVDGLLAGLFSRADASQQAALPEPPQPAAQQPPAAPAGATPAPERAPVVVLWASQTGNAEELAADVAAQLAAAELPVALHSMDDFPAAELAATRELLLITSTTGDGDAPDNGSGLWRALTGDAAPRLGNTRYAVLALGDSNYDDFCGHGRKLDARLAELGATRIAERVDCEPDYEQAAAKWVADVIEALTRTPTAVGGDGGATVSARTSPVAAPSRPNTPAPHTYSKKHPLITDMVRNTTLNGPKSTKDVRHLVFNLPEDAVSYEAGDALGVWPRNSDELVDEWLAVTGLDGQTPVEVGEHGLMSLRSALTERIEIAHISRDLVRFVQERTGDAKLAELLKPENKRALADWTWGRQSIDLLAQLPVSASAHEWLRVLKRLQPRLYSISSSPKACPGEVHLTVSPVRYNFQGVPRRGVCSTYLAARSPGDRVAVYLQPSSNFRPPSDPDTPMIMIGPGTGIAPFRGFLQERRALGHRGPNWLFFGEQHAATDFYYRDELEQMREDGFLTELDLAFSRDQQHKVYVQHLMRNRGKQLWSWLQDGAQLYVCGTADPMAKDVDRALCDIAAEFGNLDPDAAKAYVQSLSADKRYHRDVY

SEQ ID NO: 61919 - protein, 201 aa, Mycobacterium avium
MPLYVHAPYLINVASANNRVRIPSRKILQDTCDAAAEINATAVIVHGGHADDNDMEAGFERWVKALDYLETDVQVYLENTAGGDHAMARHFDTIGRLWDRIGDKGIGFCLDTCHAWAAGEALIDAVDRIKALTGRIDLVHCNDSRDAAGSGADRHANFGTGQIDPDLLVTVVKAAAAPVICETADEGRKDDIAFLREHTKS

SEQ ID NO: 61920 - protein, 1316 aa, Mycobacterium avium
MLDVNFFDELRIGLATAEDIRQWSYGEVKKPETINYRTLKPEKDGLFCEKIFGPTRDWECYCGKYKRVRFKGIICERCGVEVTRAKVRRERMGHIELAAPVTHIWYFKGVPSRLGYLLDLAPKDLEKIIYFAAYVITSVDEEMRHNELSTLEAEMMVERKAVEDQRDADLEARAQKLEADLAELEAEGAKADARRKVRDSGEREMRQIRDRAQRELDRLEDIWNTFTKLAPKQLIVDENLYRELVDRYGEYFTGAMGAESIQKLIENFDIDAEAEQLRDVIRNGKGQKKLRALKRLKVVAAFQQSGNSPMGMVLDAVPVIPPELRPMVQLDGGRFATSDLNDLYRRVINRNNRLKRLIDLGAPEIIVNNEKRMLQESVDALFDNGRRGRPVTGPGNRPLKSLSDLLKGKQGRFRQNLLGKRVDYSGRSVIVVGPQLKLHQCGLPKLMALELFKPFVMKRLVDLNHAQNIKSAKRMVERQRPQVWDVLEEVIAEHPVLLNRAPTLHRLGIQAFEPMLVEGKAIQLHPLVCEAFNADFDGDQMAVHLPLSAEAQAEARILMLSSNNILSPASGRPLAMPRLDMVTGLYYLTTEVEGDKGEYRPAAKDTPEVGVYSSPAEAIMAADRGVLSVRAKIKVRLTQLRPPAEIEAELFGANGWQPGDAWMAETTLGRVLFNELLPVGYPFVNKQMHKKVQASIINDLAERYPMIVVAQTVDKLKDAGFYWATRSGVTVSMADVLVPPRKKEILDQYEERAEKVEKQFQRGALNHDERNEALVEIWKEATDEVGQALREHYPADNPIITIVDSGATGNFTQTRTLAGMKGLVTNPKGEFIPRPVKSSFREGLTVLEYFINTHGARKGLADTALRTADSGYLTRRLVDVSQDVIVREHDCETERGIVVELAERQPDGTLIRDPYIETSAYARTLGTDAVDEAGNVIVARGEDLGDPEIDALLAAGITSVKVRSVLTCTTGTGVCATCYGRSMATGKLVDIGEAVGIVAAQSIGEPGTQLTMRTFHQGGVGEDITGGLPRVQELFEARIPRGKAPIADVTGRVRLEDGERFYKITIVPDDGSEEVVYDKLSKRQRLRVFKHEDGSERVLSDGDHVEVGQQLMEGSADPHEVLRVQGPREVQIHLVREVQEVYRAQGVSIHDKHIEVIVRQMLRRVTIIDSGSTEFLPGSLIDRAEFEAENRRVVAEGGEPAAGRPVLMGITKASLATDSWLSAASFQETTRVLTDAAINCRSDKLNGLKENVIIGKLIPAGTGINRYRNIQVQPTEEARAAAYTIPSYEDQYYSPDFGQATGAAVPLDDYGYSDYR

SEQ ID NO: 61921 - protein, 1148 aa, Mycobacterium avium
MNGSVPGAPNRVSFAKLREPLEVPGLLDVQIDSFEWLIGAPRWREAAIARGDAEPKGGLEEVLDELSPIEDFSGSMSLSFSDPRFDEVKAPVDECKDKDMTYAAPLFVTAEFINNNTGEIKSQTVFMGDFPMMTEKGTFIINGTERVVVSQLVRSPGVYFDETIDKSTEKTLHSVKVIPSRGAWLEFDVDKRDTVGVRIDRKRRQPVTVLLKALGWTNEQITERFGFSEIMMSTLEKDNTAGTDEALLDIYRKLRPGEPPTKESAQTLLENLFFKEKRYDLARVGRYKVNKKLGLHAGEPITSSTLTEEDVVATIEYLVRLHEGQPTMTVPGGIEVPVETDDIDHFGNRRLRTVGELIQNQIRVGMSRMERVVRERMTTQDVEAITPQTLINIRPVVAAIKEFFGTSQLSQFMDQNNPLSGLTHKRRLSALGPGGLSRERAGLEVRDVHPSHYGRMCPIETPEGPNIGLIGSLSVYARVNPFGFIETPYRKVVDGVVTDEIHYLTADEEDRHVVAQANSPIDDKGRFAEARVLVRRKAGEVEYVPSSEVDYMDVSPRQMVSVATAMIPFLEHDDANRALMGANMQRQAVPLVRSEAPLVGTGMELRAAIDAGDVVVAEKSGVIEEVSADYITVMADDGTRHTYRMRKFERSNHGTCANQSPIVDAGDRVEAGQVIADGPCTENGEMALGKNLLVAIMPWEGHNYEDAIILSNRLVEEDVLTSIHIEEHEIDARDTKLGAEEITRDIPNVSDEVLADLDERGIVRIGAEVRDGDILVGKVTPKGETELTPEERLLRAIFGEKAREVRDTSLKVPHGESGKVIGIRVFSREDDDELPAGVNELVRVYVAQKRKISDGDKLAGRHGNKGVIGKILPQEDMPFLPDGTPVDIILNTHGVPRRMNIGQILETHLGWVAKSGWNIDGNPEWAVNLPEELRHAQPNQIVSTPVFDGAKEEELAGMLSCTLPNRDGEVMVDGDGKAVLFDGRSGEPFPYPVTVGYMYIMKLHHLVDDKIHARSTGPYSMITQQPLGGKAQFGGQRFGEMECWAMQAYGAAYTLQELLTIKSDDTVGRVKVYEAIVKGENIPEPGIPESFKVLLKELQSLCLNVEVLSSDGAAIELREGEDEDLERAAANLGINLSRNESASVEDLA

SEQ ID NO: 61922 - protein, 130 aa, Mycobacterium avium
MAKMSTDDLLDAFKEMTLLELSDFVKKFEETFEVTAAAPVAVAAAGPAAGGAPAEAAEEQSEFDVILESAGDKKIGVIKVVREIVSGLGLKEAKDLVDGAPKPLLEKVAKEAADDAKAKLEAAGATVTVK

SEQ ID NO: 61923 - protein, 196 aa, Mycobacterium avium
MARADKATAVADIAEQFKEATATLITEYRGLTVANLAELRRSLSGAATYSVAKNTLVKRAASEAGIEGLDELFAGPTAIAFVTGEPVDAAKAIKTFAKEHKALVIKGGYMDGRALSVAEVERIADLESREVLLAKLAGAMKGNLAKAAGLFNAPASQVARLAAALQEKKAAECPAEAPQPAAETPAEAPEAPADAE

SEQ ID NO: 61924 - protein, 396 aa, Mycobacterium avium
MAKAKFERTKPHVNIGTIGHVDHGKTTLTAAITKVLHDKYPDLNESRAFDQIDNAPEERQRGITINISHVEYQTDKRHYAHVDAPGHADYIKNMITGAAQMDGAILVVAATDGPMPQTREHVLLARQVGVPYILVALNKADMVDDEELLELVEMEVRELLAAQEFDEDAPVVRVSALKALEGDAKWVESVEQLMEAVDESIPDPVRETDKPFLMPVEDVFTITGRGTVVTGRVERGVINVNEEVEIVGIRPSSTKTTVTGVEMFRKLLDQGQAGDNVGLLLRGIKREDVERGQVVTKPGTTTPHTEFEGQVYILSKDEGGRHTPFFNNYRPQFYFRTTDVTGVVTLPEGTEMVMPGDNTNISVKLIQPVAMDEGLRFAIREGGRTVGAGRVVKIIK

SEQ ID NO: 61925 - protein, 701 aa, Mycobacterium avium
MAQKDVLTDLTKVRNIGIMAHIDAGKTTTTERILYYTGISYKIGEVHDGAATMDWMEQEQERGITITSAATTCFWNDNQINIIDTPGHVDFTVEVERSLRVLDGAVAVFDGKEGVEPQSEQVWRQADKYDVPRICFVNKMDKIGADFYFSVRTMEERLGANVIPIQIPVGSEGDFEGVVDLVEMKAKVWSAEAKLGEKYDVVDIPADLQEKAEEYRTKLLEAVAETDEALLDKYLGGEELTIEEIKGAIRKLTISSEAYPVLCGSAFKNKGVQPMLDAVIDYLPSPLDVPPAEGHVPGKEEELITRKPSTDEPFSALAFKVATHPFFGKLTYVRVYSGKVDSGSQVINSTKGKKERLGKLFQMHSNKENPVETASAGHIYAVIGLKDTTTGDTLSDPNHQIVLESMTFPDPVIEVAIEPKTKSDQEKLSLSIQKLAEEDPTFKVHLDQETGQTVIGGMGELHLDILVDRMRREFKVEANVGKPQVAYKETIRRKVENVEYTHKKQTGGSGQFAKVIINLEPFTGEDGATYEFENKVTGGRIPREYIPSVDAGAQDAMQYGVLAGYPLVNLKVTLLDGAFHEVDSSEMAFKIAGSQVLKKAAAQAQPVILEPIMAVEVTTPEDYMGDVIGDLNSRRGQIQAMEERSGARVVKAHVPLSEMFGYVGDLRSKTQGRANYSMVFDSYAEVPANVSKEIIAKATGQ

SEQ ID NO: 61926 - protein, 156 aa, Mycobacterium avium
MPRKGPAPKRPLVNDPVYGSQLVTQLVNKVLLKGKKSLAERIVYGALENAREKTGTDPVITLKRALDNVKPALEVRSRRVGGATYQVPVEVRPDRSTTLALRWLVSFSRQRREKTMVERLANEILDASNGLGASVKRREDTHKMAEANRAFAHYRW

SEQ ID NO: 61927 - protein, 124 aa, Mycobacterium avium
MPTIQQLVRKGRRDKIGKVKTAALKGSPQRRGVCTRVYTTTPKKPNSALRKVARVKLTSQVEVTAYIPGEGHNLQEHSMVLVRGGRVKDLPGVRYKIIRGSLDTQGVKNRKQARSRYGAKKEKS

SEQ ID NO: 61928 - protein, 643 aa, Mycobacterium avium
MCGLLAFVAARAGAVGADDAIARASHLMRHRGPDEPGTWAGADGSVVFGFNRLSIIDIAHSHQPLRWGPPETPDRYELVFNGEIYNYLELRDELAAHHGAVFATDGDGEAIVAGFHHWGTDVLTRLRGMFAFALWDTVTRELFCARDPFGIKPLFVATGTGGTAVASEKKCLLELAELIGFDTAIDERAVQHYTVLQYVPEPETLHRGVRRLESGCYARIRPGAAPDITRYFVPRFAAVPITRDTEQARYDEITAVLEDSVAKHMRADVTVGAFLSGGIDSTAIAALAIRHNPRLITFTTGFEREGFSEIDVAVASAEAIGARHIAKVVHPDEFVAALPEIVWYLDEPVADPALVPLFFVAREARKHVKVVLSGEGADELFGGYTIYREPLSLKPFDYLPRPVRRSMGKVSKPLPYGMRGKSLLHRGSLTLEERYYGNARSFSDAQLRDVLPGFRAEWTHTDVTAALYAQSIGWDPVARMQHIDLFTWLRGDILVKADKMTMANSLELRVPFLDPEVFAVASRLPVEAKITRTTTKYALRRALEPIVPAHVLHRPKLGFPVPIRHWLRAGELLEWAYSMVASSQAGHLVDLGAVRRMLDEHRNGVSDHSRRLWTVLIFMLWHAIFVEHSVVPQIGEPVYPVQL

SEQ ID NO: 61929 - protein, 336 aa, Mycobacterium avium
MLRPLALAVTLGVLAIVLSGCSSWADALALGWPKGITPQAHLNRELWIGAVIASLVVGAIVYGLIFWASAFHRKKATDTELPRQFGYNMPLELVLTVTPFLIISVLFYFTVVVQEKMLHIAKDPEVVVDVTAFQWNWKFGYQKVNFKDGTLTYDGADPERKKAMVSKPEGKDAHGEERVGAVRGLNTSDRTYLNFDKVETLGSSDEIPVLVLPTGKRIEFDLASADVVHTFWVPEFLFKRDVIPNAEANNSIHVFQVEEINSPGAFVGHCAEFCGTYHSMMNFEVRVVSPNDFKAYLQQRMDGKSNAEALQAIGQSPVAVTTHPFDSKRGQLAGSQ

SEQ ID NO: 61930 - protein, 440 aa, Mycobacterium avium
MRFPDAAEVAARTPADRDRVLDVIRIVSLGGVVLGHTVMAASIIRDHVLIWDNLLTTSALFQAMTWLLQIMPLFFFAGAAACVSSWTPGTDWGGWLMRRCTRLFRPVFYYLAFWAVTLTVLYQALPQHIYEPIAGVSTQLLWFLGAYVLVLAAMPVLYRITTTGRLAAGVAAVYGAIALIDVIRLHWPALMPLGYLNLAVWLIPAMFGAAYRRGLLGGRAALAVAAAFFAADVALVRWGPYQLSMVGTGDHHLSNTSPPSLLLAGHAIILSALAIAAAPAIARWAQRPRVWWWTAIGNSGAMTLYLWHMPVLLGVHLAFDYLGCPRFPGAPDFLAISVAQVLLVVVAVAVLFVALRPLENNPLSGWDGAPAVMSRGWGAAVGALLCVAGVALLAAIRWGLKDDGLVCMAVVVAALVAARIVAQHAGPAGHGSSSRPCSMA

SEQ ID NO: 61931 - protein, 831 aa, Mycobacterium avium
MNHCRNGSLPQRYWPAPGRRGGRRSSAVGTKVVEPVTPRPAGSRECGILDWSADRKARHGQGVPGRRPRSRPPRTVRSALLGSRSADRRRGRHGGRGQGADTGGAARRGRARRAAARRQRHRVVPRPALRASRPALPDADVVHLRRGDAGGHPGRRQRVRHQGHQGHGAGPGDQRRGRREIAAGQPGRRSVDGQAARQRRAGGPAVGPDRTGTNAARAAQRGPDQPADRRANVPRGEDGQELRVPAAGQTRHGAPDPGGGVRVETQPAGRPSADPTGLAGVTGNRFDELAAARDQTEKLLRVIAEIGAGLDLDATLHRIISAARELTSAPYGALAVRDWHANLISFVHEGMDAETVRRIGHHPVGKGLLSLSLLDTPALRMDDLTAHPAAAGFPEHHPAMRAFLAVPITIRGAVFGNLYLTHVDEARVFSDADEMAARALAFAAAVAIDNAQVFERERMSVKWIEASREITTALLSRTEPHRRPMQLIAERACALTDAEQAIVLVPADPEQPGNPEVDTLVVSAAVGLPAADVLGQRVPVRGSTSGAVFKSGEPLITDEFRYPIQAFTDAGRRPAIVMPLRARDEVVGVIAIARGTEQPPFDESYLDLVRDFATHAAIALVLAAAREDARQLAVLAERERIAHDLHDHVIQRLFAAGMDLQGTLARARSPEVADRLNRTLDDLQTIIEEIRTTIFALRSPAAVAGDFRHRIQRVIAELTENRDLVTTVRMDGPMTAVGAELAEHAEAVTAEAVSNAVRHSGASRLTVQIGVADMFTLDVIDNGRGIAAGNTRRSGLANMTRRAEQLGGSCEISSPPGGGTRVHWTAPLLDH

SEQ ID NO: 61932 - protein, 471 aa, Mycobacterium avium
MSSPQEYDMVVIGSGPGGQKAAIASAKLGKSVAVVERGQMLGGVCVNTGTIPSKTLREAVLYLTGMSQRELYGASYRVKEKITPADLLARTQHVIGKEIDVVRNQLMRNRIDLLIGHGRFVDPHTIEVEDPSRREKITISGKYVVIATGTRPARPSGVEFDEDRVLDSDGILDLKSLPTSMVVVGAGVIGIEYASMFAALGTKVTVVEKRDDMLDFCDPEVVEALKFHLRDLAVTFRFGEEVTAVDVGSAGTVTTLASGKQIPAETVMYSAGRQGQTDHLDLHNAELEADNRGRIFVDDNFQTKVPHIYAVGDVIGFPALAATSMEQGRLAAYHAFGEASDGITELQPIGIYSIPEVSYVGATEVELTKDAIPYEVGVARYRELARGQIAGDSYGMLKLLVSTQDLKVLGVHIFGTSATEMVHIGQAVMGCGGTVEYLVDAVFNYPTFSEAYKVAALDVMNKVRALNQFRR

SEQ ID NO: 61933 - protein, 509 aa, Mycobacterium avium
MAATKASPATDGPVKRTATKSPSSPAKRPAAKAANGSAPAKRATKTASRSAKSEAGAAAEPAKKTRSSAKGADAKAPSGRGTKAAKGGPADPDALDTDGAVEDLDTEPDLEGEPGEDLDIDTDLNLDDLEEDVAADDADIEPGDAEEGEDEEAAAPKAAGATAADEDDEIAEPSEKDKASGDFVWDEDESEALRQARKDAELTASADSVRAYLKQIGKVALLNAEEEVELAKRIEAGLYATQLMSEMAERGEKLPAAQRRDMMWICRDGDRAKNHLLEANLRLVVSLAKRYTGRGMAFLDLIQEGNLGLIRAVEKFDYTKGYKFSTYATWWIRQAITRAMADQARTIRIPVHMVEVINKLGRIQRELLQDLGREPTPEELAKEMDITPEKVLEIQQYAREPISLDQTIGDEGDSQLGDFIEDSEAVVAVDAVSFTLLQDQLQSVLETLSEREAGVVRLRFGLTDGQPRTLDEIGQVYGVTRERIRQIESKTMSKLRHPSRSQVLRDYLD

SEQ ID NO: 61934 - protein, 409 aa, Mycobacterium avium
MTVFSALLLAGVLSVLALAAGVAVGTRLSPRAAQRRQRISTEWTGITVAQMLERIVALMPLGAAVVDAHRDVVYLNDRAKELGLVRDRQLDDQAWEAAQQALTGVDVEFDLRPAKRSGGRSGLSVHGQARLLSEEDRRFAVVFAHDQSDYARMEATRRDFVANVSHELKTPVGAMALLAEALLASADDSETVRRFAEKVLVEANRLGDMVAELIELSRLQGAERLTNVTEVDVDSVVNEAISRHKVAADNANIEVRTDAPSGLRVLGDETLLVTALANLVSNAIAYSPPGSPVSISRRRRGDNIEIAVTDRGIGIALEDQERVFERFFRGDKARSRATGGSGLGLAIVKHVAANHNGTIGVWSKPGTGSTFTLSIPAAVASHRGDGESEQPQGREVRPNRSQREEELSR

SEQ ID NO: 61935 - protein, 227 aa, Mycobacterium avium
MTSVLIVEDEESLADPLAFLLRKEGFEATVVTDGSAALAEFDRAGADIVLLDLMLPGMSGTDVCKQLRARSSVPVIMVTARDSEIDKVVGLELGADDYVTKPYSARELIARIRAVLRRGGDDDSEISDGVLESGPVRMDVERHVVSVNGDTITLPLKEFDLLEYLMRNSGRVLTRGQLIDRVWGADYVGDTKTLDVHVKRLRSKIEADPANPVHLVTVRGLGYKLEG

SEQ ID NO: 61936 - protein, 506 aa, Mycobacterium avium
MTVSPTSAPTQAIDTVERAATTPDEPQPFGELGLKDDEYQRIREILGRRPTDTELAMYSVMWSEHCSYKSSKVHLRYFGETTTDEMRAGMLAGIGENAGVVDIGDGWAVTFKVESHNHPSYVEPYQGAATGVGGIVRDIMAMGARPVAVMDQLRFGAADAPDTRRVLDGVVRGIGGYGNSLGLPNIGGETVFDACYAGNPLVNAMCVGVLRQEDLHLAFASGAGNKIILFGARTGLDGIGGVSVLASDTFDAENSRKKLPSVQVGDPFMEKVLIECCLELYAGGLVIGIQDLGGAGLACATSELASAGDGGMEVRLEAVPLRTAGMTPAEVLCSESQERMCAVVTPENVDAFLAVCRKWDVLATVIGEVTDGDRLRITWHGQTVVDVPPRTVAHEGPVYQRPLARPDTQDALNADSSARLPRPATGAELRATLLALLGSPHLCSRAFITEQYDRYVRGNTVLAEHADGGVLRVDETTGRGISVSTDASGRYTMLDPYAGAQLALAE

SEQ ID NO: 61937 - protein, 515 aa, Mycobacterium avium
  MISC_FEATURE (21)..(21): X=any amino acid
  MISC_FEATURE (22)..(22): X=any amino acid
  MISC_FEATURE (27)..(27): X=any amino acid
  MISC_FEATURE (29)..(29): X=any amino acid
MLRSHAAGSLRSSDAGQQVTXXGWVAXRXDHGGVIFIDLRDASGITQVVFRDPDVLKQAHRLRAEFCVAVAGLVEIRPEGNANPEIATGDIEVNASSLTVLGESAPLPFQLDEPAGEELRLKYRYLDLRRDAPAAAIRLRSKVNAAAREVLDRHDFVEIETPTITRSTPEGARDFLVPARLHPGSFYALPQSPQLFKQLLMVAGMERYYQIARCYRDEDFRADRQPEFTQLDMEMSFVDAEDVIAISEEILAALWALIGYEIPRPIPRISYADAMARYGSDKPDLRFGLELVECSEFFKDTTFRVFQAPYVGAVVMPGGASQPRRTLDGWQEWAKQRGAKGLAYVLVGEDGELGGPVAKNLSEAERAGLAGHVGAAPGDCIFFAAGPAKPSRALLGAARSEIAHRLGLIDPQAWAFVWVVDPPLFEPADDATAAGDVAVGSGAWTAVHHAFTAPKPGYEDAIETDTGNVLADAYDIVCNGNEIGGGSIRIHRRDIQERVFAVMGLDNAEAREKFG

SEQ ID NO: 61938 - protein, 420 aa, Mycobacterium avium
MPEFSAPKGVPDYVPPDSAQFVAVRSGLLDAARGAGYGDIELPIFEDTALFARGVGESTDVVSKEMYTFADRGDRSVTLRPEGTAGVVRAVIEHGLDRGTLPVKLCYAGPFFRYERPQAGRYRQLQQVGVEAIGVDDPALDAEVIAVADAGFRSLGLDGFRLEITSLGDDSCRPQYRELLQDFLFGLDLDEETRRRARLNPLRVLDDKRPEVRAMTADAPVLLDHLSDAAKQHFDTVLAHLDALGVPYVINPRMVRGLDYYTKTTFEFVHDGLGAQSGIGGGGRYDGLMRQLGGQDLSGIGFGLGVDRTLLALRAEGKSVGSAARCDVFGVPLSDQAKLRLAVLAAGLRAAGVRVDMAYGARGLKGAMRAADRSGARIALVLGDRDIDAGTVGVKDLQTGSQVSVELDSVVAEVLSQLSR

SEQ ID NO: 61939 - protein, 291 aa, Mycobacterium avium
MTEPKIHGIIAYPVTPFADNGIDTQRLAALVERLVSAGVHAIAPLGSTGELAYLEEPEVDAVIDTTLSAVAGRVPVIVGVSDVTTAKTIRRAQYAQRAGADAVMILPVSYWKLTEREIFHHYRSISDAISIPIMAYNNPATSGVDMPPELLVRMFESIDNVAMVKESTGDLTRMRRIAELSGNRLPFYNGSNPLVLDALKAGASGWCTAAPCLRPQPCIDLYDAVRANDLDTAQRLYDDLKPLLTFIVAGGLATTVKAGLELLDFKVGDPRAPLLPLDEQGRAELRKLLAA

SEQ ID NO: 61940 - protein, 402 aa, Mycobacterium avium
MVTAVTATTSIAPDVESTWKGLLAGESGIHVLEDDYITKWDLPVRIGGHLKEPIDERMSRLDLRRMSYVQRLAKLLSTQLWETAGNPELDPDRFSVVVGTGLGGAERIVESYDLMNEGGPRKVSPLAVQMIMPNGAAAVVGLQLGARAGVITPVSACSSGSEAIAHAWRQIVMGDADVAVCGGVEGPIEALPIAAFSMMRAMSTRNDEPERASRPFDKDRDGFVFGEAGALMLIETEEHAKARGAKPLARLMGAGITSDAFHMVAPAADGVRAGRAMTRSLELAGLSPKDVDHVNAHGTATPIGDTAEANAIRVAGCQEAAVYAPKSALGHSIGAVGALESVLTVLTLRDGVIPPTLNYETPDPEIDLDIVAGEPRYGDYQYAINNSFGFGGHNVALAFGRY

SEQ ID NO: 61941 - protein, 115 aa, Mycobacterium avium
MAVSQEEIIAGIAEIIEEVTGIEPSEVTPEKSFVDDLDIDSLSMVEIAVQTEDKYGVKIPDEDLAGLRTVGDVVAYIQKLEEENPEAAEALRAKLETENPEAVANVKARLEADSK

SEQ ID NO: 61942 - protein, 163 aa, Mycobacterium avium
MMLDYGTFPPEFNSARIYSGPGSGSLVAAASAWSSLAAELNAAALSYDKVVTALASEEWLGSASASMASAVAPYVGWMSTTAAQAEEAASQARAAAAAYEAALAASVPPPLIAANRMQVSQLQATNVLGQNTPLIAQLEAQYGEYWAHDAAAMYSYAGQSASA

SEQ ID NO: 61943 - protein, 446 aa, Mycobacterium avium
MDRQKEFVLRTLEERDIRFVRLWFTDVLGFLKSVAIAPAELEGAFEEGIGFDGSSIEGFSRVSESDTVANPDPSTFQVLPWASPNGHHHSARMFCDITMPDGSPSWADPRHVLRRQLQKANDLGFSCYVHPEIEFFLLKPGPDDGTPPVPVDTAGYFDQAIHDSASNFRRHAIEALEFMGISVEFSHHEGAPGQQEIDLRFADALSMADNVMTFRYVIKEVAIENGARASFMPKPFGQHPGSAMHTHMSLFEGDVNAFHSPDDPLQLSDVGKSFIAGILEHASEISAVTNQWVNSYKRLVGGGEAPTAASWGAANRSALVRVPMYTPHKTSSRRVEVRSPDSACNPYLTFAVLLAAGLRGVEKGYVLGPQAEDNVWDLTPEERIAMGYRELPTSLDSALRAMESSELVAETLGEHVFDFFLRNKRTEWATYRSHVTPYELRTYLSL

SEQ ID NO: 61944 - protein, 285 aa, Mycobacterium avium
MSEHNVYGAAQPAQPAQPAQPRTRIRTHHLQKMKAEGHKWAMLTAYDYSTARIFDEAGIPVLLVGDSAANVVYGYDTTVPVSIDELIPLVRGVVRGAPHALVVADLPFGSYEAGPAAALAAATRFMKEGGAHAVKLEGGERVAEQIAHLTAAGIPVMAHIGFTPQSVNSLGGFRVQGRGDAAEQTIADAIAVAEAGAFSVVMEMVPAGLATQITGKLTIPTIGIGAGPNCDGQVLVWQDMAGMSSGKSARFVKRFADIGGELRRAATQYAHEVAAGVFPADEHCF

SEQ ID NO: 61945 - protein, 628 aa, Mycobacterium avium
MPADLGGPALSSAGPGSLLTVALYRKYRPATFAEVVGQEHVTEPLSIALEAGRINHAYLFSGPRGCGKTSSARILARSLNCVQGPTATPCGVCDSCLALAPNAPGSIDVVELDAASHGGVDDTRELRDRAFYAPAQSRYRVFIVDEAHMVTTAGFNALLKIVEEPPEHLIFIFATTEPEKVLPTIRSRTHHYPFRLLPPKTMRALIGRICEQEGVVVDDAVYPLVIRAGGGSPRDTLSVLDQLVAGAEGGHVTYQRALGLLGATDLALIDDAVDALAAGDAAALFGAVESVIDAGHDPRRFATDLLERFRDLILLQAVPDAASRGVVDAPEDVLERMRDQATRIGPATLTRYAEVVQAGLGEMRGATAPRLLLEVVCARLLLPSASDTEAALLQRVERIETRLDMSIPAGSTPAEPVEQPVRFTRPSAAPKPASKPEPAAAKSEHEPEPQPEARPEPRPEPTPEPKPARASETPSAPGELNAAAVRSMWSTVRDKVRQRSRTTEVMLAGATVRAIEDNTLVLTHESAPLAKRLCEQRNADVIAEALKDALGVNWRVRCEAGSPAPATAGPPHPKPEQPVHEPDSARRDEEEHMLAEAVRDEPAARRDPEEAALELLQNELGARRIDGS

SEQ ID NO: 61946 - protein, 116 aa, Mycobacterium avium
MQPGPGGDMSALLAQAQQMQQKLMEAQQQLANAEVHGQAGGGLVKVVVKGSGEVVAVKIDPSVVDPSDVETLQDLVVGAMADASKQVTRMAQERLGSLAGGFGAPPGQPPAPAPGV

SEQ ID NO: 61947 - protein, 203 aa, Mycobacterium avium
MFEGPVQDLIDELGKLPGIGPKSAQRIAFHLLSVEPPDIDRLTAVLARVRDGVRFCAVCGNVSDDERCRICSDPRRDASVVCVVEEPKDVQAVERTREFRGRYHVLGGALDPLSGVGPDQLRIRELLSRIGERVDDVDITEVIIATDPNTEGEATATYLVRMLRDIPGLTVTRIASGLPMGGDLEFADELTLGRALAGRRAMV

SEQ ID NO: 61948 - protein, 235 aa, Mycobacterium avium
MADSVVRIGLVLPDVMGTYGDGGNALVLRQRLRLRGIDAEIVELTLADPVPESLDLYTLGGAEDYAQRLATRHLLRYPGLQRAAERGAPVLAICAAVQVLGHWYETSAGERVDGVGMLDATTSPQDARHIGELVTKPLLAGLTEPLTGFENHRGGTVLGPAAAPLGAVVKGAGNRAGDGFDGVVQGSVVATYMHGPCLARNPQLADLLLGKVVGGLPELQMPEVELLRRERLAAR

SEQ ID NO: 61949 - protein, 416 aa, Mycobacterium avium
MLTTRARLALAAGASARWASRVTGRGAGAMIGGLVAMTLDRSVLRQLATGRRTVVVTGTNGKSTTTRMTAAALATMGSVATNAEGANMDAGLVAALAANRGARLAALEVDEMHVPHVSDAVRPGVVVLLNLSRDQLDRVGEINVIERTLRAGLARHPDAVVVANCDDVLMTSAAYDSPHVVWVAAGGSWANDSVSCPRSGEVIVREQGHWYSTGADFKRPSPHWWFDPQDGGNLYGPGGVALPMRLALPGAVNRGNAAQAVAAAVALGADPAAAVTAVSTVDEVAGRYRTVRVGRHDVRMLLAKNPAGWQEALSMVDPHADGVVISVNGRVPDGEDLSWLWDVRFEHFNDAFQTTPVVAAGERGTDLAVRLGYAGVEHTLVHDTVAAIESCPPGRVEVVANYTAFLALQRALARHG

SEQ ID NO: 61950 - protein, 1127 aa, Mycobacterium avium
MLAKVLVANRGEIAIRAFRAAYELEMATVAVYPYEDRNSVHRLKADESYQIGEEGHPVRAYLSVDEIVGTALACGADAIYPGYGFLSENPDLAAACAAAGITFVGPSAEVLELTGDKSRAIAAARAAGLPVLASSPPSTSVQELLSAAETMTFPLFVKAVAGGGGRGMRRVTDPGALAEAIEAASREAESAFGDASVFLEQAVINPRHIEVQILADTHGNVMHLYERDCSVQRRHQKVIEIAPAPNLDPALRERICADAVAFARSIGYTCAGTVEFLLDERGNHVFIEMNPRIQVEHTVTEEITDVDLVSAQLRIASGQTLEEIGLSQDSVISRGAALQCRITTEDPANGFRPDTGRITAYRTPGGAGIRLDGGTTLGAEISAHFDSMLIKLTCRGRDFPTAVRRARRAVAEFRIRGVSTNIPFLQAVLDDPDFQAGRITTSFIEQRPQLLTARSSADRGTKILNYLADVTVNKPHGERPSAVYPHDKLPDIDLAASPPAGSKQRLTELGPERFAAWLRESGGVGVTDTTFRDAHQSLLATRVRTSGLLKVAPYIARTMPQLLSVECWGGATYDVALRFLKEDPWERLTALREAMPNICLQMLLRGRNTVGYTPYPETVTTAFVAEATETGIDIFRIFDALNNVDSMRPAIDAVRETGSAIAEVAMSYTGDLSDPAEKLYTLDYYLKLADQIVEAGAHVLAIKDMAGLLRAPAAATLVSALKSRFDLPVHVHTHDTPGGQLATYVAAWQAGADAVDGAAAPLAGTTSQPALSSIVAAAANTEYDTGLSLPAVCDLEPYWEALRKVYAPFESGLPAPTGRVYHHEIPGGQLSNLRQQAIALGLGDRFEDIENAYAGADAILGHLVKVTPSSKVVGDLALALVGAGVGAQDFAEDPSRYDIPDSVIGFLRGELGDPPGGWPEPLRTKALQGRGPAKPEQPLTAEDEAALAAPGARRQAALNRLLFPGPTKELEEHREQYGDTSGLSANQFFYGLRQGDEHRVELERGVELLIGLEAISDPDERGMRTVMCILNGQLRPVVVRDRSIAIDVPAAEKADRANPDHIAAPFAGVVTVAAEVGRQVEAGQTIATIEAMKMEAAVTSPKSGKVARIAVSRTAQVEGGDLLMVID

SEQ ID NO: 61951 - protein, 375 aa, Mycobacterium avium
MSTLEDNQPRIHKGLAGVVVDTTAISKVVPETNSLTYRGYAVQDLAAHCSFEQVAYLLWYGELPDDQQLALFSQRERAARRLNRSQLSLLHKLPDTCHPMDVVRTFISSMGAEDPDEDDNSASANHAKALRMFAVLPTIVAADMRRRRGLEPIAPHSHMSYAQNFLHMCFGDVPEQVIVDAFEQSMILYAEHSFNASTFAARVVTSTQSDIYSAVTAAIGALKGSLHGGANEAVMHDMLEIGTPDRAAEWLQGKLSRKEKVMGFGHRVYKNGDSRVPTMKQALQRVAAVRDGQKWLDIYQILERGMARANGIKPNLDFPTGPAYYLMGFDIGAFTPIFVMSRITGWTAHIIEQTASNALIRPLSEYVGPPQRALS

SEQ ID NO: 61952 - protein, 421 aa, Mycobacterium avium
MALVVQKYGGSSVANADRIRRVAERIVATKKQGNDVVVVVSAMGDTTDDLMDLAQQVCPAPPPRELDMLLTAGERISNALVAMAIESLGAQARSFTGSQAGVITTGTHGNAKIIDVTPGRLQAALDEGRIVLVAGFQGVSQDTRDVTTLGRGGSDTTAVALAAALGADVCEIYTDVDGIFSADPRIVHNARKLDTVTFEEMLEMAACGAKVLMLRCVEYARRYNIPVHVRSSYSDKKGTVVVGSIKDKPMEDPILTGVAHDRSEAKVTVVGIPDIPGYAARVFRAVADADVNIDMVLQNVSKVEDGKTDITFTCSREAGPTAVAKLDALKDEIGFTQLLYDDHIGKVSLIGAGMRSHPGVTATFCEALAQVGVNIELISTSEIRISVLCRDTELDKAVVALHEAFGLGGAETATVYAGTGR

SEQ ID NO: 61953 - protein, 344 aa, Mycobacterium avium
MVAIGVVGATGQVGQVMRRLLDERDFPATSVRFFASSRSQGRKLEFRGAEIEVEDAATADPTGLDIALFSAGKTMSLVQAPRFAAAGVTVIDNSSAWRKDPDVPLVVSEVNFERDAHRRPKGIIANPNCTTMAAMPVLKVLHDEAGLQRLVVSSYQAVSGSGIAGVEELATQARAVIDGAEQLVHDGRAVSFPAPQTYVAPIAFNVVPLAGSLVDDGSGETDEDQKLRHESRKILGVPDLAVSGTCVRVPVFTGHSLSINAEFARPLSPERARELLDGAPGVKVVDVPTPLAAAGVDESLVGRIRRDPGVPDGRGLALFISGDNLRKGAALNTIQIAELLAAQL

SEQ ID NO: 61954 - protein, 364 aa, Mycobacterium avium
MIVFDNVSKVFADGTAAVDRLSLTVPTGKLTVFVGSSGSGKTTALRMINRMIEPTSGTISIDGVDVSTLDPVKLRLGIGYVIQHAGLMPHQRVIDNVATVPVLRGQRRRAARTAAYQVLERVGLDVKLARRYPAQLSGGEQQRVGVARALAADPPILLMDEPFSAVDPVVRHDLQNEILRLQSELHKTIVFVTHDIDEALRLGERVAVFKGGMLQQCDEPARLLSRPANDFVSRFIGLGRGYRWLQLIDAAGLPVHDVRRLFAENLSGADVFDGWAVVVDEAGAPLGWIDAEGLRRHRDGLALSDSMTGVGSLFRPRGNLSQALDAALSSPSGIGVAVDDDGRVIGGVLAADVLAAVESQRKSR

SEQ ID NO: 61955 - protein, 260 aa, Mycobacterium avium
MGARGARRRPPLGRRAGGGGCPVNFVQRAIAYLLSADNWTGPVGLAARILEHLEYTGIAVGASALIAVPVGLLIGHTGRGTLLVVGAVNGLRALPTLGVLLFGTLLFGLGLGPSLVALMLLGVPALLAGTYAGIANVEPTVVDAARAMGMTESQVLLRVEVPNALPLILGGLRSATLQVVATATVAAYASLGGLGRYLIDGIKEREFHLALVGALTVAALALVLDGLLAVAVWASVPGTGRLRRTYRPLPHRLAGTSYGR

SEQ ID NO: 61956 - protein, 291 aa, Mycobacterium avium
MQSTFCGRPVAGDRALIMAIINRTPDSFYDRGATFSDDAARAAVHRAVAEGADVIDVGGVKAGPGQDVDADTEIARLVPFIEWLRDAYPDQLISADTWRAEVAKVACAAGADLINDTWGGVDPALPEVAAEFGAGLVCSHTGNALPRTRPFRVSYGTSTRGVVDDVIAQVTAAAERAVGCGVAPDRVLIDPTHDFGKNTFHGLLLLRHVGDLVNTGWPVLMALSNKDFVGETLGVELTERLEGTLAATALAAAAGARMFRVHEVAPTRRVLEMVASIQGTRPPTRTVRGLA

SEQ ID NO: 61957 - protein, 304 aa, Mycobacterium avium
MPISAIRTRWLNAPNGTARSVGVPVTQRTRVPGCAAANRSAATRAKVDLPMPSGPRTTAPAAAAVSANAASSRSAAVACRGTFHRIGTAGFYGARARRHGESPRYDGPRGVGLRLSDMPAERDSSAAWAVCVYCASGPQHPELLGVAAELGEAIAERGWTLVWGGGRVSAMGAVASAARARGGRTVGVIPTVLMRREIADADADELIVSDTLHERKQIMEDRADAFIALPGGIGTLDEVLDAWTTGFLGLHAKPIVLLDPIGHYEGLWLWLSGLLDSGYITQAAMDRVVLVDKVGAALEACAPG

SEQ ID NO: 61958 - protein, 504 aa, Mycobacterium avium
MTSDPGYDQAKDSANRLAPRPISRPPVDPASRREFGRPAGLRGSFVAERVRPKKYREQSEFRPSEQSADPVLQEAFSRPDGSPETLQRHPVDSGALAAEKDGVEPDHADDPWRDPGAPAALGTPAVAPSPSRSALGYGGKLGVRDVLFGGKVSYLALLVLLLIALVIGLIGGVVGRKTAEVAEAFTTSKVTLSTNGNGEAPAGRFAKVAAATAGAVVTIESKSDQEGMQGSGVVIDGRGYIVTNNHVISEAANNPSQFKTTVVFNDGKEVPANLVGRDPKTDLAVLKVDNVDNLSVARLGDSDKVRVGDEVLAAGAPLGLRSTVTHGIVSALHRPVPLSGEGSDTDTVIDAVQTDASINHGNSGGPLIDMDSQVIGIDTAGKSLSDSASGLGFAIPINEAKEVAQTLIRDGKIVHPTLGVSTRSVSNAIASGAQVANVKAGSPAQKGGVLENDVVVKVGNRKVADADEFVVAVRQLTIGQDSPIEVVRDGRHVTLTVKPDPDGS

SEQ ID NO: 61959 - protein, 314 aa, Mycobacterium avium
MATDGFAPIEIRGLTKNFGAVRALDGLDLTVREGEVHGFLGPNGAGKSTTIRILLGLVKADGGTVRLLGGDPWTQAVELHRQIAYVPGDVTLWPSLTGGEIIDLLARMRGGIDKRRRAELIERFDLDPHKKARTYSKGNRQKVSLISAFSSRARLLLLDEPSSGLDPLMENVFQQCVAQARDRGTTVLLSSHILAETEALCERVTIIRAGKTIESGSLSSMRHLSRTSIKAEMTGDPGDLRRIKGVEDISIEGNTLRAQVDSESLGELIRVLGDAGVRSLVSQPPTLEELFLRHYDTSGTDGERGAHEAEVSLS

SEQ ID NO: 61960 - protein, 508 aa, Mycobacterium avium
MAEFAEFIAAIDQGTTSTRCMIFDHQGAEVARHQLEHEQILPRAGWVEHDPIEIWERTSSVLTSVLNRANLSAENLAALGITNQRETTLVWNRKTGRPYYNAIVWQDTRTDRIASALDRDGRGQVIRRKAGLPPATYFSGAKLQWILDNVDGVREAAERGDALFGTADSWVLWQLTGGPRGGVHATDVTNASRTMLMDLETLDWDDELLSFFTIPRAMLPEIGPSSSPRPFGVTSDTGPAGGRIPITAVLGDQHAAMVGQVCLAEGEAKNTYGTGNFLLLNTGESIVRSEHGLLTTVCYQFGDAKPVYALEGSIAVTGAAVQWLRDQLGIISGAAQSESLARQVDDNGGVYFVPAFSGLFAPYWRSDARGAIVGLSRFDTNAHLARATLEAICYQSRDVVDAMAADSGVRLEVLKVDGGITGNDLCMQIQADVLGVDVVRPVVAETTALGAAYAAGLAVGFWADPGELRANWREDKRWTPAWSDEQRAAGYAGWRKAVQRTLDWADVT

SEQ ID NO: 61961 - protein, 377 aa, Mycobacterium avium
MSRVLLVTNDFPPRPGGIQSYLGEFVGRLAAAGSHELTVYAPDWKGAQAHDEAVGYRVVRHPGTLMLPGPAVDARMRRLIAEHVIDTVWFGAAAPLALLAQRARAAGARRVLASTHGHEVGWSMLPVARSVLRRIGEQTDVVTFVSRYTRSRFAPAFGPRARLEYLPSGVDTDRFRPDPAGRARLRERYGLGERPTVVCVSRLVPRKGQDMLIRAMPSIVQRVDGAALVIVGGGPHLQSLRALARDCGVAAQVTFTGGIPAAELPTHHALADVFAMPCRTRGAGLDVEGLGIVYLEASASGVPVIAGRSGGAPETVQHNKTGLVVDGRSVTEIADAVTELLSDPDRAAAMGAAGRQWVTSQWRWDTLAARLAGLLGD

SEQ ID NO: 61962 - protein, 271 aa, Mycobacterium avium
MTLPRLIACDVDGTLFDDDERITPRTRAAVRAAVAGGARFVVATGRPPRWIRPVVDALGFAPIAVCANGAVIYDPANDRVLSARTLDVDTLAELAELATRVIPGAGLAVERIGERAHDTATPQFISSPGYEHAWLNPDNTEVSIEDLLSAPAIKLLIRRAGARSSDIAAELAKHVGLEGDITYSTDNGLVEIVPLGISKATGIEEIARPLEIAREEVVAFGDMPNDLPMLRWAGHGVAMGNAHPEVQAAADEITAANNDDGVGRVLERWWL

SEQ ID NO: 61963 - protein, 425 aa, Mycobacterium avium
MIDLKLLREDPDAVRRSQQSRGEDPSLVDALLAADAARRAAISTADTLRAEQKSASKSVGAASPEQRPALLARAKELAEQVKAAETAQAEAEAAFTAAHLAISNVVIDGVPAGGEDDFAVLDVVGEPTALENPRDHLELGESLGLIDMARGAKVSGSRFYFLTGKGALLQLGLLQLALRLAVENGFVPMIPPVLVRPEVMAGTGFLGAHAEEVYRIEADDLYLVGTSEVPLAGYHADEILDLSAGPLRYAGWSSCFRREAGSYGKDTRGVIRVHQFDKVEGFVYCTPADAEAEHQRLLGWQREMLARIEVPYRVIDVAAGDLGSSAARKFDCEAWVPTQQTYRELTSTSNCTTFQARRLSTRYRDGGDAKGKPQIAATLNGTLGTTRWLVAILENHQRPDGSVRVPEALVPFVGTELLEPVGPRG

SEQ ID NO: 61964 - protein, 255 aa, Mycobacterium avium
MEPVYGTVIQLARLIWRVQGLKITITGVENLPKSGGAVIAINHTGYLDFTFAGLPAYKQGLGRKVRFMAKQEVFDHKITGPIMRSLRHISVNRQDGAASYEAAVRNLKDGELVGVYPEATISRSFEIKEFKSGAARMAVEAGVPIVPHIVWGAQRIWTKDHPKKLWRPKVPIIVLVGEPIQPTLGVEELKGLLHSRMQHLLERAQEMYGPHPAGEFWVPHRLGGGAPSLAEAARLDAEEAAARAARRGQSAGAPE

SEQ ID NO: 61965 - protein, 103 aa, Mycobacterium avium
MADTRGGQLLVYGVDPLILRQAYPVPQAPYGLAGSRALAWVSQTVSNIVIGYDLSTGIPVEKVRYPTVQQPNSLAFDEASDTLYVVSGSGAGVQVIDHAAGKR

SEQ ID NO: 61966 - protein, 214 aa, Mycobacterium avium
MSTLHKVKAYFGMAPMDDYEDEYYDDRAPSRGFPRPRFDDGYGRYDGDDYDDPRREPADYPPPAGYRGGYAEESRYGAVHPREFERPEMGRPRFGSWLRNSTRGALAMDPRRMAMMFEEGHPLSKITTLRPKDYSEARTIGERFRDGTPVIMDLVSMDNADAKRLVDFAAGLAFALRGSFDKVATKVFLLSPADVDVSPEERRRIAETGFYAYQ

SEQ ID NO: 61967 - protein, 261 aa, Mycobacterium avium
MTAGTPAPDSAGDRETELTHALAAVRSRLAAAAEAAGRNVAEIEVLPVTKFFPATDVVTLSRLGCRAVGESRDQEATAKVAEVTRLLATSARTNVAIPRWHMVGHIQRNKARSVARWAHTAHSVDSTHLVSALDRGVAAALADGGRIDPMRVYVQVSLDGDESRGGVDISRPGAVDEVCAQVAAANNLDLVGLMAIPPLNSDPDEAFDRLQSEHRRVLETHRNAVGLSAGMSDDFEIAVKHGSTCVRVGTALLGRRPLPSP

SEQ ID NO: 61968 - protein, 387 aa, Mycobacterium avium
MMTPPHNYLAVIKVVGIGGGGVNAVNRMIEQGLKGVEFIAINTDAQALLMSDADVKLDVGRDSTRGLGAGADPEVGRKAAEDAKDEIEELLRGADMVFVTAGEGGGTGTGGAPVVASIARKLGALTVGVVTRPFSFEGKRRSNQAEAGINALRESCDTLIVIPNDRLLQMGDAAVSLMDAFRSADEVLLNGVQGITDLITTPGLINVDFADVKGIMSGAGTALMGIGSARGEGRSLKAAEIAINSPLLEASMEGAQGVLMSIAGGSDLGLFEINEAASLVQDAAHQDANIIFGTVIDDSLGDEVRVTVIAAGFDAAGPGRKPVIGGSADKGEKTGGAHRIESAKAGKLTSTLFEPVDAVSVPIHTNGSTLNIGGEDDDVDVPPFMRR

SEQ ID NO: 61969 - protein, 215 aa, Mycobacterium avium
  MISC_FEATURE (2)..(2): X=any amino acid
MXMVTILLVIVGIGLALVLYFTPAMSARNIVVVGTGVVTREEVLDAARVRLGTPLLQIDTGQVADRVAAIRRVASARVQRQYPSALRITIVERIPVAVKDFPDGLHLFDRDGVDFATGPPPPALPYLDVADPGPNDPATKAALQVLTALRPEVEGQVGRIAAPSVASITLTLGDGRVVIWGTTDRTDEKAEKLAALLTQPGKTYDVSSPDLPTVK

SEQ ID NO: 61970 - protein, 260 aa, Mycobacterium avium
MPLTPADVHNVAFSKPPIGKRGYNEDEVDAFLDLVEAELTRLIEENSDLRQRIEELDQELAAGGGAAAPAAAAPTQAIPVAEPEPVKAAPAAAVSNEEQAIKAARVLSLAQDTADRLTSTAQAESEKMLADARANADQILSEARSTAETTVAEARQRADAMLADAQARSEAQLRQAQEKADALQADAERKHSEIMGTINQQRTVLEGRLEQLRTFEREYRTRLKTYLESQLEELGQRGSAAPVDSSADAGGFDQFNRGNN

SEQ ID NO: 61971 - protein, 350 aa, Mycobacterium avium
MGLPNVGKSTLFNALTRNNVVAANYPFATIEPNEGVVPLPDPRLDKLAEMFKSERIVAAPVTFVDIAGLVKGASEGAGLGNKFLAHIRECDAICQVVRVFADDDVTHVAGQVDPRSDIEVVETELILADLQTLERAAGRLEKEARTSKERRPVYEAALAAQETLNGGKTLFSAGTDTSLLRELNLLTTKPFLYVFNADESVLTDPARIAELRELVAPADAVFLDAAIESELIELDDESAAELLESIGQTERGLDALARAGFHTLRLQTFLTAGPKEARAWVIHQGDTAPKAAGVIHSDFEKGFIKAEIVSYDDLIAAGSMAAAKAAGKVRMEGKDYVMADGDVVEFRFNV

SEQ ID NO: 61972 - protein, 467 aa, Mycobacterium avium
MFYGAFPPEFNSGRMYSGPGAGSFVAAATAWQNLAAELQSAAASYSSVLSGLTAGPWVGPSSLAMASAAAPYVAWMQQTAAQAAETAAQATAAATAYETAFAAHVPPAVIAENRALLAQLVATNIFGQNTAAIAANEAQYGEFWAQDATAMDTYFAASATAANKLTEFGPAPKTTNEAAQPMQAAAVSSAASTPAANVAQTAASAASTTLPYSGPFSGPANLAYLYQTFMTNLFNTVPGGASFYTSMYNAVKVPLGLTTQFNGVGLLVNFPLSQWLKFAPPIGYGALPKDALGAGLGALGFGRGTLYSAISPVAGMGNAGTLVGKLSIPPSWATATPSIRTVAAALSAAGAEAVPAAALGEGSLFSSMGLAGMLGSAVGSGGPTMVRGGVRNRMTAIKDLKDKQSPEQLKRLVAQISEQPESVQHHNVDQENLDTLLEQLAKKPGIHAVHLKKGDKSKVLPADAQLG

SEQ ID NO: 61973 - protein, 588 aa, Mycobacterium avium
MSSRGGVMRDDSPRMSPRRHIIVSGDDVLATTIAEELNRAGATIVKLPSEELAGADLARASAIVCAGRDDAKNLEIALLARKTNPHVRVVARLGNDVLRGAVAADNGPGAILDVADLAAPSVVEACLSSSTHPVRAAGIDFLVSGAEAPRDATLREIYGDLAPVAVIHGNDGATPGEVVPCPGRDHRVRAGDWTAMIGSADELAARGIRTPRPPATRSRQTWLRRVLDAARAMRDDVNPMLFPAILLALTLLLVSTVIVHFSYTKPRLSWLDALYFTAETITTVGYGEFTFAHQSAWLRIFAVGLMFAGVTTTALLVAFLADLLLSRRFLQSAGLRRARHLRNHIIVVGLGSFGSRVVADLTAAGYDVAVIERDENNRFLSTAAELDVPVIFGDATLRQTLESARVDRARAVAVLTQDDMVNIEIGIVLREMLGPRVMPEVNRPDVPIVLRIYDRTLGDAVAKRFGFENVRSTVDLAAPWFIGAAMGLQVLGTFSVGQRSFMVGAMHVAAGSELDGLRMFEMSTQTRVIAITRRDTPVELHPRRDAWLRAGDTVYLVGPYRELLETLRKGQPPQQPANEERPADKATT

SEQ ID NO: 61974 - protein, 184 aa, Mycobacterium avium
MNIDMAALHAIEVDRGISVNELLETIKSALLTAYRHTEGHQNDARIEIDRKTGVVKVIARETDEDGNVISEWDDTPEGFGRIAATTARQVMLQRFRDAENERTYGEFSTREGEIVAGVIQRDSRANARGLVVVRMGTETKASEGVIPAAEQVPGESYEHGNRVRCYVIGVTRGAREPLITLSRT

SEQ ID NO: 61975 - protein, 472 aa, Mycobacterium avium
MSTREGSLWGGRFADGPSDALAALSKSTHFDWVLAPYDIVASRAHTVILYRAGLLSEEQRDGLLAGLDSLAEDVADGSFTPLVTDEDVHAALERGLIDRVGPDLGGRLRAGRSRNDQVATLFRMWLRDAVRRVAAGALDVVGALVAQAAAHPEAIMPGKTHLQSAQPVLLAHHLLAHAHPLLRDVDRIVDFDKRAAVSPYGSGALAGSSLGLDPDAIAAELGFASAADNSIDATASRDFAAEAAFVFAMIGVDLSRLAEDVILWSSTEFGYVKLHDAWSTGSSIMPQKKNPDIAELARGKSGRLIGNLAGLLATLKAQPLAYNRDLQEDKEPVFDAVAQLELVLPAMAGLVGSLTFDVQRMAALAPAGYTLATDIAEWLVRQGVPFRSAHEAAGAAVRAAEQRAVGLDELTDDELAAISPALTPQVREVLTIEGSVSSRDARGGTAPARVVEQIDTVAATAARLRERLGGPA

SEQ ID NO: 61976 - protein, 309 aa, Mycobacterium avium
MTPRHFLRDDDLSPAEQAEVLALAAELKKDPFSARPLEGPRGVAVLFDKNSTRTRFSFEVGIAQLGGHAVVVDARSTQLGRDETLEDTARVLSRYVEAIVWRTFEQHRLEAMAGAATVPVINALSDEFHPCQVLADLQAIAEHKGSLSGLRMCYLGDGANNMAHSLMLGGVTAGIHVTIAAPDGFTPAPEFVAAARRRAESTGATVTLTTDARTAARGVDVLVTDTWTSMGQEDDGLDRRTPFWPYQLNADLVSLADPEAIVLHCLPAHRGEEITDEVMDGPSSVVWDEAENRLHAQKALLTWLLERQA

SEQ ID NO: 61977 - protein, 256 aa, Mycobacterium avium
MGGDPVTVYFIGAGPGAADLITVRGQRLLQSCPVCLYAGSIMPDDLLALCPPDARIVDTGPLTLDQIITELSQAHAAGHDVARLHSGDPSLYSALAEQCRRLDALGIDYEIVPGVPAFAAAAAALKRELTVPGVAQTVTLSRVATLSTAMPPGEDLATLARTGGTLVLQLAAAQIDSIVGQLLDNGRQSQTPCAVVAFASWPQETVLRGTLDDIAAQMHDAHITKTAVIIVGDALTAGGFTDSYLYSTGRARGSRH

SEQ ID NO: 61978 - protein, 403 aa, Mycobacterium avium
MSEKGRLFTSESVTEGHPDKICDAISDSVLDALLAQDPRSRVAVETLVTTGQVHVVGEVTTTAKEAFADITNTVRERILDIGYDSSDKGFDGASCGVNIGIGAQSPDIAQGVDTAHETRVEGAADPLDAQGAGDQGLMFGYAINDTPERMPLPIALAHRLSRRLTEVRKNGVLPYLRPDGKTQVTIEFEDDVPVRLDTVVISTQHAADIDLENTLTPDIREKVLNTVLNDLAHDTLDTSSTRLLVNPTGKFVVGGPMGDAGLTGRKIIVDTYGGWARHGGGAFSGKDPSKVDRSAAYAMRWVAKNIVAAGLAERVEVQVAYAIGKAAPVGLFIETFGTATVDPVKIEKIVPEVFDLRPGAIIRDLDLLRPIYAQTAAYGHFGRTDVELPWEQLNKVDDLKRAI

SEQ ID NO: 61979 - protein, 430 aa, Mycobacterium avium
MSVLLRGVRLYGEGDRVDVLVDDGQIADIGAGLDIPDTADVIDATGQVLLPGFVDLHTHLREPGREYAEDIETGSAAAALGGYTAVFAMANTNPVADSPVVTDHVWHRGQQVGLVDVHPVGAVTMGLAGKELTEMGMMAAGAAQVRMFSDDGVCVHDPLVMRRALEYATGLGVLIAQHAEEPRLTVGAVAHEGPTAARLGLAGWPRAAEESIVARDALLARDAGARVHICHASTAGTVEIVKWAKQQGISITAEVTPHHLMLDDSRLASYDGRNRVNPPLREAADAAALRRALADGVIDCVATDHAPHAEHEKCVEFSAARPGMLGLQTALSIVVHTMVRPGLLTWRDVAKVMSENPARIANLPDHGRPLEVGEPANLTVVDPDASWTVAGSDLASRSANTPYEAMTLPATVTATLLRGKVTARDGKCPV

SEQ ID NO: 61980 - protein, 373 aa, Mycobacterium avium
MSGKAQLVLEDGRVFTGTPFGAIGQTLGEAVFSTGMSGYQETLTDPSYHRQIVVATAPQIGNTGWNGEDAESRGDKIWVAGYAVRDPSPRVSNWRATGSLEDELIRQRIVGIARIDTRAVVRHLRTRGSMKAGVFSGDALADPDELVQRVRGQQSMLGADLAGEVSTPDAYIVEPEGPPRFTVAALDLGIKTNTPRNFARRGIRSHVLPSSATFEQIADLRPDGVFLSNGPGDPATADHIVAVTREVLGAGIPLFGICFGNQILGRALGLSTYKMVFGHRGINIPVIDHATGRVAVTAQNHGFALQGEAGQAFDTPFGAAVVSHTCANDGVVEGVKLADGRAFSVQYHPEAAAGPHDANYLFDQFIELMEGDR

SEQ ID NO: 61981 - protein, 1117 aa, Mycobacterium avium
MPRRTDLNHVLVIGSGPIVIGQACEFDYSGTQACRVLKAEGLQVSLVNSNPATIMTDPEYADHTYVEPITPAFVERVIAQQAERGNKIDALLATLGGQTALNTAVALYENGALDRYGVELIGADFDAIQRGEDRQRFKDIVAKVGGESARSRVCFTMDEVRETVAELGLPVVVRPSFTMGGLGSGMARSVEEVDRMAGAGLAESPSANVLIEESIYGWKEFELELMRDGNDNVVVVCSIENVDPMGVHTGDSVTVAPAMTLTDREYQRMRDLGIAILREVGVDTGGCNIQFAVNPKDGRLIVIEMNPRVSRSSALASKATGFPIAKIAAKLAIGYTLDEIVNDITKETPACFEPTLDYVVVKAPRFAFEKFPGADPTLTTTMKSVGEAMSLGRNFIEALGKVMRSLETSRAGFWTKPDPDGGLDDVLARLQTPTEGRLYDLELALRLGAPVERVAQASGVDPWFIAQIGELVALRGELIGAPVLDADLLRRAKHHGLSDRQIAALRPELAGENGVRSLRERLGVHPVYKTVDTCAAEFEAKTPYHYSSYELDPAAETEVAPQPQRPKVLILGSGPNRIGQGIEFDYSCVHAATTLSQAGFETVMVNCNPETVSTDYDTADRLYFEPLTFEDVLEVFRAEQQSGAGGPGVVGVIVQLGGQTPLGLAQRLADAGVPIVGTPPEAIDLAEDRGSFGDVLTAAGLPAPKYGTATTFAQARRIAVDIGYPVLVRPSYVLGGRGMEIVYDEETLRDYITRATELSPEHPVLVDRFLEDAVEIDVDALCDGTEVYIGGIMEHIEEAGIHSGDSACALPPVTLGRSDIEKVRRATEAIAHGIGVVGLLNVQYALKDDVLYVLEANPRASRTVPFVSKATAIPLAKACARIMLGATISQLRAEEMLAASGDGAHAALNAPIAVKEAVLPFHRFRTVEGAGIDSLLGPEMKSTGEVMGIDRDFGSAFAKSQTAAYGSLPAQGTVFVSVANRDKRSLVFPVKRLADLGFRVLATEGTAEMLRRNGIPCDEVRKHFEDPQPGRPEMSAVDAIKAGEVDMVINTPYGNSGPRIDGYEIRSAAVSVNIPCVTTVQGASAAVQGIEAGIRGDIGVRSLQELHSQIASDKGPR

SEQ ID NO: 61982 - protein, 1177 aa, Mycobacterium avium
MNHSSFVHLHNHTEYSMLDGAAKITPMLAEVERLGMPAVGMTDHGNMFGASEFYNAATKAGIKPIIGVEAYIAPGSRFDTRRILWGDPSQKADDVSGSGSYTHLTMVAENAAGLRNLFKLSSLASFEGQLGKWSRMDAELIAEHADGIIATTGCPSGEVQTRLRLGQDREALESAAKWREIFGADNFFLELMDHGLSIEQRVRGGLLEIGRKLNIPPLATNDCHYVTRDAAHNHEALLCVQTGKTLSDPNRFKFDGDGYYLKSAAEMRQIWDAEVPGACDSTLLIAERVQSYAEVWTPRDRMPVFPVPEGHDQASWLHHEVMAGLRRRFPDGVGQDYIDRAEYEIKVICDKGFPSYFLIVADLINYARSVDIRVGPGRGSAAGSLVAYALGITNIDPIPHGLLFERFLNPERPSAPDIDIDFDDRRRGEMVRYAADKWGSDRVAQVITFGTIKTKAALKDSARIHYGQPGFAIADRITKALPPPIMAKDIPLSGITDPSHERYKEAAEVRGLIETDPDVRTIYQTARGLEGLIRNAGVHACAVIMSSEPLTEAIPLWKRPQDGAIITGWDYPSCEAIGLLKMDFLGLRNLTIIGDALDNIKANRGIDLDLESVPLDDKATYELLGRGDTLGVFQLDGGPMRDLLRRMQPTEFNDIVAVLALYRPGPMGMNAHNDYADRKNGRQPIKPIHPELEEPLREILAETYGLIVYQEQIMFIAQKVASYTMGKADALRKAMGKKKLEVLEAEYKGFYEGMTANGFSEKAVKALWDTILPFAGYAFNKSHAAGYGLVSYWTAYLKANYPAEYMAGLLTSVGDDKDKAAVYLADCRKLGITVLPPDVNESLVNFASVGQDIRFGLGAVRNVGANVVGSLIKTREEKGKFTDFSDYLNKIDISACNKKVTESLIKAGAFDSLKHARKGLFLVHTDAVDSVLGTKKAEAMGQFDLFGGDGGCTESVFTIKVPDDEWEDKHKLALEREMLGLYVSGHPLNGVAHLLAAQVDTQIPAILDGDVPNETQVRVGGILASVNRRVNKNGMPWASAQLEDLTGGIEVMFFPHAYSTYGADIADDAVVLINAKVAIRDDRIALIANELVVPDFSIAQVDRPLAVSLPTRQCTIDKVTALKQVLARHPGTSQVHLRLISGDRITTLELDASLRVTPSPALMGDLKELLGPGCLGG

SEQ ID NO: 61983 - protein, 245 aa, Mycobacterium avium
MLCGSHYGVDGLLTSPRRHRSKRKPRPAKPLKALASPVNAPMSMQPRSRRPLRRAQLSDEVAGHLRAAIMSGALRPGTFIRLDETAAELGVSVTPVREALLKLRGEGMVQLEPHRGHVVLPLTRQDIEDIFWLQATIAKELAAAATDHITDTEIDELDRINDALAAAVGSGDAETIAGLEFGFHRVFNQASGRIKLAWFLLNAARYMPVLVYAADPQWGRAAVDNHRRPVCGRRPGRGARRPRRR

SEQ ID NO: 61984 - protein, 1061 aa, Mycobacterium avium
MAQETTRIVTDNLGFQADREAQPADSVQTYPKPAGGAPDFPALELEVLDYWARDDTFRASIARRDGAEEYVFYDGPPFANGLPHYGHLLTGYVKDIVPRYRTMRGNKVERRFGWDTHGLPAELEVERQLGITDKSQIDDMGIAAFNDACRESVLRYTDEWRAYVTRQARWVDFDNDYKTLDLPYMESVIWAFKQLWDKGLAYEGYRVLPYCWRDETPLSNHELRMDDDVYQSRQDPALTVGFKVVGGELDGAHLLIWTTTPWTLPSNLAVAVHPEVTYVQVRSGDRRFVLAQPRLAAYARELGPEPEILGSYRGAELLGTRYLPPFPYFMDSPNAFRVLAGEFVTTEDGTGIVHLAPAYGEDDMAVADAAGIAPVTPVDSNGRFDAAVPDYQGLNVFDANPQIIRDLKNGSGAAAANAPVLLRHETYEHPYPHCWRCRNPLIYRAVSSWFVAVTRFRDRMVELNQQITWYPEHVKDGQFGKWLAGARDWSISRNRYWGTPIPVWKSDDPAYPRIDVYGSLDELERDFGVRPDNLHRPYIDELTRPNPDDPSGRSTMRRIPDVLDVWFDSGSMPYAQVHYPFENRDWFETHYPGDFIVEYIGQTRGWFYTLHVLATALFDRPAFKTCVAHGIVLGSDGQKMSKSLRNYPDVSEVFDRDGSDAMRWFLMASPILRGGNLIVTEQGIRDGVRQVLLPFWNAYSFLALYAPKVGTWRTDSTQVLDRYILAKLAELRDDLTREMDACDISRACEQLRQFTEALTNWYVRRSRSRFWSEDADAIDTLHTVLEVTARLAAPLLPSVTELVWRGLTGGRSVHLTDWPRSGELPADPGLVAAMDQVREVCSAASSLRKAKKLRVRLPLPKLTVAVENPQHLAPFVDLIADELNVKSVELTDAIDTYGTFELTVNARVAGPRLGKDVQAAIKAVKAGEGVVNADGTLTAGPAVLRPEEYSSRLVAADPEFTAALPNGAGLVVLDGTVTPELEAEGWAKDRIRELQELRKSTGLDVSDRISVVMSVPAGRAEWAHTHRDLIAGEILATRFEFGEPADPVAIGDGVRVSISKV

SEQ ID NO: 61985 - protein, 839 aa, Mycobacterium avium
MWGQCHSLAFDFSVWEIFGALLNGGRVLVVPDDVVRSPKDLHALLVAERVDMLTQTPSEVGVLSPDGLESTTLAVAGEACPVEVVDRWAPGRVMINVYGPTETTIVAAVSAPLTPGPEAPPIGAPVPGTALRVLDAHLRPVPPGVVGELYVAGAGVSTGYLGRPGLTASRFVACPFGGAGERMYRTGDLVRWGADGQLQYLGRADEQVKIRGYRIELGEIQSALAALDGVDQAAVIAREDRPGDKRLVGYVTGTADLAQLRTALAERLPGYMVPAAVLMLDALPLTPSGKLDTGALPAPDYQGPEGYLAPAGAVEEILAWLYAQVLGLPRRVGVQESFFDLGGDSLSAMRLVAAIYNALDIHLPVRAVFEAPSVRSLSQRLNADPAVAQGLRADFASVHGRDATEVYASDLTLDKFIDAATLSAAPALPGPGAEVRTVLLTGATGFLGRYLVLQWLERLELADGKLICLVRAASDDDARRRLERTFDSGDPALLRYFHELAADHLEVIAGDKGRANLGLDDRTWQRLADTVDLIVDAAAVVNGVLPYQELFGPNVAGTAELIRLALSTRLKPYSYVSTANVGDQIEPSAFTEDADIRVAGPIRTIDGGYGNGYGNSKWAGEVLLREAHDLCGLPVSVFRCDMILADTSYAGQLNLPDMFTRLLFSVVASGVAPRSFYRLDAHGNRQRAHFDALPVEFVAEAIATLGAQVGRDAGTGFATYHVMNPHDDGIGLDEYVDWLIDAGYPIERVDDFDQWLHRMETALHALSERQRHQSVLQLLALRNARHVPPADPARGCLGPTERFRAAVQEAKIGADNDIPHITAPVIVKYVTDLQLLGLL

SEQ ID NO: 61986 - protein, 517 aa, Mycobacterium avium
MFESLSDRLTSALAGLRGKGRLTDADIEATTREIRLALLEADVSLPVVRAFVTRIKERAKGAEVSGALNPAQQVVKIVNEELIGILGGETRQLAFAKTPPTVIMLAGLQGSGKTSLAGKLAAWLRGQGHTPLLVACDLQRPAAVNQLQVVGERAGVPVFAPHPGASPESGPGDPVAVAAQGLAEARAKHHDVVIVDTAGRLGIDDELMAQAAAIRDAIDPDEILFVLDAMIGQDAVTTAEAFREGVGFTGVVLTKLDGDARGGAALSVREVTGVPILFASTGEKLEDFDVFHPDRMSSRILGMGDVLSLIEQAEQVFDAEQAEAAAVKIGSGELTLEDFLEQMLAIRKMGPIGNLLGMLPGAGQMKDALAAVDDKQLDRLQAIIRGMTPEERADPKIINASRRLRIANGSGVTVSEVNQLVDRFFEARKMMSSMLGGMGIPGLGRKSATRKAKGAKGKAKKGKKGARGPTPPKVRSPLGPGMPAGYPDLSQLPEGLNELPPGLADFDLSKLKFPGNK

SEQ ID NO: 61987 - protein, 239 aa, Mycobacterium avium
MRIDVVTIFPAYLDPLRQSLPGKAIQSGLVDLRVHDLRRWTHDVHRSVDDAPYGGGPGMVMKAPVWGEALDEIASAETLLVVPTPAGALFDQATAARWSAERHLVFACGRYEGIDQRVVEDAARRMRVEEVSIGDYVLPGGESAAVVMIEAVLRLLDGVLGNPASRHDDSHSPALDRRLEGPSYTRPPSWRGLDVPEVLLSGDHARIAAWRREVSLQRTRERRPELLADPVGPQDGPGL

SEQ ID NO: 61988 - protein, 175 aa, Mycobacterium avium
MELTVGRVVKAHGISGEIVVEIRTDDPAARFAPGNTLRAKPSRGGPERSCVIESAREHGGRLLVRLAGVTDRDAADALRGTLFVVDSAELPDIDEPDTYYDHQLEGLQVRTTGGQRVGAVAEVLHTAAGELLAVRDDADGAPREVLVPFVSAIVTAVSLDDGLIEIDPPDGLLDL

SEQ ID NO: 61989 - protein, 80 aa, Mycobacterium avium
MSTVVVDAVEHLVRGIVDNPDDVRVDMVTSRRGRTVEVHVHPDDLGKVIGRGGRTATALRTLVAGIGGRGIRVDVVDTDQ

SEQ ID NO: 61990 - protein, 423 aa, Mycobacterium avium
MLLSAGPTTVATIEALDRTGLWGRLLPEWDAIRDLPPRDVAHKWTVDRHVIETTVNAAPLATRVARPDLLALGALLHDIGKGRGVDHSVLGAGLALEIGPRLGMAPADVELLAQLVRHHLLLPVAATRSDLNDPKTIERVSKTLGEDPLLLEVLHALTEADSKATGPGVWSDWKASLIDDLVRRCRMVMAGEPLPKVEPAAPQYLSLAADRGVHVQIKPGGGERLDVVMAAPDQRGLVSKAAAVLALNSLRIHSASASTHEGFAVVEFVVSPLFGSPPEAGLLRQQFTGALGGDVDVLGTLEKRDSDAVGAATRRAGEVQVGVPVTRSTAPPRILWVDTAAADQLIVEVRAMDRLGLLALLTRALERAGTDIVWAKVNTFGSTAADAFCVTAGDAGARDAVEQSLLTVLGGPAVEVLEEPVGD

SEQ ID NO: 61991 - protein, 170 aa, Mycobacterium avium
MAVKIKLTRLGKIRNPQYRIAVADARTRRDGRSIEIIGRYHPKEDPSLIEINSERAQYWLSVGAQPTEPVLKLLKITGDWQKFKGLPGAEGRLKVAPPKPSKLELFNAALAEAEGGPTTEAAKPKKKAATSGAKKAAKAAEPEAAAPEAAEPEAAAPAEGGEQAESSTES

SEQ ID NO: 61992 - protein, 147 aa, Mycobacterium avium
MPTYAPKAGDTTRSWYVIDATDVVLGRLAVAAANLLRGKHKPTFAPNVDGGDFVIVVNADKVAFSGQKLDKKLAYRHSGYPGGLRSRTIGELMQKHPDRVVADAIVGMLPKNKLSRQIQRKLRVYAGPEHPHTAQQPIPYEIKQVAQ

SEQ ID NO: 61993 - protein, 166 aa, Mycobacterium avium
MTETTEALENPDNPDAETAAAEVTEAPVEAVPAESYVFERPIQTVGRRKEAVVRVRLVPGTGKFNLNGRTLEGYFPNKVHQQLIKAPLVTVDRVDSFDIYAHLHGGGPSGQAGALRLGIARALILASPDDRPALKKAGFLTRDPRATERKKYGLKKARKAPQYSKR

SEQ ID NO: 61994 - protein, 444 aa, Mycobacterium avium
  MISC_FEATURE (311)..(311): X=any amino acid
  MISC_FEATURE (321)..(321): X=any amino acid
  MISC_FEATURE (325)..(325): X=any amino acid
MGRLFGTDGVRGVANRELTAELALALGAAAARQLASGSAPGRRVAVIGRDPRASGEMLEAAVIAGLTSQGVDALRVGVLPTPAVAYLTGAYDADFGVMISASHNPMPDNGIKIFGPGGHKLDDGTEDRIEALVGDAGPRPVGAGIGRVIDAEDAADRYLRHLSKASTLRLDGLTVVVDCAHGAASSVAPRAYRAAGARVIAINADPNGLNINDNCGSTHLDSLRAAVVAHRADLGLAHDGDADRCLAVDADGNLVDGDHIMVVLALAMREAGELASDTLVTTVMSNLGLHLAMRSAGITVRTTGVGDRYVXEELRAGDYSXGGEXSGHIVMPALGSTGDGIVTGLRLMTRMAQTGSPLSDLASAMQTLPQVLINVTVADKATAATAPSVQTAVGQAAAELGDTGRILLRPSGTEPMIRVMVEAPEKDIAQRLATRVAEAVSAAR

SEQ ID NO: 61995 - protein, 480 aa, Mycobacterium avium
MPDAAQDAELLTAAAVALNKHAPMLRELGSAFDAAGHQLYLVGGSVRDALLGRLSPDLDFTTDARPDQVQQILRRWADNLWDTGIEFGTVGVGKGDRRLEITTFRADTYDQVSRNPQVRFGNRLEDDLVRRDFTTNAMAVRITPDGPGEFLDPLGGLAALRQRVLDTPATPEESFGDDPLRMLRAARFVSQLGFTVAPRVREAIERMAPQLARISAERVAAELDKLVLGDDPVAGIDLLVHSGMGEVVLPEIGGMQMAIDEHHQHKDVYQHSLTVLRQAIALEDDGPDLVLRWAALLHDIGKPATRRHEPNGGVSFHHHEVVGAKMVRKRLRALKYSKQMVDDVSQLVYLHLRFHGYGDGKWTDSAVRRYVTDAGPLLPRLHKLVRADCTTRNKRRAARLQASYDRLEARIAELAAQEDLARVRPDLDGNQIMEILGIPAGPQVGEAWRFLKELRLERGPLDPDEATAELLSWWRSRGNG

SEQ ID NO: 61996 - protein, 435 aa, Mycobacterium avium
MGLQAPFRSGGGTSRPQGRAAPRAVDLRREVHDAARRARVASRVLALLPTVAKDQALRSAADAIAGHAELILSANAEDLETARAAGTPSAMLDRLALDTKRVEGIAAGLRQVAGLPDPVGEVLRGYTLPNGLQLRQQRVPLGVVGMIYEGRPNVTVDAFGLALKSGNAVLLRGSSSATRSNQALVQVLRASLVSEDLPADAVQLLSADDRATVTHLIQARGLVDVVIPRGGANLINAVVRDAQVPTIETGVGNCHVYVHEGADLEVAERVLLNSKTRRPSVCNAAETLLVDAAIAEEALPRLVTALQDAGVTVHGGFARDATEDDLRREYLSMDIAVAVVDGVDAAIAHINEYGTGHTEAIVTTNMAAAQRFTDGVDAAAVMVNASTAFTDGEQFGFGAEIGISTQKLHARGPMGLPELTSTKWIAWGDGQTRPA

SEQ ID NO: 61997 - protein, 270 aa, Mycobacterium avium
MGIVQQRSDKAGPVTAAAGVPLHRQLFLVLHDEIDRGVIAPGEALPTEQTLCDQFGVSRITVRRALADLAAQGYIERRQGVGSFVRQHDPADVPTGRSYLQGLRQTQFETEAEVVELGVRSAPRAVAEALGRSGELLHIVRVRRQRRTREPLMVTDAWLPPELAPVLTERALRRAPLYELLSANGVAVDRVRHEITAEIAGPRNAQLLDVPIGAALLRVNRLVYVGDRPHHHVSALLSPSRSRVLLSQSADDMETGDGLRIAHDVGGPRG

SEQ ID NO: 61998 - protein, 501 aa, Mycobacterium avium
MTDTTISNGVTEQLVHFDLVIGGESVAAESGRTYDSIDPYTALPWARVPDCGPADVDRAVAAARAALRGPWGQLTGTARGKLLWRLGELIAREAESLAELEVRDGGKLVREMIGQMKALPDYYIYYAGLADKLQGEVVPVDKPNFFVYTRHEPVGVVGAITPWNSPLLLLTWKLAAGLAAGCTFVVKPSDHTPASTLAFAKLFAEAGFPPGVINVVTGWGPQTGAALAAHPDVDKIAFTGSTATGISVGKAAIDNMTRFTLELGGKSAQVVFDDADLDAAANGVIAGVFAATGQTCLAGSRLLVHESVADALVERIVARASTIKLGDPKDPATEMGPVSNQPQYEKVLSHFASAREQGATVAYGGEPAGELGGFFVKPTVLTGVDRSMRAVAEEVFGPVLAVMTFTDEDEAIAAANDTEFGLAAGVWTKDVHRAHRVAARLNAGTVWVNAYRVVSPHVPFGGMGHSGIGRENGIDAVKDFTETKAVWVELSGATRDPFTLG

SEQ ID NO: 61999 - protein, 239 aa, Mycobacterium avium
MWLASGSGYVTEICAGSGIDWVLLDSEHAPNDLRTILEQLQVLSGYPDVDVLVRPPSADPVFIKRLLDVGAQNLIVPMIDDAGEAARAVAATRYPPEGIRGVGSALARASRWNRISDYLATADASVSLTVQVESLAGMEHLGDIAEVDGVDAVFIGPADLAASMGRLGQPEHPDVVNTIETALAAIVELGKSAGVNAFNKAIAQRYLAAGASFVLVGADVALLARGAEKLVDEYKEMRS

SEQ ID NO: 62000 - protein, 628 aa, Mycobacterium avium
MTHYTPLLVALPLAGAAILLFGGRRTDRWGHWLGCATAVAAFVVGVGLLDELLGRPADQRAIHERVFSWIPVGQLQVDLGLQIDQLSVCFVLLITGVGSLIHIYSVAYMAEDADRRRFFGYLNLFLASMLLLVIADNYVVLYVGWEGVGLASYLLIGFWYHKPTAATAAKKAFVMNRVGDAGLALGMFLMFSTFGTLSYAGVFAGAPAAGRGALTAMGLLLLLGACAKSAQVPLQAWLGDAMEGPTPVSALIHAATMVTAGVYLIVRSNPLYNLSPDAQLAVVIVGAVTLLLGAFIGCAKDDIKRALAASTMSQIGYMVLAAGLGPAGYAFAIMHLLTHGFFKAGLFLGSGAVIHAMHEEQDMRRYGGLRAALPVTFVTFGLGYLAIIGVPPFAGFFSKDAIIEAALAAGGVRGYLLGGAALLGAGVTAFYMTRVMLMTFFGEKRWAPGSHPHEAPGLMTWPMILLAVGSVFSGGLFAVGGTLQRWLEPVVGRHEEVTHAVPVWISTALALGVVAVGIAVAYRLYATAPIPRVAPLSVSPLTTAVRNDFYGDAFNEEVFMRPGAQLTHALVEVDDAGVDGSVNALAALVSATSNRLRGLQTGFARNYALSMLTGAVLVIALILAVRLW

SEQ ID NO: 62001 - protein, 626 aa, Mycobacterium avium
MTTPQHLSDRYELGEILGFGGMSEVHLARDVRLHRDVAVKVLRADLARDPSFYLRFRREAQNAAALNHPSIVAVYDTGEAETPSGPLPYIVMEYVDGVTLRDIVHTDGPLPPRRAIEIIADACQALNFSHQNGIIHRDVKPANIMISTTNAVKVMDFGIARAIADSGNSVTQTAAVIGTAQYLSPEQARGDAVDARSDVYSLGCVLYEILTGEPPFTGDSPVAVAYQHVREDPVPPSQRHEGISADLDAVVLKALAKNPDNRYQTAAEMRADLVRVHNGEKPEAPKVLTDAERSSLLSSGAGAAGPSRTDPLPRQVLADSGEDRTVGSVGRWIVAVAALAVLTIIVVIAFNTFGGGARDVQVPDVRGQVSADAIAALQNRGFKTRTLQKPDSAIPPDHVIGTDPGANASVSAGDEITINVSTGPEQREVPDVSSLSYSDAVTKLKAAGFSKFKQANSPSTPELLGKVIGTNPPANQTSAITNVITLIVGSGPETKQVPDIAGQTVDIAQKNLTVYGFTKITQVQVDSPRPAGEVIGTNPPKGQTVPVDSVIELQVSKGNQFIMPDLSGMFWTDAEPRLRALGWTGILDKGPDVDAGGAQSHRVVYQNPPAGAGVNRDGIITLKFGQ

SEQ ID NO: 62002 - protein, 444 aa, Mycobacterium avium
MNDPVVTGLLTDKYELTMLAAALRDGSAGRRTTFELFARRLPEGRRYGVVGGTGRLLEALPQFTFGDEACQSLRQFLDPDTLRYLRDFRFGGDIDGYAEGELYFPGSPVLSVTGTFAECVVLETLALSIFNHDTAIASAAARMVSAARGRPLIEMGSRRTHEQAAVAAARAAYIAGFAASSNLEAQRCYGIPAEGTSAHAFTMLHARTDAAAESTELAAFRAQVQALGVDTTLLVDTYDVTTGVANAVTAAGTGLGAVRIDSGELGVLARQVREQLDRLGATRTRIVVSGDLDEFSIAALAAEPVDSYGVGTSVVTGSGAPTANMVYKLVEVDGLPVQKRSSHKESRGGRKEALRLSRDTGIITEELVYPAGHRPDVAEPARAVTVPLVRGGELVSKPNLAAARELVASGLRSLPWEGLNLSHGEPAIPTTQIPADRRRPPGID

SEQ ID NO: 62003 - protein, 130 aa, Mycobacterium avium
MSTPVPRKRRRRPALIALVIIAACGCLALGWWQWTRFQSVSGSFQNLGYALQWPLFAWFCVYAYRKFVRYEEEPPRPRDTAAVTEIPAGLLPERPRPTPRPPDDPALREYNRYLAELAAQDAAQQDRTTT

SEQ ID NO: 62004 - protein, 275 aa, Mycobacterium avium
MSSALAPVGIFDSGVGGLTVARAIIDQLPDEHIIYVGDTGHGPYGPLSIPEVRAHALAIGDDLVGRGVKALVIACNTASAACLRDARERYEVPVVEVILPAVRRAVATTRNGRIGVIGTQATINSHAYQDAFAAARDTEITAVACPRFVDFVERGVTSGRQVLGLAEGYLEPLQRAQVDTLVLGCTHYPLLSGLIQLAMGDNVTLVSSAEETAKEVLRVLTERDLLHPHPDDPRAAGPSRVFEATGDPEAFTRLAARFLGPAVSGVRPVHHVRID

SEQ ID NO: 62005 - protein, 266 aa, Mycobacterium avium
MIFGRRAPPAGGQFKGGVVQVSLLSGQTAVITGGAQGLGFAIAERFVAEGARVVLGDVNLEATQTAAKQLGGDQVALAVRCDVTKSSEVETLIQTAVERFGGLDIMVNNAGITRDATMRKMTEEQFDQVIAVHLKGTWNGTRLAAAIMRENKRGAIINMSSVSGKVGMVGQTNYSAAKAGIVGMTKAAAKELAYLGVRVNAIAPGLIRSAMTEAMPQRIWDSKVAEVPMGRAGEPSEVASVALFLASDMSSYMTGTVMEITGGRHL

SEQ ID NO: 62006 - protein, 204 aa, Mycobacterium avium
MSPLLVASRNRKKLAELRRVLDAAGVTGLTLVSLDDVAPFEEAPETGAVFEENALAKARDAFDATGLASVADDSGLEVAALNGMPGVLSARWSGRHGDDAANTALLLAQLRDVPDERRAASFVSACALVSASGEVVVRGEWPGRIACEPRGDGGFGYDPVFVPDDAGGRTAAQLSPAEKDAVSHRGRALRLLVPALETLARARG

SEQ ID NO: 62007 - protein, 393 aa, Mycobacterium avium
MTTSVIVAGARTPIGKLMGSLKDFSASDLGAIAIAGALEKANVPADLVEYVIMGQVLTAGAGQMPARQAAVAAGIGWDVPALSINKMCLSGIDAIALADQLIRAGEFDVVVAGGQESMTKAPHLLMDSRAGYKYGDVTVLDHMAYDGLHDVFTDQPMGALTEQRNDVDKFTREEQDQYAARSHQRAAAAWKDGVFTDEVVPVNIPQRKGDPLQFTEDEGIRANTTAESLAGLKPAFRKDGTITAGSASQISDGAAAVVVMSKAKAQQLGLSWLAEIGAHGVVAGPDSTLQSQPANAIKKALGREGISVDQLDVVEINEAFAAVALASTRELGVNPDIVNVNGGAIAVGHPIGMSGARITLHAALELSRRGSGYAVAALCGAGGQGDALILRAG

SEQ ID NO: 62008 - protein, 150 aa, Mycobacterium avium
MDSTGRNLVYFSSVSENTHRFVQKLGIPAIRIPLHGRIEVDHPYVLLLPTYGGGRATPDLNAGGYVPKQVIAFLNNEHNRSLIRGVIAAGNNNFGAEFAYAGNVVSRKCGVPYLYRFELMGTQDDVDAVRAGLAEFWKEQTCHQPSLQSL

SEQ ID NO: 62009 - protein, 721 aa, Mycobacterium avium
MSPTVAAEPVTAGAHGLPDETDYHALNAMLNLYDADGKIQFDKDVLAARQYFLQHVNQNTVFFHNQDEKLDYLIRENYYEREVLDQYSRNFVKALLDRAYAKKFRFPTFLGAFKYYTSYTLKTFDGKRYLERFEDRVVMVALTLAAGDTGLAEKLVDEIIEGRFQPATPTFLNSGKKQRGEPVSCFLLRIEDNMESIGRSINSALQLSKRGGGVALLLTNIREHGAPIKNIENQSSGVIPIMKLLEDSFSYANQLGARQGAGAVYLHAHHPDIYRFLDTKRENADEKIRIKTLSLGVVIPDITFELAKKNEDMYLFSPYDVERVYGLPFADISVTEKYYEMVDDARIRKTKIKAREFFQTLAELQFESGYPYIMFEDTVNRANPIDGKITHSNLCSEILQVSTPSLFNDDLSYAKVGKDISCNLGSLNIAKTMDSPDFAQTIEVAIRALTAVSDQTHITSVPSIEQGNNDSHAIGLGQMNLHGYLAREGIFYGSEEGIDFTNIYFYTVLYHALRASNRIAIERGTHFKGFERSKYASGEFFDKYTEQVWEPATEKVRQLFADAGIRIPTQDDWKRLKESVQAHGIYNQNLQAVPPTGSISYINHSTSSIHPIVSKVEIRKEGKIGRVYYPAPYMTNDNLEYYQDAYEIGYEKIIDTYAAATQHVDQGLSLTLFFKDTATTRDVNKAQIYAWRKGIKTLYYIRLRQMALEGTEVEGCVSCML

SEQ ID NO: 62010 - protein, 324 aa, Mycobacterium avium
MSENMKLIDRLSAINWNRLQDDKDAEVWDRLTGNFWLPEKVPVSNDLQSWATLTAHEKQMTMRVFTGLTLLDTIQGTVGAVSLIPDALTPHEEAVYTNIAFMESVHARSYSNIFSTLCSTAEIDDAFRWSEENPNLQRKAEIVMQYYKGDEPLKRKVASTLLESFLFYSGFYLPMYWSSRAKLTNTADMIRLIIRDEAVHGYYIGYKYQRGLALVDDAKRQELKDYTYELLFELYDNEVEYTQDLYDEVGLTEDVKKFLRYNANKALMNLGYEALFPRDETDVNPAILSALSPNADENHDFFSGSGSSYVIGKAVVTEDEDWDF

SEQ ID NO: 62011 - protein, 346 aa, Mycobacterium avium
MSTVSAYAATSATEPLTKTTIERRDPGPRDVAIDIKFAGICHSDIHTAKGEWGHTNYPVVVGHEIAGVVTEVGAEVTKYKVGDHVGVGCMVNSCRQCSSCTAGLEQYCKRGATFTYNSIDRDGSVTQGGYSQAIVVDEDFVVRIPDSLPLDKAAPLLCAGITLFSPLRHWKAGPGTRLAIVGLGGLGHMGVKLGAAMGAEVTVLSQSLKKMEDGLRLGAKHYHATADPDTFTKLRGSFDLMLNTVSANLKLNDYLSLLDVDGTLVELGIPEHPMEVGAFPLALARRSLSGSNIGGIAETQEMLDFCAEHNVTPEIELIEPDYINEAYERVLASDVRYRFVIDISKL

SEQ ID NO: 62012 - protein, 485 aa, Mycobacterium avium
MATSPQAKLAAVIKSARDYMRKDAGLNGDLDRIPQLAWLLFLKAFDGLEENREITEENFRPAIEAPYRWRDWAADPNGRTGDALLTFVNNELLPYLRGLSGTGSHDPRDVLAAVFKETYNRMLSGYLLRDVVNKVNEINFASSDDIHTMAHLYESMLREMRDAAGDSGEFYTPRPIIRFIVQQVDPRLGEVILDPACGTGGFLVEALEHLSPKVTTTAQLRALHENLRGIEKKPLPFLLGMMNLVLHGVGQPNITRGNALAESITQISKARRVDVILTNPPFGGEEEKSIQANFPADKQTAETAWLFLQLVIRMLKDGGRCGIVVPNGLLFGGGVGARIKKQLLTECNLHTIVRLPDGAFAPYTDIPSNLLFFDKTGRTKEIWYYEISPPEGRKKYSKSKPMRFEEFADCQVWWSNRVENERAWRVPIADIEANDMYNLDLRNPNRGDDLAHRPPAELLAELIDTERSILALLDGLQREVTGEGP

SEQ ID NO: 62013 - protein, 322 aa, Mycobacterium avium
MDQIMTGEASPAQIAAFAVAMQVKVPTSAEVIELAEVMLNHALPFPAGAIRDDTVDIVGTGGDGVNTVNLSTMAAIVAAAAGVPVVKHGNRAASSLSGGADTLEELGVRIDLGPEQVARSVAEVGIGFCFAPLFHPSYRHTSAVRREIGVPTVFNLLGPLTNPARPRAGLIGCAFAELAEVMAGVFAARRSSVLVVHGDDGLDELTTTTTSTIWRVQAGTVDRLTFDPAGFGFPRAELDDLLGGDAQTNAAEVRAVLAGGQGPVRDAVVLNAAGAIVAHAGLSSRAEWLPAWEDGLARASAAIDSGAAEQLLARWVRFGQQL

SEQ ID NO: 62014 - protein, 351 aa, Mycobacterium avium
MTQLADRPTGHGETLTAAVQDVALGAQALTMVQALNRALHDAMAADERVLVFGEDVAVQGGVFRVTEGLAEAFGESRCFDTPLAESAIIGIAVGLALRGFVPVPEIQFDGFSYPAFDQVVSHLAKYRTRTRGAIDMPVTVRVPSFGGIGAAEHHSESTESYWAHTAGLKVVVPSNPADAYWLLRHAIACPDPVMYLEPKRRYQGRGLVDAGRPEPPIGRAMVRRAGTDVTVVTYGSLVATAVGAAEEAQHQRGWSLEVIDLRSLVPLDFDTIATSIHRTGRCVVMHEGPRTLGYGAELAARIQEELFYELEAPVLRACGFDTPYPPARLEKWWLPGPDRLLDCVERTLELP

SEQ ID NO: 62015 - protein, 388 aa, Mycobacterium avium
MSDERVKPFLVPDLGEGLEEVTVTHWNVAVGDDVELNQVLCTVETAKAEVELPSPYAGRIVEMNGAEGDVLKVGAVLVRLDTAPESAEPPAAETAPTLVGYGADAGIDTSRRTARPLAAPPVRKLAKELMVDLGSLRPRSGAVITREDVLSAAHGTGNGAEVRPVQGVQARMADKMTLSHKEIPAATVSVQVDCTALVRLSERLGPAEQRITPFVLTLRLLVIALRRNEIMNSTWVDTPQGPQVRIEHRVHLGVAVATERGLLVPVIADAHTKTTRELASRAAELISGARAGSLTPGELRGSTFTVSNFGALGVDDGVPVINHPEAAILGMGAIKPRPVAVGTEVVVRPTMSLSAVFDHRIADGAQAARFVCELRDLIESPETALLDL

SEQ ID NO: 62016 - protein, 711 aa, Mycobacterium avium
MGRWDHRPGRHQNLCRACSFGVRAGAVGARRLRRLPDVSAVFETVLVANRGEIAVRVIRTLRRLGIRSVAVYSDPDAAARHVLEADEAVRLGPAAARDSYLNIDKVVETATRTGAQAIHPGYGFLSENADFAAACERAGVVFLGPPARAIQVMGDKITAKNAVAEFDVPVVPGVAEPGLGDDELVAAADEIGYPVLIKPSAGGGGKGMRLVEEPGRLREALVGARREAASSFGDDTLFLERFVLRPRHIEVQILADTHGNVVHLGERECSLQRRHQKVIEEAPSPLLDPETRARIGAAACNTARSVDYVGAGTVEFIVSADRPDEFFFMEMNTRLQVEHPVTEAVTGLDLVEWQLRVAAGEKLVFAQDDIELRGHAIEARVYAEDPARGFLPTGGRVLGVFEPSGDGVRVDSSLLPGTVVGSDYDPMLSKVIAHGADRDEALARLDRALSHTAILGVQTNVEFLRFLLADERVRAGDLDTALLDARLADFTPLPAPDDVLAAAGLYRQSALAARARRFAGNPWAAPTGWRAGGSPAPVRTDMRTALRTETVSVWGPPEAAEVQVGAGERLAASAHLGPDRISVTLDGRRRDYRWAEADRHLWIADERGTWHLREAEQTTIHRAAGPQRAEILSPMPGSVIAVQTPSGSDVSEGDVVVVVEAMKMEHSLAAPVSGRVEVLVCVGDQVSVDQVLARVVPEESDPPADSSKDET

SEQ ID NO: 62017 - protein, 355 aa, Mycobacterium avium
MTVDLQPVQLVAADGTPTSEHRYSRELPAETLSWLYEMMVLTRELDGEFVNLKRQGQLALFASCRGQEAAQVGATACLRKTDWLFPQYRELGAFLVRGIPPGNVGAVWRGTWHGGLGFTDKCCAPLSIPIGTQTLHAVGAAMAAQRLGEDSVTIAFLGDGATSVGDVHEALNFAAVFRTPCVFFVQNNQWAISLPVAKQTASPSLAHKAIGYGMPGIRVDGNDVLACYAVTAEAAARARAGGGPTLIEAITYRLGPHTTSDDPTRYRTQDEVDHWAALDPIPRYRSYLQGQGLWSERLEERVIGRATRMRAELRDAVFDAPDLDVDEVFTAVYAEITPELQAQRRALRTELEKSD

SEQ ID NO: 62018 - protein, 259 aa, Mycobacterium avium
MTDSGVFPVGTFTPNPRPSAVPKMLAAQYGLELKLLLRNGEQLLLTMFIPITLLVGLTLLPLGSFGQHRAATFTPVIMALAVISTAFTGQAIAVAFDRRYGALKRLGATPLPVWGIIAGKSLAVVTVVFLQAILLGAIGFALGWRPALAALALGAAVIALGTAVFAALGLLLGGTLRAEIVLALANLMWFVFAGLGALTVDSGVIPAGVKWAARLTPSGALTEALSRAMTLSADWFGMAVLVAWGALGALGALRWFRFT

SEQ ID NO: 62019 - protein, 154 aa, Mycobacterium avium
MYQDVILDHYKHPQHRGLREPFGAEVFHVNPVCGDEVTLRVTLSDDGETVADVSYDGQGCSISQAATSVLTEQVIGRSVEEALDTIGAFAEMVSSRGAVEGDEDVLGDGIAFAGVAKYPARVKCALLGWMACKDALAQAYSRREVTDERNHRAG

SEQ ID NO: 62020 - protein, 260 aa, Mycobacterium avium
MTTLEIKDLHVSVVNPNAAESEREIPILNGVDLTVKSGETHALMGPNGSGKSTLSYAIAGHPKYTVTSGSITLDGQDVLAMSIDERARAGIFLAMQYPVEVPGVSVSNFLRSAATAVRGEAPKLRHWVKEVKAAMGALEIDPAFAERNVNEGFSGGEKKRHEILQLELLKPKIAILDETDSGLDVDALRVVSEGVNRYAQAEHGGILLITHYTRILRYIHPEYVHVFVGGRIAESGGSELADELEQNGYVRFTQAAAAGA

SEQ ID NO: 62021 - protein, 255 aa, Mycobacterium avium
PDVHDAGTVTLLQTLRAAIGVPVGSGLMRGTINVVLPVPGDVRGLAPGTQFEQDALAAGEAVIVSNPHQPGAAVGLVPEFCYADDDDGSQDYALTELCALSWTVYSLPGAPVLDHHELGDAEYTLRSAVRSAAETLGAIGLGSAASDVDDPRGLVEQLLESARQHRIPDHAPSRALRVLENAAHVDAIIAVSAGLSRSDSPDRFAAPIAAGLEPLGTQSSSEARIAGDALRPLTAVVRSARMAAVTAILHSAWGD

SEQ ID NO: 62022 - protein, 269 aa, Mycobacterium avium
MAGLLDGKRILVTGIITDSSIAFHIAKVAQEAGAQLVLTGFDRLRLIQRIVDRLPEKAPLIELDVQNEEHLNTLAQRVTAEIGEGNKLDGVVHSIGFMPQTGMGINPFFDAPYEDVSKGIHISAYSYASLAKALLPIMNPGGSIVGMDFDPSRAMPAYNWMTVAKSALESVNRFVAREAGPHGVRSNLVAAGPIRTLAMAGIVGGVLGDQAAEQIRLLEEGWDQRAPIGWNMKDPTPVAKTVCALLSDWLPATTGTIIYADGGASTQLL

SEQ ID NO: 62023 - protein, 255 aa, Mycobacterium avium
MTDTATENTTESAADFGRPAFVSRSVLVTGGNRGIGLAIAQRLAADGHKVAVTHRGSGAPDGLFGVECDVTDNDAVDRAFTEVEEHQGPVEVLVSNAGISKDAFLIRMTEERFTEVINANLTGAFRVTQRAARSMQKKRFGRIIYIGSVSGMWGIGNQSNYAAAKAGLIGMARSISRELSKAGVTANVVAPGYIDTEMTRALDERIQAGALEFIPAKRVGTAAEVAGAVSFLASEDASYIAGAVIPVDGGMGMGH

SEQ ID NO: 62024 - protein, 610 aa, Mycobacterium avium
MGNALTRLLGRGKDTTKTAEPADDDGAAADTGAVPDGAPEADDEQDQQVTDEPTKASQKASKKASTKASKKESKKAPKDKPKDGSSHSRFGAWLSRPMTSFHLIIAIAGLLTTLGLIMVLSASGVRSYDADGSAWVIFGKQVLWTVIGLIACYASLRMSVRFIRRVAFTGYVVTVILLVLVLVPGIGNLANGSRKWFVVAGFSMQPSELAKIAFAIWGAHMLAARRLDRASLRELLIPLVPAAVIALALIVAQPDLGQTVSLGIILLALLWYAGLPLRVFITSLLAVFMAGAVLAMSAGYRSDRVRSWMNPENDPQDTGYQARQAKFALAHGGIFGDGLGQGVAKWNYLPNAHNDFIFAIIGEELGFIGAFGLLVLFGLFAYTGMRIARRSADPFLRLLTATTTMWVLGQAFINIGYVIGILPVTGIQLPLISAGGTSTAATLFMIGIMANAARHEPEAVAALRAGRDDKVNRLLRLPLPEPYSPTRLEAFRDRKRTGPQQAPKSAPKSRPAPRKGAKPAGRKPTRNAGRNATRNAGFHADAPLPPPLPRTAGRAGRQSGGNTRARARHHGSGQRYASLGANSGANPAASSRAGQRQPRRARALEGQRYG

SEQ ID NO: 62025 - protein, 408 aa, Mycobacterium avium
MNDTVKKPTGGRGDDPLPAGAALSAVAPHEPVSVVLAGGGTAGHVEPAMAVADALKALDPNVRITSLGTARGLETRLVPERGYDLELITPVPLPRKPTGDLARLPSRVWRAVRETRAVLHAVDADVVIGFGGYVALPAYLAARGVSPRKPRVPVVIHEANASAGLANRVGARTAQRVLSAVADCGLPGAEVVGVPVREAITSLDRAAVRAEARRHFGFTDDARVLMVFGGSQGAASLNRAVSGAAAQLAAAGVSVLHAHGPKNTLDLREPQPGDPPYVAVPYLDRMDLAYAAADLVICRSGAMTVAEVSAVGLPAIYVPLPIGNGEQRLNALPVVNAGGGMVVADADLTPELVAREVAGLVGDPPRLAAMTTAAARVGHPDAARRVAQAALDIGRTARRARGATGGRP

SEQ ID NO: 62026 - protein, 574 aa, Mycobacterium avium
  MISC_FEATURE (199)..(199): X=any amino acid
  MISC_FEATURE (310)..(310): X=any amino acid
  MISC_FEATURE (349)..(349): X=any amino acid
MTADVLPERVFDAGPLRPFADAGIFEAADIHVAQRLTALTGESDDRVALAVALLVRALRGGSVCVDLRAVPAQVGAADLPWPAAGDWLAAVRASPLLGPPPVLRFFGDLLYFDRYWLEEEQVCTDLLALSAPAGDVESSCYERLFPPGYEEQRAAARIAVSQALTVLTGGPGTGKTTTVARLLALLVEQAERAGEPRPXIALAAPTGKAAARLAEAVAAEIEHLDPADRARLAGLTGTTLHRLLGPRPDTSVRFKHNRGNRLPHDIIVVDETSMVSLTMMARLAEAVRPDTRLILVGDPDQLASVEAGAXLADLVDGLAGRAGVRVAALATPHRFGSAIGALAAAIRAXDADRVVELLAAGGEHIEWVDSERPADRLREVLVSHALRLRSAALLGAAQAALATLDEHRLLCAHRDGPHGAVRWNTLVHNWIAEETGQPAWSQWYAGRPLLVTANDYGLRLYNGDTGVTVAGADGLRAVIAGAAGPLDFATSRLGEVETMHAMTIHKSQGSQADEVTVLIPPEDSRLLTRELFYTAVTRAKSRVRVVGPEASVRAAIERRAIRATGLRQRLRVVG

SEQ ID NO: 62027 - protein, 405 aa, Mycobacterium avium
  MISC_FEATURE (358)..(358): X=any amino acid
MDYGAFPPEFNSARIYSGPGSGSLVAAASAWSSLAAELNAAALSYDKVVTALASEEWLGSASASMASAVAPYVGWMSTTAAQAEEAASQARAAAAAYEAALAASVPPPLIAANRMQVSQLQATNVLGQNTPLIAQLEAQYGEYWAQDAAAMYSYAGQSASASKVTPFQKAPQVTNPSGQAAQSAAVSTATANSTSTNTTKALQSLAQPASSSTTATKAATTAASTTSTDPLSEIWFLLTGQTTLPTSLGSAVNGYSPFASLFYNTEGLPYFSTGMANTFTQIAKSVGAIGGAAPAAAKALPGLGGLGGMLGGGAAAAHPVAALGGAGSIGGKLSVPVAWSGAPATPALGHAIPVSSIXAAPEAAGGPGNLLGGMPLAGAGAGGHGAAGPKYGFRPTVMARPPFAG

SEQ ID NO: 62028 - protein, 260 aa, Mycobacterium avium
MLGKPIAHSKSPQLHLAAYRALGLHDWTYERIECDADQLPGVVGGFGPEWVGVSVTMPGKFAALRFADERTERARRVGSANTLVRTATGWRADNTDIDGVAGALGAASGWALVCGSGGTAPAAVAGLAQLGVAGITVVARNPDKAARLVRLGDELGVPTRFCALDGAGLADEVAAAEVLVSTLPAEVAERYAGTLARVGVLLDAVYDPWPTPLAAAVSAAGGRVISGMQMLLHQAFAQVEQFTGLPAPREAMTCAAADAD

SEQ ID NO: 62029 - protein, 104 aa, Mycobacterium avium
MRGDPHGRHCCHRIPARSTTLTSVGIIGYIIIGGLAGALASKIVRGSGAGILMDIVIGIVGALIGGFILSFFVNTAGGGLIFTFFTALLGSVILLWIVGMVRRT

SEQ ID NO: 62030 - protein, 1014 aa, Mycobacterium avium
MSPTAPAGDEVEMRRIADFVVRWPWLVIGFWAALAVALPLAFPSLAEMAQKHPLAILPGNAPSNVAARQMTEAFHESGSDDLLLVALTDEKGLGPADEAVYRRLVDALRRDTRDVVMVQDFISAPPLRSAVTSKDRKAWVLPVGIAGELGTPQSYAAFNRIAGIVKQTLEKHENGPAATSLTVSLTGPAATVADLTVAGERDRLPIELAIAVLVLVVLLVVYRSAVTMLLPLVTILLSLVIAQAAVAGYSQLTGSGVSNQSIVFLSAIMAGAGTDYAVFLISRYHDFLRRGDDFDQAVRKALISIGKVITASASTVGITFLLIGFARMGVFKTVGISSAIGIGVAFLAAVTLLPAIMVLAGPRGWIRPRRELTTGLWRRSGIRIVRRPRAHLVASVLVLIILASCAGLVRYNYDDRKALRPSAPSSVGYAALERHFPVNQSIPEYILIRSPHDLRTPQALADLEQLADRVSQLPNVSVVSGITRPTGNVPEQFRATYQAGAIGSMLAGGSTMINDQTDDLNRLARGAGTLADNLGDVRGQVNQLAASVRELENAFSSTKNQYSGDALVNQVDIAARLVDHVNSLSNAMGWNFTAAKNMFAWIGPVLAALQGNPVCDADSSCSATRATFEQLVGPRGQADLDAIDDLSHQLQAYPDKRALKASTDRLRNAFAKLNDVLRAMGMDRPGGLQSNLTTLQNGADQFAGGSRQVADAVAQLVDKVKQLGAGLSESAAFLLSLKHDAAHPAMAGFNIPAQLLRLPQFQEAAKVFISPDGHSVRYLVQSKLSPFSTQAMDQVDAITATARGAQPNTALADAEVSMAGYTVGLKDTRDYYQHDIKFIIAVTLLVVLLTLMALLRAIVAPLYLVATVVISYLSAVGVGVLVFQFLLGQQLHWSVPPLAFVVLVAVGADYNMLLVSRMRDESPHSMRYGIIRTLSSTGGVITAAGLIFAASMSGLLFSSIGTVVQGGVVIGVGILLDTFLVRTVTVPAIAALAGRANWWPSRIAVRRNPVSGQP

SEQ ID NO: 62031 - protein, 216 aa, Mycobacterium avium
MGGREMGYMGPGLPGQRSVASAADREFVEDVWGVPRGRLRTEVGTGTIDMFSRMADGQIKACWIICTNPVASVANRKTVLAGLERAELVIAQDAYLGTETSEYADVLLPAALWAETEGVMVNSERNITLSQPAVAAPGGAMPDWQIIARIACEMGFSEAFSYSCAEEVFEEIKRFWNPTTGYDLRGVSYERLPGQHAAMAAPAAEHGRPQPDPLPQ

SEQ ID NO: 62032 - protein, 432 aa, Mycobacterium avium
MPAIVLIGAQWGDEGKGKATDLLGGRVQWVVRYQGGNNAGHTVVLPTGENFALHLIPSGVLTPGVTNVIGNGVVVDPGVLLDELKGLEDRGVDTSRLLISADAHLLLPYHVAIDKVTERYMGNKKIGTTGRGIGPCYQDKIARIGIRVADVLDREVLTHKIEAALELKNQILVKIYNRKALDPHQVVECLLEQAEGFRHRIADTRLLLNTALEAGETVLLEGSQGTLLDVDHGTYPYVTSSNPTAGGAAVGSGIGPTRITAVLGILKAYTTRVGSGPFPTELFDENGEYLSKTGGEFGVTTGRRRRCGWFDAVVARYATRVNGITDFFLTKLDVLSSLETVPVCVGYRIDGARINEMPMTQSDLHRAEPIYEELPGWWEDISAAREFDDLPAKARDYVLRLEELAGAHVSCIGVGPGREQTIVRRDILAARP

SEQ ID NO: 62033 - protein, 328 aa, Mycobacterium avium
MRIITVEEHFQHPEVSARVAELTGPAVEGLAEFGNAFSLDPDSTARLGGNRLAHMDQVGIDVQVVSHGNGSPGTLQHPEAVELCRRVNNDLAAQIAENPDRFRGFATLPLYDPAAAAEELRRCVGDLGFVGALIAGSYDGLFLDDERFDPILTAAEAVDFPIYVHPGLPEAPVSQRYYAGSWPASVHMMFSGPAFGWHAEAGIHIVRLILSGALDRHPTLKLLSGHWGELAAFYLERLDETLGLLPTGLERAPSDYYRQQVWITPSGMYNQNQLNFMTAELGAQRIIYSEDFPYVVRDNVSTFLEQAGLSEADTHAIAHTNAEALLRI

SEQ ID NO: 62034 - protein, 530 aa, Mycobacterium avium
MAKVASRTATLGAMLCVLAAGCSGHRHTASTGPTGPPVRGGTLTYSDVQFVTDTMAANYSANNLMFQLLDRVVYVDPKTDAVRGWLAKTFSRNQNATRYTFTIRDGVSFSDHTPLTAEVVKANFDQLGKGDPAKKMPAFADFVGYDHSEVSGNVVTVFLDRPNTNFYKVLSYSRAGIRAPATLALDYQRQAKVENVIGSGPFVYQSQIPDQQVVLTRRPDYAWPPSSWPNQGPAYVDKVVFRVIGEPGLRAGAVQSHQVDVARGIQPTDEPALKQGGLQVIPVAAPAETANLVGFRINNQVVDDVRVRRALQLGIDRRAVVDTVLSDSYRAADSVLGHDDPLFADVSADIGYQPQRAAGLLDAAGWKPGGDGVREKDGKKLVLTLAASNQSVVFRPAFEFIEQQWRELGVVLQNRAGDTTFFNASSSQSSTPLFGTRIQYNIGLGLLFGRPKSNLTFAQNDALLALSEEELRQTDPTRLKDVVAREQRRIIDDQLALVLWDEVQVHAAAPNVHVEFTRYTEPLLQSAWKA

SEQ ID NO: 62035 - protein, 992 aa, Mycobacterium avium
MRNATETNLWPAKPPRRPLYPVQVTESPTTSPATGSGAAAPDSDAPPYRYTAALAGRIEGSWQDTWAKLGTFNVPNPVGSLAPTDGTPVPEDKLFVQDMFPYPSGEGLHVGHPLGYIATDVYARYFRMTGRNVLHALGFDAFGLPAEQYAVQTGTHPRTRTEANVVNFRRQLGRLGLGHDSRRSFSTTDVEFYKWTQWIFLQIYNAWFDPAANKARPIAELVAEFDSGARSLDDGRNWSELSAGERADVIDSHRLVYRADSMVNWCPGLGTVLANEEVTADGRSDRGNFPVFRKRLRQWMMRITAYSDRLLDDLDLLDWPEPVKTMQRNWIGRSTGAKALFAATGADGAALDIEVFTTRPDTLFGATYMVLAPEHELVDELVAPAWPDGTDPRWTYGAATPGEAVAAYRRAIASKSDLERQESKAKTGVFLGSYATNPTNGKPVPIFIADYVLAGYGTGAIMAVPGHDQRDWDFAHEFGLPIVEVIAGGDISEGAYAGDGLLVNSGYLDGLDVAAAKEAITARLEAEGRGCARVEFKLRDWLFARQRYWGEPFPIVYDSDGRPHALDEAALPVELPDVPDYSPVLFDPDDADSEPSPPLAKATDWVHVELDLGDGLKPYSRDTNVMPQWAGSSWYELRYTDPHNSERFCAKENEAYWMGPRPAEHGPQDPGGVDLYVGGAEHAVLHLLYARFWHKVLYDLGHVSSREPYRRLVNQGYIQAFAYTDSRGSYVPAEEVVERDGRFFYRGPDGEIEVFQEFGKIGKSLKNSISPDEICDDYGADTLRVYEMSMGPLEASRPWATKDVVGAHRFLQRVWRLVVDEQTGETRVVDGAGRDLPTGTLRLLHRTIAGVSEDYAGLRNNTAVAKLIEYTNHLTKEHRDAVPRAAVEPLVLMLAPLAPHMAEELWLRLGHTTSLAHGPFPVADPAYLVEDTVEYPVQVNGKVRGRVTVAADADRDTLEAAALADEKVLAFLAGAQPRKVIVVPGRLVNLVV

SEQ ID NO: 62036 - protein, 304 aa, Mycobacterium avium
MTDVSEDELAGLSEFALLHENAEQAGVSGPLPEVARVESGSGDAKVSALRWGSTDARIVFVHGGGQNAHTWDTVIVGVGEPALAVDLPGHGHSAWRADGDYSPQLNADALLPMLREHAAGADLVVGMSLGGLTAIRLGAVAPDLVKELVLIDVTPSALQRHSEMTKEQQGTVALMHGEREFDSFQAMLDLTIAAAPHREVKALRRGVFHNSRKLDNGKWTWRYDAIRKFPDFDGLWADVDALSAPVTLVRGGSSGFVSDEDAAELSRRAKHFRTAHVVANSGHSVQSDQPRALIHILRGVLDAR

SEQ ID NO: 62037 - protein, 548 aa, Mycobacterium avium
MTTATPRTPGGGRRAPSGPAPGAHRWDLITRSSAHSQNPWNPLWAMMIGFFMIMVDSTIVAIANPTIMADLHIGYDTVVWVTSAYLLGYAVVLLVAGRLGDRFGTKNLYLIGLAVFTVASVWCGLAGSAAMLIAARVVQGVGAGVMTPQTLSTITRIFPAERRGVAVSVWSATAGAASLAGPLAGGVLVDGLGWQWIFFVNVPIGVLGLVLAYWLVPVLPTQSHRFDLVGVGLSGVGMLLIVFGLQQGQAAHWQPWIWALIVAGVGFVTVFVFWQSVNVREPLIPLVIFSDRDFSLCNIGVAIISFAATAMMLPLTFYAQAVCGLSPTRSALLIAPMAIANGVFAPFVGKIVDRYHPRPVLGFGFSLLAIALTWLTFEMSPATPIWRLVLPFFAMGVGMAFVWSPLTATATRNLSAQLAGAGSAVYNSVRQLGAVLGSAGMAAFMTWRIGAEMPGQPGGGGEDSAGPVLPEFLRGPFAAAMSQSVLLPAFIALFGIVAALFLVGFRPWAHRDGGTDAFGPDDYGGDYHDDYDDDDAYVELILVREPEP

SEQ ID NO: 62038 - protein, 231 aa, Mycobacterium avium
MAAARVSVVLPTVTTVASDGATQLSFADVGPAFGPEEVALRDTTFVVVDLETTGGRSTSTGETAPDAITEIGAVKVRDGVVLGEFATLVDPQRSIPPQIMRLTGITTAMVSDAPAIDAVLPMFLEFAGLDRGAVLVAHNAGFDVGFLRAAAQQCDIAWPRPRVLCTVRLARRVLSREEAPSVRLASLARLFAVTTQPTHRALDDARATVDVLHALIERVGNQGVHTYADLR

SEQ ID NO: 62039 - protein, 698 aa, Mycobacterium avium
MSRLHPHVAEANPLGEDFDYAEEFAKLDVEALKADVISVMTTSQDWWPADYGHYGGLFIRMSWHAAGTYRIHDGRGGGGQGMQRFAPLNSWPDNVSLDKARRLLWPVKKKYGNKISWADLIIFAGNCALESMGFKTFGFAFGREDVWEPEEILWGEEDEWLGTDKRYPGTGERELAQPYGATTMGLIYVNPEGPEGKPDPIAAAIDIRETFGRMAMNDEETAALIVGGHSFGKTHGAGDADLVGPEPEAAPIEQQGLGWKSSYGTGVGKDAITSGLEVVWTPTPTKWDNTFLETLYGYEWELTKSPAGAWQFTAKDGAGAGTIPDPFGGPGRAPTMLVTDISLRESPIYRDITRRWLDHPEELADAFAKAWYKLLHRDMGPVSRFLGPWVPEPQLWQDPVPPVDHPLVDDNDVAALKDKVLASGLSVPQLVKTAWSAAGSYRNTDKRGGANGGRLRLQPQRNWEANEPSELDKVLPVLEKIQQDFNASASGGKKISLADLIVLAGSAAVEKAAKDAGYEISVHFAPGRTDASQESTDVDSFAVLEPRADGFRNFARPGEKAPLEQLLLERAYLLGVTGPEMTVLVGGLRALGANHGGSKHGVFTDRPGALTNDFFVNLLDMGTEWKASETAENVYEGHDRATGALKWTATANDLVFGSNSVLRALAEVYAQDDNQGKFVEDFVAAWVKVMNNDRFDLK

SEQ ID NO: 62040 - protein, 372 aa, Mycobacterium avium
MKSSGAGAAFAGASVADAVPLAPLTTLRVGPTARRLITCASSEQVIATLRRLDTERLAGQRDPVLVFAGGSNLVISDALSDLTAVRLANDGITVEGNLVRAQAGAVWDDVVLTAIEHGLGGLECLSGIPGSAGATPIQNVGAYGAEVSDTLTRVRVLDRGSGQVRWVPGTELEFGYRTSVFKRRADDGLEIPSVVLEVEFALDASGRSAPVRYGELAAELEVPVGERADPRAVREAVLALRARKGMVLDAADHDTWSVGSFFTNPVVAPDVYERLAGSVDGPVPHYPAPGGVKLAAGWLVERAGFGKGYPVPDPGGPEAPCRLSTKHALALTNRGTARSDDVIALARTIRDGVRSVFGITLVPEPVLLGCRL

SEQ ID NO: 62041 - protein, 517 aa, Mycobacterium avium
MTTATRSFLPVPTIETTLVNVLNFACAPQRSVQHHHRRVSVRGGCVLLLRTLPLLTPCQVWPRRPAKFGQRTLVRTNTLTHPHHSPGRAVGHAPGPKPHRAVRRQIVPPALHIPESAAASVFRAVRLRGPVGRDVIANVTSLSIATVNRQVIALLEAGLLRERADLAVSGAIGRPRVPVEVNHEPFVTLGIHIGARTTSIVATDLFGRTLDTVETPTPRNPAGPALASLADSARRYLRRWHRRRPLWIGVAIGGTVDSATGQVDHPRLGWRQAPVGQVLADALGLPVSVASHVDAMAGAELLLGMRRFLPSSPTSLYVYARETVGYALVIGGRVHVPTSGPGTIATLPAHSELLGGTGQLESTVSDEAVVAVARQLRILPFAPANRASGSAAGIADLLRVARAGNEQARELLAERGRVLGEAVALLRDMLNPDELVVGGQAFTEYPEAMEQVEAAFAARSVLGPRDIRLTAFGNRVQEAGAGTVSLSGLYADPLSAMRRAGALDARLREVARDESSA

SEQ ID NO: 62042 - protein, 428 aa, Mycobacterium avium
MSQGLWIAVAVLVVIAVLVVIAALVLGLARYRRRRISFSTRPEPGAIDRSGGYTASSGITFSQAPTAQPAERLDTTGLPAVGDDATVPRDAPRRTISEVELPEPETPAAPAPEAPAPEIEEIAPTEGRLERLRGRLARSQNALGRSLLGLIGGGDLDEDAWQDVEDTLLVADLGPVVTESVIAQLRGRLASSDVRTEADAKAVLRDVLINELRPDLDRSIRALPHADHPSVLLIVGVNGTGKTTTVGKLARVLVADGRRVVLGAADTFRAAAADQLQTWASRVGAEVVRGAEGADPASVAFDAVDQGIAAGADVVLIDTAGRLHTKVGLMDELDKVKRVVTRRAAVDEVLLVLDATIGQNGLAQARVFAEVVEITGAVLTKLDGTAKGGIVFRVQQELGVPVKLVGLGEGPDDLAPFEPAAFVDALLG

SEQ ID NO: 62043 - protein, 122 aa, Mycobacterium avium
MAELKSRLRADLTAAMKAQDKLRTATLRMLLAAIQTEEVSGKQAKDLTDDEVIKVLAKESRKRAESAEIYTQNGRGDLAANEHAEARIIDEYLPTPLTEAEVADVVDTAIAQVAEEIGERPS

SEQ ID NO: 62044 - protein, 393 aa, Mycobacterium avium
MPHDAPAHNLDLPREQTSRGRYWWVRWVILGVVAIVLAVEVSLGWDQLAKAWMSMYEANWWWLLASVVAAAASMHSFAQIQRTLLKSAGVHVKQLRSEAAFYAANSLSTTLPGGPVLSATFLFRQQRLWGASTVVASWQLVMSGVLQAVGLALLGLGGAFLLGAKNNPFSLLFTLGGFVALLLLAQAVASRPELIEGIGSRVLAWVNSVRGRPAETGLDKWRETLMQLESVSLGRRDLSVAFGWSMFNWIADVACLGFAAYAAGDHASVAGLTVAYAAARAVGTIPLMPGGLLVVEAVLVPGLVSSGMSLPSAISAMLIYRLISWLLIAAVGWVVFFFVFRTENIADSDDEPITGPLPVLPTPGGPPDPTDTALQGPLPPDRSPADPNPDKDV

SEQ ID NO: 62045 - protein, 358 aa, Mycobacterium avium
MRVLAAMSGGVDSSVAAARMVDAGHDVVGVHLALSTAPGTLRTGSRGCCSKEDASDARRVADVLGIPFYVWDFAEKFQADVIDEFVSAYARGETPNPCVTCNQKIKFSALSAKAVALGFDAVATGHYARLSGGRLRRAVDKDKDQSYVLAVLSAEQLRHAAFPIGDTPKPQIREEAARRGLAVAEKPDSHDICFIPSGNTRAFLGERIGVRRGAVVNADGTVLAEHDGVHGFTIGQRKGLGIAGPGPDGRPRYVTAIDADTATVRVGEAADLDVREMLGRAVVFTSGTAPSGPFECAVQVRAHGETADAVAELVGDELVVRLRAPLRGVAPGQTLALYRHDPDGDEVLGSATIAGTSR

SEQ ID NO: 62046 - protein, 86 aa, Mycobacterium avium
MANIKSQQKRNKTNERARLRNKSVKSSLRTAVRAFREAAHAGDKEKAAELLVSTNRKLDKAASKGVIHKNQAANKKSALAQALNKL

SEQ ID NO: 62047 - protein, 291 aa, Mycobacterium avium
MQVSQLQATNVLGQNTPLIAQLEAQYGEYWAQDAAAMYSYAGQSASASKVTPFQKAPQVTNPSGQAAQSAAVSTATANSTSTNTTKALQSLAQPASSSTTATKAATTAASTTSTDPLSEIWFLLTGQTSLPTNLGTLVNGYSPFAGLFYNTEGLPYFSTGMANTFTQIAKSVGAIGGAAPAAAKALPGLGGLGGMLGGGAAAAHPVAALGGAGSIGGKLSVPVAWSGAPATPALGHAIPVSSISAAPEAAGGPGNLLGGMPLAGAGAGGHGAAGPKYGFRPTVMARPPFAG

SEQ ID NO: 62048 - protein, 540 aa, Mycobacterium avium
MREQRHRRAQLQVVGRAEDLPDGSALHPLDQSGAFAQTRPEQLVAQVGAGLRQRRDAVPVRHRAATQAAQLRKDEPHPMAAFSPGTQLVDDVGVDRLLGVHEAFEIERVGGRVHMTTVAHVGVQRRVPRVRDLAPLMQFKRPEFNATKRRLRSAHTIEDLRRIAKRRTPKAAFDYTDGAAEDELSIQRARQAFRDIEFHPTILRDVSTVTAGWDVLGGPVALPFGIAPTGFTRLMHTEGEIAGVRAAARAGIPFSLSTLGTCAIEDLAAAVPQSRKWFQLYMWKDRERSMALVRRAADAGFDTLLATVDVPVSGARLRDNRNGMTIPPTLTLRTVLDAVPHPKWWFDLLTTEPLAFASLDRWPGTVAEYLSTMFDPSLTFDDLEWIKARWPGKLVVKGIQTLDDARAVVDRGADGIVLSNHGGRQLDRAPVPFHLLPTVARELGKHTEILLDTGIMSGADIVAAIALGARCTLVGRAYLYGLMAGGEAGVTRAIEILAEGVIRTMRLLGVTCLEELSPRHVTQLRRLAPLPPVEPPVTPA

SEQ ID NO: 62049 - protein, 272 aa, Mycobacterium avium
MTWADEVLAGHPFVVAHRGASAARPEHTLAAYDLALKEGADGVECDVRLTRDGHLVCVHDRRLDRTSTGAGLVSTMTLAQLRELEYGAWHDSWREDGAHGDTSLLTLDALVSLVLDWRRPVKLFIETKHPVRYGSLVETKLLALLHRFGIAAPASADRSRAVVMSFSASAVWRIRRAAPLLPTVLLGKTARYLISGAPTAVGATAVGPSLPTLREYPQLADRAIAQGRAVYCWNVDDYQDIDFCRDVGVAWLATHHPGRTKAWLQGHRDGNG

SEQ ID NO: 62050 - protein, 963 aa, Mycobacterium avium
MSTQQLETQQAARPRVARIIHRLSVPIILGWLAVAVLITIGVPSLEQVEAEHAVSLSPIGAPSFKAMERLGEDFKETNTGALAMILLEGQQQLGDDAHTYYDRLIRLLENDHKHVQHVQNFWGDPLTRGAAQSQDGKAAYVQVNLNGNAGAAAGDESVAAIRKLVQEASPPPGLKVYVTGPAPIVADMNIAGQKTVMLVTLASLIVIFVTLLLVYRSVITVILLLLIVGLELQIARGMVALLGHLGVVGLTTFAVNLLVAAVIATGTDYGIFFVGRYQEARQAGESREEAFYTTFNGVAKVVLASGLTIAGAVLCLSFTRLPYFQPLGIPVAVGISIAVLVALTLGPALLAAGARFGLFEPRRAVSARRWRRIGTAIVRWPAPILIATLAVSLVGLLALPNYRPSYDDQKFIPDSIPANVGYAAAARHFPGQRMQMPEILLVETDHDLRNPTDMLVINKLAKGVLAVPGIATVQTVTRPEGVPLQHTTIPWIISMGQASQLQNMAFQKDRMNDMLVQANELGKMIGIMQHMLDLMRELVATTHHMVQTTHEMQEITGELRDHISDFEDFWRPLRSYFYWEKHCYDIPICFSLRSIFDALDGVDEINDKLGDLVKNLDQLDAILPQLVMQIPPMIETMSGMRTMMLTMHSTMSGVIGQMDSSAKDPSAMGQAFDASRNDDSFYLPPGIINGSDSFKRVEKVFMSPDGKDVRLLITQRGDPATPEGLSRVEQIKTAAEESLKGTPLENSKIYLTGTAAITKDLVDGSKFDLLIAGVSALCLIFIIMLIMTRSFIAAMVIVGTVLLSLGASFGLSVLVWQYLLHMQLHWTVLSTSVIVLLAVGSDYNLLLVSRMKEELAAGIHTGIIRAMGGTGKVVTNAGLVFAFTMGAMVVSDLRSIGQVGTTIGLGLLFDTLIVRAFMTPSVAALLGRWFWWPQLVRPRPASTMLRPTGPRPLVRSLLLKQPQ

SEQ ID NO: 62051 - protein, 329 aa, Mycobacterium avium
MVDDSPDFGHVPVLLERCVELLTPALTRRHPDGSGAVLLDATLGAGGHAERFLTDLPGLRLIALDRDPSALEIARERLARFADRITLVHTRYDGIAAALTESGYAATESVDGILFDLGVSSMQLDRPERGFAYAQDAPLDMRMDPGSPLTAADILNTYDEAELADILHRYGEERFARRIAAQIVRRRAKEPFTSTADLVSLLYQAIPAPARRTGGHPAKRTFQALRIAVNDELDTLRCALPAALDALAVDGRIVVLAYQSLEDRIVKRLFAQAVASRTPVDLPVELPGHEPRFRALTHGAGRADAAEIERNPRSAAVRLRALQRTQAPL

SEQ ID NO: 62052 - protein, 143 aa, Mycobacterium avium
MFLGTYTPKLDDKGRLTLPAKFRDALAGGLMVTKSQDHSLAVYPRAEFEQLARRASKASKSNPDARAFLRNLAAGTDEQHPDAQGRITLSADHRRYASLSKDCVVIGAVDYLEIWDAQAWQDYQQTHEENFSAASDEALGDII

SEQ ID NO: 62053 - protein, 116 aa, Mycobacterium avium
RRADIAAVRGAVGGAVLKVIVESSALLALADEHTLVRVCRAAEDAGADFVKTSTGFHPSGGASVRAVALMAEAVGGRLGVKASGGIRTAADALAMLDAGATRLGLSGTRAVLDGLG

SEQ ID NO: 62054 - protein, 413 aa, Mycobacterium avium
MNIQLFLLIIVVITALAFDFTNGFHDTGNAMATSIASGALKPKTAVALSAVLNLVGAFMSTAVAATIAKGLIDSNIVTLELVFAGLVGGVVWNLLTWLLGIPSSSSHALIGGIVGATIAAVGAHGVIWKGVISKAIIPAIVSAILAILVGAVATWLVYRITRGVPKKRTEAGFRRGQIGSASLVSLAHGTNDAQKTMGIIFLALISYGSVSKTAAMPPLWVIVSCALAMATGTYLGGWRIIRTLGKGLVEIQSPQGMAAESSSAAVILLSAHFGYALSTTQVCTGSVLGSGLGKPGGEVRWGVAGRMGVAWLVTLPLAGLVGAVTYWIVHLIGGYPGAIIGFALLVAVSATIYLRSRKVKVDHHNVNAEWKGDLTTGLEGADDHSPPPDAGPPFGGPGDRYQSDDPTLKASAS

SEQ ID NO: 62055 - protein, 255 aa, Mycobacterium avium
MRRIGILTGLLSVVLIAGMTGCGSKSQPPPTAGKLMVFAAASLRPAFTQIAERFKAQNPGTGIEFEFAGSSELATQLTQGATADVFASADTAQMDVVAKAGLLAADPTNFASNTLVIVTAPGNPKRIGSFADLARPGLTVVTCQRPVPCGAAAHRVEDSTGVHLNPVSEEPSVTDALTKVTSGQADAALVYVTDARTAGSKVATVNFPEAAGAVNVYPIGVLKQAPLATQARNFVDLVTSPPGQQILAQAGFAKP

SEQ ID NO: 62056 - protein, 325 aa, Mycobacterium avium
ARRTGQAVVELLRRGITARDILTKEAFENAIAVVMAFGGSTNAVLHLLAIAHEADVALSLDDFSRIGSKVPHLADVKPFGRHVMTDVDHIGGVPVMMKALLDAGLLNGDCLTVTGATVAQNLAAIAPPDPDGKVLRALSDPLHPTGGITILRGSLAPEGAVVKSAGFDSDVFEGTARVFDGERAALDALEDGTITKGDAVVIRYEGPKGGPGMREMLAITGAIKGAGLGKDVLLLTDGRFSGGTTGLCVGHIAPEAVDAGPIAFLRDGDRIRLDVANRVLDVLVDPAEFDSRRTAFTPPPPRYKTGVLAKYVKLVGSAAIGAVCG

SEQ ID NO: 62057 - protein, 346 aa, Mycobacterium avium
MAAVTPVFVDVDTGVDDALALMYLFASPDADVVGIASTGGNVAVEQVCENNLGLLQLCGLTGIPVSKGSGQTLTGPMRLPSKVHGPRGLGYAELPPSDHRVTDHDSASAWVRAAHAHPGELIGVATGPLTNLALALRAEPALPTLLRRLVIMGGSYDHRGNTTAVAEWNISVDPEAAAEVLAGWGGADVVRERLPILCGLDLTRKVAMTPDHLTRLATAADSGTRPLSADDEPGTRSAAANPLIRVIEDAMRFYLEAYHDLGHGYQAHMHDPLAAAVALDPTLVATRPATVEIELTGTLTRAMTVTDWSGRREPNALIGIDVDSAAFFDRFIERVGPFARRVGGGR

SEQ ID NO: 62058 - protein, 347 aa, Mycobacterium avium
  MISC_FEATURE (298)..(298): X=any amino acid
MTGTHGKTTTTSMLIVALQHCGRDPSFAVGGEMGEAGTNAHHGSGDCFVAEADESDGSLLEYTPDVAVVTNIETDHLDFYGSADAYVAVFDAFVERLAPGGALVVCVDDPGAAALARRTAELGIRVLRYGSGPHGQAPSGEPLAATLVSWQQQGTEAVAQIRLAGEQQHPLVMRLSVPGRHMALNALGALLAAIEIGAPTEAVLDGLAGFEGVRRRFELVGTAGGSAPSSTVRVFDDYAHHPTEIAATLAAVRTLLEQSGGGRSIAVFQPHLYSRTKAFAEEFGHALDAADEVFVLDXYGAREQPLAGVSGASVAEHVSVPVRYLPDFSAAAEQVAAAAAPGDVIVT

SEQ ID NO: 62059 - protein, 87 aa, Mycobacterium avium
GWLLSLSGTVSFRNARALREAVPLIPPGQLLVETDAPFLTPHPHRGTANEPYCLPYTVRAIAELVDRRPEELAAVTTDNARRVYGLA

SEQ ID NO: 62060 - protein, 456 aa, Mycobacterium avium
MLPDGPVLRESAALPSITMPAAKAGLTPEQISAIDAAHLWHPYSTIGAESVAPVVAVGARGAWLTLIRDGAEVRALDAMSSWWTAIHGHGHPVLDAALSDQLAAMNHVMFGGLTHEPAARLAQLLVSITPAGLDTVFFSDSGSVSVEVAVKMALQYWRSRHRPAKHRLMTWRGGYHGDTFTPMSVCDPEGGMHSLWTDILARQVFAPQVPRDYDPAYSAAFEAQLARHADELAAVIVEPVVQGAGGMRFHDPRYLRDLREACTRHDVLLIFDEIATGFGRTGELFAADHARVSPDIMCVGKALTGGYLSLAATLCSTDIAQAISAGEAGALMHGPTFMANALACAVSVASVEVLLGQDWRSRVAEISAGLAAGLEPARELPGVTDVRVRGAIGVIECDRPVDLAVATPAALDHGVWLRPFRNLIYAMPPYICPPDEIARIASAMVQVAARLGSRRL

SEQ ID NO: 62061 - protein, 381 aa, Mycobacterium avium
MKAPIEVSPLAWLDAVEQQRRAAGLRRSLRPRPPVATELDLASNDYLGLSQHPDVIDGGVAALRLWGAGATGSRLVTGDTELHQQFESELADYVGAASGLLFSSGYAANLGAVVGLSGRGALVVSDAYSHASLVDACRLSRARVVVTPHRDVDAVLAALADRDEERAVVITESVFSTDGALAPLRELHEVCRRHRALLIVDEAHGLGVRGGGRGLVFEAGLAGAPDVVMTTTLSKALGSQGGAVLGPAAVRAHLIDAARTFIFDTGLAPAAVGAARAALGVLRAEPWRVGAVLRHAGVLAEVCRVREVPQSAVVSVILGDPDVAVAAATACLDAGVRVGCFRPPTVPAGTSRLRLTARASLDDAELEVARRVLTDVLAGLG

SEQ ID NO: 62062 - protein, 259 aa, Mycobacterium avium
MSAAEPALAPLSPGAPVLVAGGGITGRAVLAALRRFGAAPTLCDDDPATLRGYVDSGVDTVSTSAAAERISRYALVVTSPGFAPTAPLPLAAAAAGVPVWGDVELAWRLDAAGHYGPPRRWLVVTGTNGKTTTTSMLHAMLTAAGRRSLLCGNIGSPVLDVLDQPAELLAVELSSFQLHWAPSLRPEGGAVLNIAEDHLDWHGTLADYAAAKARVLDGRVAVVGLDDSRAAALLSTARAPVRVGFRLGEPAAGELGVRG

SEQ ID NO: 62063 - protein, 359 aa, Mycobacterium avium
MRQILIAVAIALTVSILLTPALIRLFTRQGFGHHTREDGPPTHHAKRGTPSMGGVAIIAGIWAGYLGTHLAGLAFDGEGISASGLLVLSLATVLGIVGFLDDLIKIRRSRNLGLNKTAKTIGQVAAAVLFGVLALGFRNANGLTPASADLSYVREIATVTLAPGLFVLFCVVVVSAWSNAVNFTDGLDGLAAGSMAMVTAAYVLITFWQYRNACVTAPGLGCYNVRDPLDLAIVAAATAGACIGFLWWNAAPAKIFMGDTGSLALGGIIAGISVTSRTEILAVVLGSLFVAEVSSVVLQILTFRTTGRRVFRMAPFHHHFELAGWAETTVIIRFWLLTAIACGLGVALFYGEWLAAIGA

SEQ ID NO: 62064 - protein, 327 aa, Mycobacterium avium
MGVVLNVGTAHLGEFGSREAIARTKSELPQSVPASGVVVLNVDDPTVAAMAEVTAARVVRVSRAEHTEAGPSDVWAGPVSLDELARPGFTLYHSHAGGTRQARVQLGVSGDHQVGNALCAAAVALECGATVEQVVAALAGAGPVSRHRMQVSTRGDGVTVIDDAYNANPDSMRAGLQALAWIARGGAEPGAPARRSWAVLGEMAELGDDAIAEHDRIGRLAVRLDVSRLVVVGTGRSVSAMHHGAVMEGSWGSADKGAVNVPDAEAALELLRAELQPGDVVLVKASNAAGLGALADALARDDREGGAAGRSGSSPLARDDSAGGTRR

SEQ ID NO: 62065 - protein, 182 aa, Mycobacterium avium
MTRVVLSIGSNLGDRLARLQSVVDGLGGAVRAISPVYETQPWGRVDQAPFLNAVLIADDPACDGQGWLRRAQEFERAAGRVRGERWGPRTLDVDLIACYGDGEVISRENNLTLPHPLAHLRAFVLIPWLAVDPDARLTVADGPQPVARLLAQLDQADRDGVRPTGLTLTPPAGSSADSGAGS

SEQ ID NO: 62066 - protein, 111 aa, Mycobacterium avium
MMPPRGSQIGRGETTMTNEHGYSQQKDNYAKRLRRIEGQVRGIARMIEEDKYCIDVLTQISAVNSALRSVALNLLDEHLGHCVTRAVAGGGDDADEKLAEASAAIARLVRS

SEQ ID NO: 62067 - protein, 414 aa, Mycobacterium avium
MTVMTAETANAAARTWTPRIAAQLAILAAAAFTYVTAEILPVGALPAIARNLQVSLVLVGTLLSWYALVAALTTIPLVRWTAHLPRRRVLVASLTCLTASQLISALAPNFAVLAAGRVLCAITHGLLWSVIAPIATRLVPPSHAGRATMSIYVGTSLALVVGSPLTAALSLMWGWRLAVVCVTVAAAVVTVAARLMLPEMVLTEHQLAHVGPRSRHHRNGRLITVSLLAMVAVTGHFVSYTFIVEIIRNVVGVRGPTLAWVLAAYGLAGLLSVPLVARPLDHRPKSAVILCMTGLTAAFAVLTALAFGGPTGATTALIGTAAIVLWGAMATAVSPMMQSAAMRNGADDPDGASGLYVTAFQVGIMAGSLLGGLLYERSVILMLSASGVLMAVALVGIAANRRMLDVAPTSSRDS

SEQ ID NO: 62068 - protein, 520 aa, Mycobacterium avium
MVSVPTGLRPSAVPGVRLPALADQVGAVMAGPDRRAAVPDVTVTGVTLRAQDVLPGDLFAALPGATTHGARHAAEAIERGAVAVLTDAAGVAQLTGGRTTPTLLHPRPRSVLGELAAAVYAHPSERLTVIGITGTSGKTTTTYLVESGLRAAGRTAGLIGTVGIRIDGADIPSALTTPEAPALQALLAAMAEQRVDTVVMEVSSHALALGRVDGTRFAVGGFTNLSRDHLDFHPTMADYFEAKALLFDPNSPLRAHRAVVCIDDEAGREMAARAGDAVTVSAEGQPAHWRAVEVAPLGTGGQQFTVIDPAGVQHRAGIRLPGHYNVANCLVALALLDAVGVSPEQAAPGLLQTRVPGRMEEIDAGQDFLALVDYAHKPGALRAVLSSLKRPDRRLAVVFGAGGERDPGKRAPMGATAAELADLVVVTDDNPRGEDPAAIRREILAGATESGCAAEVIEIGDRRAAIRHAVAWAGPGDVVLVAGKGHETGQRTGEHTRPFDDRVELAEALREAVGPRKAQG

SEQ ID NO: 62069 - protein, 663 aa, Mycobacterium avium
MSRGDSARARRSQSVRPTRGPRKDVQGKAIRQPKRRGKANPAEAAPGHSARQRRTRQIAQLTSRGGSFVFRHRAGNVVMLVAMVVAAAQLFVLQVTNASALRAQAAGQLKVTDVEKAVRGSIIDRHKDQLAFTIESRALTFQPKRIHKQLEEAKSKNPSAPDPQQRLRDIAKEVSGRLGNKPDSATVLKKLQSDENFVYLARAVDPAVASAISDKFPEVGSERQDLRQYPGGSLAANIVGGIDWDGHGLLGLEESMDSVLSGTDGSVTYDRGSDGVVIPGSYRNRHRAVNGAMVQLTLDDDIQFYVQQQVQQAKNVSGAHNVSAVVLDAKTGEVLAMANDNTFDPSQDIGRQGDKQLGNPAVSSPFEPGSVNKVITASSVIEYGLSNPDEVLQVPGSIQMGGVSIHDAWDHGVMPYTTTGVFGKSSNVGTLMLAQRVGPERFYDMVRKFGLGQRTNVGLPGESAGLVPPIDQWSGSTFSNLPIGQGLSMTLLQMTGMYQTIANDGVRIPPRIIKATIAPDGTRTEEPRPEGVRVVSPQTAQTVRNMLRAVVQHDPMGYQQGTGPAAAVTGYQMAGKTGTAQQINPACGCYFDNVYWITFAGMATVDNPRYVIGIMMDNPERNADGTPGHSAAPLFHNIAGWLMQRENVPLSPDPGPPLTLQAT

SEQ ID NO: 62070 - protein, 421 aa, Mycobacterium avium
MSSGILDELGWRGLIAQSTDLDALAAEARPMTVYAGFDPTAPSLHAGHLVPLLALRRFQRAGHRPIVLAGGATGMIGDPRDVGERTLNEADTVAEWTERIRGQLERFVDFDESATGAVVVNNLDWTRQLSAIEFLRDLGKHFSVNVMLDRDTVRRRLEGDGISYTEFSYMLLQANDYVELHRRYGCVLQIGGSDQWGNIIAGVRLVRQKLGATVHALTVPLVTAADGTKFGKSTGGGSLWLDPALTTPYAWYQYFFNTADADVIRYLRWFTFLSADELGELERATAERPQQRAAQRRLARELTVLVHGEAATEAVEHASRALFGQGELERLDAATLAAALRETSVAELKPGAPDGIVDLLVASGLSESRKAARRTLGEGGVSVNNVRIDREDWAPQPSDFLHGKWLVLRRGKRTIAGVEKL

SEQ ID NO: 62071 - protein, 160 aa, Mycobacterium avium
MTTRSARVIIASTRASSGEYEDRCGPIITEWLAQQGFSSAQPEVVADGSPVGEALRKAIDDDVDVILTSGGTGIAPTDSTPDQTVAVVDYLIPGLAEAIRQSGLPKVPTSVLSRGVCGVAGQTLIVNLPGSPGGVRDGLGVLAGVLDHALDQLAGKDHPR

SEQ ID NO: 62072 - protein, 400 aa, Mycobacterium avium
MTTNVPTAAGGETVSLRDPYPFFARKRREAGVFAGTVMDYSKTPESLMPKQEYSAVSFDAVNTVFRDGRVFSSKPYDKTIGLFMGPTILAMEGKKHRDHRNLVSAAFKSKALARWEPTIVRPICNALIDDFIDAGTADLVRQFTFEFPTRVIARLLGLPDEDLPMFHTRAVQLISYHVDYERAFEASAALKDYFLEQIEQRKSKPTEDIIGDLVTAEIDGEKLSDEAIYSFLRLLLPAGLETTYRSSGNLLYLLLTHPDQFAALQADRELLAPAIEEGLRFETPLTTVQRFTTEDTELHGVRIPARSVIGVCIGSANRDERRWERSEEFDIFRKHVPHISFAAGEHTCLGLHLARLETRVAMECLLNRLTNVTLLSDGDPHIHGQPFRSPTALPVTFDAK

SEQ ID NO: 62073 - protein, 634 aa, Mycobacterium avium
MLAGLAFGSEIKRFRRSRLTRAAIVVLMLLPLVYGALYLWAFWDPFGHTNKMPVALVNSDRGAVVSGQQFNAGAEIAKSLTADGSLDWHVVDLPEARNGVDHGKYYFMVELPPDFSAAIASPVTGQPKKANLIAVYNDANNYISTSIGRTAIEQVLNAVSSRISGQAVNQMLSVVVSSGSGIKQAADGAARLDDGAGQLAAGLDSARTGSATLAAGAKQLSDGINQATDPLLAVTKAVSQIGGSTEQLQQGATALAQANDQLGAIAAAQDAAASSLTSVIDQLSARADPLANNLRGIQDQLRGHQFTPQIRQQLTDAQNAAIAMTSGLRTPGSPLASALDQLGGKGQELTNKLTQLRDGAQQVATGNAELAGGIAKLDDGAGQLKAGSAELATKLAEGARQVPNWTTQQKEAVADTIGGPVQLEASHENAAPNFGTGMAPFFLTLALFFGALVLWMVLRPLQYRAIAAEVIAIRVVLASYLPAAAIALFQAVVLYCVVRFALGMHAVHPVAMLGFMVLISAAFVAATQAINALVGPAVGRVLIMALLMLQLVSAGGMYPVETTSRPFQVLHRFDPMTYGVNGLRQLILGGIDARLWQAIIVLAAITAVALAISCLSARRDRLWNLSRLFPAIKI

SEQ ID NO: 62074 - protein, 492 aa, Mycobacterium avium
MPRFVDRVVIHARAGSGGNGCASVHREKFKPLGGPDGGNGGRGGSIVFVVDPQVHTLLDFHFHPHISAPSGKQGMGNNRDGAAGADLEVKVPDGTVVLDENGRLLADLVGAGTRFEAAAGGRGGLGNAALASRARKAPGFALLGEPGETRELTLELKTVADVGLIGFPSAGKSSLVSAISAAKPKIADYPFTTLVPNLGVVSAGEHTFTVADVPGLIPGASAGRGLGLDFLRHIERCAVLVHVIDCATADPGRDPISDIDALEAELAAYTPTLQGDVTLGDLTERPRAVVLNKIDVPEARELAEFVRDEIAERGWPVFLVSTVAREGLQPLIFGLWQMISEYQSAQPEIVPRRSVIRPVPVDDSGFRVEPDPRQPGAFVVSGARPERWVRQTNFDNDEAVGYLADRLARLGVEEELLRLGARPGCAVTIGDMTFDWEPQTPAGQQVVLSGRGTDARLERTERVGAAERKAARRQRRTGDDAERGTTERGENT

SEQ ID NO: 62075 - protein, 88 aa, Mycobacterium avium
MAHKKGASSSRNGRDSAAQRLGVKRFGGQIVKAGEIIVRQRGTKFHPGTGVGRGGDDTLFAKQAGAVEFGIKRGRKTVNIVAAGQAAD

SEQ ID NO: 62076 - protein, 926 aa, Mycobacterium avium
MRVHSLARTLGTTSKRVLDALSELDGRVRSAHSTVDREDAVRVRDLLAAQPSAELEPAAEDAASGGPDAGITGEPESRLLLETPDATERPHYMPLFVAPQPLESSDDDGDADETADSDDSDGDDDEQADRPSSRRRRRGRRGRGRGRGEQGGSDGPGDGDNDEPQNRGKKGGQSDGDDDSDGQDAEDADDSDTGDDGSADGGNRRRRRRRRRKSGSGDDNEDGPSPDDPPNTVVHERPPRNGKNGGDDGNGSSSSEIKGIDGSTRLEAKRQRRRDGRDAGRRRPPVLTEAEFLARREAVERVMVVRDRIRTEPPHQGSRYTQIAVLEDGIVVEHFVTSAASASLVGNIYLGIVQNVLPSMEAAFVDIGRGRNGVLYAGEVNWEAAGLGGSDRKIEQALKPGDYVVVQVSKDPVGHKGARLTTQVSLAGRYLVYVPGASSTGISRKLPDTERQRLKEILREVVPSDAGVIIRTASEGVKEDDIRGDVTRLQERWKQIEAKAIEIKEKAAGAAVALYEEPDVLVKVIRDLFNEDFAGLIVSGDDAWNTINEYVNSVAPDLVSKVTKYEPATGPDGTPGPDVFAVHRIDEQLAKAMDRKVWLPSGGTLVIDRTEAMTVIDVNTGKFTGSGGNLEQTVTKNNLEAAEEIVRQLRLRDIGGIVVIDFIDMVLESNRDLVLRRLTEALARDRTRHQVSEVTSLGLVQLTRKRLGTGLVEAFSTSCPNCGGRGILLHADPVDSAPSNGRKSESGGRRGRRKKSKAEEPVVAKVPVHSPGEHPMFKAMAAGSSTQAASDEDESAAEEAGDELERKKAARAEELEAAEDTEDLEDTEDDDEDSDDSDDSDDEDLDDEDIDDEEDLGDDDEDLELDDDDLDTEDSDDSDDSDDSEDSDDSEDQRDPAAECPGVSALGRPRRRRAAGRPAGPPIHAD

SEQ ID NO: 62077 - protein, 823 aa, Mycobacterium avium
MGHALEHTMMDALTRRKRMQGYEVLWQPGMDHAGIATQSVVEKQLAVDGKTKEDFGRELFIEKVWDWKRESGGAIGGQMRRLGDGVDWSRDRFTMDEGLSRAVRTIFKRLYDAGLIYRAERLVNWSPVLQTALSDIEVNYEEVEGELVSFRYGSLDDSGPHIVVATTRVETMLGDTAIAVHPDDERYRHLVGSSLPHPFVDRQLLIVADEHVDPEFGTGAVKVTPAHDPNDFEIGLRHQLPMISIMDTKGRIADTGTQFDGMDRFAARVAVREALAAQGRIVEEKRPYLHSVGHSERSGEPIEPRLSLQWWVRVESLAKAAGDAVRNGDTVIHPTSMEPRWFAWVDDMHDWCISRQLWWGHRIPIWYGPNGEQRCVGPDETPPEGWEQDPDVLDTWFSSALWPFSTLGWPEKTPELEKFYPTSVLVTGYDILFFWVARMMMFGTFVGDDDAITLDGRRGPQVPFTDVFLHGLIRDESGRKMSKSKGNVIDPLDWVDMFGADALRFTLARGASPGGDLAIGEDHVRASRNFCTKLFNATRYALLNGAQLAQLPPLDELTDADRWILGRLEEVRAEVDSAFDNYEFSRACESLYHFAWDEFCDWYVELAKTQLAEGITHTTAVLATTLDTLLRLLHPVIPFITEALWQALTGNESLVIADWPRSSGVGLDQVATQRITDMQKLVTEVRRFRSDQGLADRQKVPARLAGVTESDLDTQVSAVTSLAWLTDAGPDFRPSASVEVRLRGGTVVVELDTSGSIDVAAERRRLEKDLAAAHKELASTTAKLANEDFLAKAPPHVVDKIRDRQRLAQEESERINARLAVLQ

SEQ ID NO: 62078 - protein, 310 aa, Mycobacterium avium
MSIAENVTQLIGNTPLVRLNRVTEGAVADVVAKLEFFNPGNSVKDRIGVAMIDAAEQAGLIKPDTIILEPTSGNTGIALALVAAARGYRCVLTMPETMSVERRMLLRALGAEIVLTPGADGMPGAIAKAEELAKSDDRYFVPQQFENPANPAIHRSTTAEEVWRDTDGKVDIFVAGVGTGGTITGVAQVIKERKPSAQFIAVEPAASPVLSGGQKGPHPIQGLGAGFVPPVLAMDLVDEVIAVGNEESIALARRLAAEEGLLVGISSGAALVAALQVARRPENAGKLVVVVLPDFGERYLSTPLFADLAD

SEQ ID NO: 62079 - protein, 229 aa, Mycobacterium avium
MLAAIRRDIRAARERDPAAPTTLQVIFAYPGVHAIWGHRVNHWLWRRGARLAARICAEITRILTGVEIHPGAVLGPGLFIDHATGVVIGETAEVGEDVTIYHGVTLGGSGRDTGKRHPTIGDRVIIGAGAKVLGAIKIGDDSRIGANAVVVKEVPSSAVVVGVPGQVIARTHPGPGGPDDSLMPDLVGVSLQSLLTRVTKLEAKVDGSQTGRVIRPPEAGVWYGEDFSI

SEQ ID NO: 62080 - protein, 78 aa, Mycobacterium avium
MRRVLSSKARFKEGAVRVIVDRDRCEGNAVCLGIAPDIFDLDDEDYAVVKLDPIPADQEQLAEQAIAECPRAALSRGD

SEQ ID NO: 62081 - protein, 527 aa, Mycobacterium avium
MNQPFGWDFPYAWPRKPVLADNVVCTSQPLAAQAGLRMLAEGGSAVDAAIATAITLTIVEPVSNGMGSDAFAIVWDGEKVHGLNASGRSPAAWTPEYFGGNAVPVLGWNSVTVPGAVSAWTELHARFGKLPFERLFAPAISYGRNGFPVSPVVAEQWVAQVPLFAGQPGFAEAFAPEGRAPRPGERFRLPAHADTLEAIAASRGEAFYRGALAARVAEHAAANGGAMTADDLAAHRADWVETITGDYRGYTVHEIPPNGHGIVALIALGILERFDMASLPVDSADSVHLQIEAVKLAFADAQAYLADIEHMPLRPEHLLDTEYLERRAALIDPARAKPVSAGAPAGGTVYLTAADAAGMMVSMIQSNYMGFGSGVVVPGTGISLQNRGANFTAGLGHPNSVGPNKRPYHTIIPGFVTKGGAPVMSFGVMGGMMQPQGHVQVMVRIADHGQNPQAACDGPRFRWVQGTQVSCENGFPAATLDELRRRGHDLVAVDDYNQFGSCQAIWRMDTGYVAASDPRRDGQAAAF

SEQ ID NO: 62082 - protein, 306 aa, Mycobacterium avium
MMTRMPDLSRRAVLRLGAGAAVGAVGAYGLDILLQPRASQAMPAAGTGTPLAPPPPAPGPPRDPAPPAAAAPTMVTGSFVSAARGGVNTNWAIARPPGQTKPLRPVIALHGKGSDAATVMAGGVEQGLAQAVNAGLPPFAVVAVDGGGSYWHKRSSGEDSGAMVLDELIPLLGNQGLDTSRVAFLGWSMGGYGALLLGGRLGPARTAAICAVSPALWLSSGAAAPGAFDGPDDFAANSVFGMPALGSIPIRVDCGDSDPFYAATKQFIAQLPNPPAGGFSPGGHNPEFWSSQLPAELSWMAPLLTA

SEQ ID NO: 62083 - protein, 474 aa, Mycobacterium avium
MSVSIPNVLAARYASAEMVAIWSPEAKVVAERRLWLAVLRAQQQLGVAVPAEAIADYERVLEDVDLASIADRERLLRHDVKARIEEFNALAGHEHVHKGMTSRDLTENVEQLQIRRSLELVFAHGVAVAARLAERAVAYRDLVMAGRSHNVAAQATTLGKRFASAAQETLIALARLRELIDRYPLRGIKGPMGTSQDMLDLLGGDPAKLAELERRVAEFLGFSTVLTSVGQVYPRSLDHDVISALVQLGAGPSSMAHTIRLMAGHELVTEGFAPGQVGSSAMPHKMNTRSCERVNGLQVVLRGYASMAAELAGAQWNEGDVFCSVVRRVALPDSFFAIDGQIETFLTVLDEFGAYPAVIGRELDRYLPFLATTKVLIAAVRAGMGREAAHHVIREHAVATALAMREHGAEPDLLERLAADERLPLDRAALDAALADRRAFTGAAADQVDEVAAQVDALVSRYPDAAKYTPGAIL

SEQ ID NO: 62084 - protein, 597 aa, Mycobacterium avium
MSKQEVSDYLLERLRAWGVEHVFGYPGDGINGLLAAWGRADNKPQFIQSRHEEMSAFQAVGYAKFTGRVGVCAATSGPGAIHLLNGLYDAKLDHVPVVAIVGQTNRTAMGGNYQQEVDLLSLFKDVASDYVQMVTVPEQLPNVLDRAIRIAMTQRAPTALIIPADVQELPYSPPEHAFKMVPSSLGIECPAIAPEDAAIARAAEILNAGKKVAMLVGTGARGAHQELAEVADLLGAGAAKALLGKDVLSDELPWVTGSIGLLGTRPSYELMRDCDTLLTVGSSFPYTQFLPECGQCRAVQIDIDGRLIGMRYPYEVNLVADAKAALRALIPHLKRKEDRSWREGIEKNVARWWETMDKEAMVGADPINPLRLFSELSPLLPDNAIVTADSGSSANWYARNLRFRGNMRGSLSGTLATMGPGVPYGIGAKFGQPDRPVIVFSGDGAMQMNGMAELITVKRYWNEWKDPRLIIAVLHNNDLNQVTWEMRAMAGAPKFAESQSLPDVDFAAFAAGLGLNAMAIKDPDELSDAWRSALSADRPTVLDVYTDPDMPPIPPHATWEQFKSATAAVLSGDEDRTGFVKVGLKTKMQEFLPHKKS

SEQ ID NO: 62085 - protein, 136 aa, Mycobacterium avium
MVATGACFDLLHTGHIRLLRQARELGDALIVLVNSDASVRALKGSGRPVMRDADRARVLAALACVDAVAVFDGLTPERMLEDLRPDIWVKGGDYVAAELPEADVVYRHGGEVVILPTVAGYSSSRLIAAAATRRPE

SEQ ID NO: 62086 - protein, 92 aa, Mycobacterium avium
MVSTTHNQQAYVRDTLDGFLAQRVDFPMEVIVADDASTDATPRIIQDYADRHPNLFRPFPAHWQAWRNHGHSCFLCEIVIRSQFHTTYEPEA

SEQ ID NO: 62087 - protein, 241 aa, Mycobacterium avium
MRAGRCRTPSPPTPPPRTSASGPTIWSSSWRRQSTAAAGLKADLAQGSGKDPAGIDAALDAVRSEIAAIARVGWVVLTQHRVPDRPGDPDQDPGRGRRLGIDVGSVRIGVACSDPDAVLATPVETVRRDRSGKHLRRLAALVTELGAVEVVVGLPRTLADRTGASALDAIDLADQLARRIAPTPVRLADERLTTVAAQRSLRAAGVRAKEQRAVIDQAAAVAILQSWLDQRRAAVREAGDG

SEQ ID NO: 62088 - protein, 245 aa, Mycobacterium avium
  MISC_FEATURE (80)..(80): X=any amino acid
MNAPMSMQPRSRRPLRRAQLSDEVAGHLRAAIMSGELRPGTFIRLDETAAELGVSVTPVREALLKLRGEGMVQLEPHRGXRGAAASPAKTSRTSSGCRRPSPRSWPPRPPTTSPTPRSTSWIASTTRSPRRSGPATPRPSRASSSASTGSSTRPAAGSSWPGSCSTPPATCRCWCTPPTRSGGGPPFDNHRQLIAASAPPRHRRGDRAHGLAVHRRGGAADRDARPHRDAEQPGVSSRPTARRAA

SEQ ID NO: 62089 - protein, 60 aa, Mycobacterium avium
YRATGALKWTATANDLVFGSNSVLRALAEVYAQDDNQGKFVEDFVAAWVKVMNNDRFDLK

SEQ ID NO: 62090 - protein, 180 aa, Mycobacterium avium
MCWKRHGRPESNPKNANGHGPHDASLDSGSDHHLPLHPLDSDDLAALAHYTGPGYQELNFALREGALDVSQQARVDALQKALEKLPVYEGAVVRGTNLPADVLEQYRPGEVITEAAFTSTSTDHTVAQSSAFAGNTEFRIWSTTGRDVSSVSMYPDEKEILFPAGSKFYVVSKTVDPQTV

SEQ ID NO: 62091 - protein, 69 aa, Mycobacterium avium
MPSPRFKRLDGFDVRFLTGTDEHGLKMVETAAAEGIGTAELARRNSDVFQRLQERLNICLRPLRPHDRP

SEQ ID NO: 62092 - protein, 183 aa, Mycobacterium avium
MSRSRTRPGGSVPGLGLAHPWALLERRGPTFYRPLGIISVPAQTGCRKRFAEHSHSEIQRLTVLNRDVLTLRRDELAEPPTAVVANLPYNVAVPALLHLLAEFPSIRTVTVMVQAEVAERLAAEPGGKEYGVPSVKVRLLPAGVRPVRQWCRPTGVLGPIPPGCYSGGGCAIDRLFRTSPGWA

SEQ ID NO: 62093 - protein, 442 aa, Mycobacterium avium
MLDRPFGRRSLLRGAGALSAAALAPWSAGCGSDDDGALTFFFAANPEERDARMRIIDEFARRHPDIKVRAVLSGPGVMQQLSTFCVGGRCPDVLMAWELSYAELADRGVLLDLGPLLARDKAFAQQLQADSIPALYETFTFNGKQYALPEQWSGNYLFYNKRLFDEAGVPSPPTAWERPWDFSEFLDTARALTKRDASGRAAQYGFVNTWGSYYSAGLFAMNNGVPWSDPRLNPTHFNFDNAAFQEAVQFYADLANKYRVAPNASETQSMSTPNLFAVGRAAMALGGHWRYQTYLRAEGLDFDVAPLPVGPAVGKGQPACSDIGATGLAISSSSPRKEQAWEFVKFATGPVGQALIGESCLFVPVLRSALKSDGFARAHRRVGNLGVLTDGPAFSQGLPITPAWEKVNALMDRNFGPILRGSRPATSLAGLSRSVDEVLRSP

SEQ ID NO: 62094 - protein, 721 aa, Mycobacterium avium
MVLPHGRKGRKERQHMATDHTSDAPDPKQRDLESARFRRDTGYLTTQQGVRVDHTDDALTVGERGPTLLEDFHAREKITHFDHERIPERVVHARGAGAYGYFEPYDDRLAQYTAAKFLTSPGTRTPVFVRFSTVAGSRGSADTVRDVRGFATKFYTEQGNYDLVGNNFPVFFIQDGIKFPDFVHAVKPEPHNEIPQAQSAHDTLWDFVSLQPETLHAIMWLMSDRALPRSYRMMQGFGVHTFRLVNARGEGTFVKFHWKPRLGVHSLIWDECQKIAGKDPDYNRRDLWEAIESGQYPEWELGVQLVAEDDEFSFDFDLLDATKIIPEEQVPVLPVGKMVLNRNPDNFFAETEQVAFHTANVVPGIDFTNDPLLQFRNFSYLDTQLIRLGGPNFAQLPVNRPVAQVRTNQHDGYGQHAIPQGRSSYFKNSIGGGCPALADEDVFRHYTQRVDGQTMRKRAEAFQNHYGQARMFFKSMSPVEAEHIVAAFAFELGKVEMPEIRSAVVAQLARVDDQLAAQVAAKLGLPEPPEEQVDESAPVSPALSQVTDGGDTIASRRIAVLAADGVDVVGTQRFTELMEQRGAVVEVLAPVAGGTLAGGSGGELRVDRSFTTMASVLYDAVVVACGPRSVSTLSDDGYAVHFVTEAYKHLKPIGAYGAGVDLLRKAGIGNRLAEDTDVLNDQAVVTTKAAADELPERFAEEFAAALAQHRCWQRRTDAVPA

SEQ ID NO: 62095 - protein, 155 aa, Mycobacterium avium
MRTDYYNDPNAPRPNSVVPSASAIVADERGRILLIKRRDNTLWALPGGGHDIGETIEQTAVREVKEETGLDVEITGLVGVYTNPRHVVAFTDGEVRQQFSLLFTTRVLGGELAIDHESTDIAWTDPDDIADLDMHPSMRLRIEHYLQHRDSPYLC

SEQ ID NO: 62096 - protein, 76 aa, Mycobacterium avium
MAASLFRWFDGRRPGRVGESKPRPPAERLSWVMVRDFAPRQNACYCRLRGLGRPQAPLAQLVEQLTLNQRVRGSKP

SEQ ID NO: 62097 - protein, 431 aa, Mycobacterium avium
MADTDDIATLKYPGGETDLEIVSATEGADGIALGSLLSKTGYTTFDNGFVNTASCKSAITYIDGDAGILRYRGYPIEQLAEKSTFLEVSYLLIYGELPDKDQLAEFTKRIQLHTMLHEDLKRFFDGFPRNAHPMPVLSSAVNALSAYYPDSLDPMDTEDVELSTIRLLAKLPTIAAYAYKKSVGQPFLYPDNKLSLVENFLRMTFGLPAEPYQADPEVVRALDMLLILHADHEQNCSTSTVRLVGSSQANLFTSISGGINALWGPLHGGANQAVLEMLEKIRQSDDDVSEFVRKVKNREAGVKLMGFGHRVYKNYDPRARIVKEQADKILAKLGGDDDLLDIAKQLEEAALTDEYFIERKLYPNVDFYTGLIYRALGFPTRMFTVLFALGRLPGWIAHWREMHDEGDSKIGRPRQIYTGYTERDYVTIDAR

SEQ ID NO: 62098 - protein, 328 aa, Mycobacterium avium
MKTITFGKTGLEVSRLAFGTWEFCSDWGHADEDAAITMIRSARDLGINFFDTAQQYGFGASERLLGKALRDDLARARDEVVIATKGGLRATDSGLVRDASPQWLRKGVESSLTALGIDHIDVYLVHWPDPRMPAAETAGALAELVSEGKIRHVGVSNYDTAQVEEFSATLPVEVVQPPYHLFRRDIEDTLLPYAREHDIGVMVYGPLAHGLLTGTVKPDTRFAPQDWRAKSDIFSGDGFLRNLEVVAQLQELASDLGVTISQLAIARVLAQPGVHVAIVGAQHLHYLQESARAADVTLSDADLAAVDNVLAAATPVGGPYPEMHQKAS

SEQ ID NO: 62099 - protein, 339 aa, Mycobacterium avium
MTVRVGINGFGRIGRNFYRALLAQQEQGTADIEVVAVNDITDNSTLAHLLKFDSILGRLPYDVSLEGEDTIVVGPAKIKALEVREGPAALPWGDLGVDVVVESTGLFTNAAKAKGHLDAGAKKVIISAPATDEDITVVLGVNDDKYDGSQNIISNASCTTNCLAPLTKVLDDEFGIVRGLMTTIHAYTQDQNLQDGPHKDLRRARAAALNIVPTSTGAAKAIGLVMPNLKGKLDGYALRVPIPTGSVTDLTAELKKPASVEDINAAFKAAAEGRLKGILKYYDAPIVSSDIVTDPHSSIFDSGLTKVIDNQAKVVSWYDNEWGYSNRLVDLVALVGKSL

SEQ ID NO: 62100 - protein, 538 aa, Mycobacterium avium
MDVADRPTPVTLLVNGRVHTPAAPDATAMAVRGGVITWLGGDDVGRSLFPDADVEDLDGGFVTPGFVDSHIHLTATGLTLCGLDLRPARSRAHCLQLIADHAAAHPGRPVWGHGWDETSWPERTPPSTAELDAVLGDRPAYLTRVDVHSALASTGLRRRVAQLPSATGFSPDRPLVGHAHHAVRAAARNLLTAEQLAEARAAALHAAAAAGIVAVHECAGPEIGGMDDWLQLRALDHGVEVIGYWGEPVSTATDARALIEATGARGLAGDLFIDGALGSRTAWLREPYADAPDRTGTCYLDPDAVEAHLLACTEAEITAGFHVIGDAAVAAAVDAFEKVAARLGPVAVARCGHRLEHVEMIDAEQAAKLGRWGVIASVQPNFDALWGGADGMYAQRLGAERGSQLNPFALLASQGVPLALGSDAPVTGLDPWTSVRAAAHHRTPGSAISVRAAFAAATRGGWRAAGVRDGMTGTLVPGAPASYAVWDAGDLEVSAPRDTVARWSTDPRSRVPALPRLGPTDALPRCRRTVHRGAVIHG

SEQ ID NO: 62101 - protein, 1527 aa, Mycobacterium avium
MTPKRAGLYNPAFEHDACGVAMVVDMHGRRSRDIVDKAITALLNLEHRGAQGAEPRSGDGAGILIQVPDAFLREVVDFELPPEGSYATGIAFLPQSSKDAATACAAVEKIAEAEGLTVLGWRNVPTDDSSLGALSRDAMPTFRQVFMAGASGMTLERRAYLVRKRAEHELGTKGPGQDGPGRETVYFPSLSGQTFVYKGMLTTPQLKAFYLDLQDDRLTSALGIVHSRFSTNTFPSWPLAHPFRRIAHNGEINTVTGNENWMRAREALIKTDVFGTEADVEKLFPICTPGASDTARFDEVLELLHLGGRSLAHAVLMMIPEAWERHESMDPARRAFYQYHASLMEPWDGPASMTFTDGTVIGAVLDRNGLRPSRIWVTEDGLVVMASEAGVLDLDPATVVRRMRLQPGRMFLVDTAQGRIVSDEEIKAELAAEHPYQEWLDRNLVPLDDLPQGDYKRMPHDRLVKRQQTFGYTYEELNLLVAPMVRTGAEPIGSMGTDTPVAVLSQRPRMLYDYFQQLFAQVTNPPLDAIREEVVTSLQGTTGGERDLLTPTELSCHQIVLSQPILRNRELAKLVNLNPDDEVNGRPHGMRSKVIRCLYPVAEGGAGLAAALEDVRAQASAAIADGARVIILSDRESDEKMAPIPSLLAVAGVHHHLVRDRTRTHVGLVVESGDAREVHHMAALVGFGAAAINPYMVFESIEDMLDRGVIEGIDRNTALNNYVKAAGKGVLKVMSKMGISTLASYTGAQLFQAVGISEDVLDEYFTGLSCPIGGITLDDIAADVAARHALAYLDRPNERAHRELEVGGEYQWRREGEYHLFNPETVFKLQHATRTGQYKIFKDYTRLVDDQSERMASLRGLLKFRAGVRPPVPLEEVEPASEIVKRFSTGAMSYGSISAEAHETLAIAMNRLGGRSNSGEGGEDVKRFDRDPDGSWRRSAIKQVASGRFGVTSHYLTNCTDIQIKMAQGAKPGEGGQLPGHKVYPWVAEVRHSTPGVGLISPPPHHDIYSIEDLAQLIHDLKNANPAARVHVKLVSENGVGTVAAGVSKAHADVVLISGHDGGTGATPLTSMKHAGAPWELGLAETQQTLLLNGLRDRIVVQVDGQLKTGRDVMIAALLGAEEFGFATAPLVVSGCIMMRVCHLDTCPVGVATQNPVLRERFTGKPEFVENFFMFIAEEVREYMAQLGFRTLNEAVGQVKSLDTTLARAHWKAHRLDLGPVLHEPESAFMNQDLYCSSRQDHGLDKALDQQLIVMSREALDSGKPVRFSTTISNVNRTVGTMLGHEVTKAYGGQGLPDGTIDITFDGSAGNSFGAFVPRGITLRVYGDANDYVGKGLSGGRIVVRPSDNAPADYVAEDNIIGGNVILFGATSGEAYLRGVVGERFAVRNSGAHAVVEGVGDHGCEYMTGGKVVVLGRTGRNFAAGMSGGVAYIYDPPGEFPQHLNAEMVELESLDDDDIEWLHGMIQAHVDATDSAVGQRILGDWAQQQRHFVKVMPRDYKRVLQAIAEAERDGGDVDKAIMAAAHG

SEQ ID NO: 62102 - protein, 505 aa, Mycobacterium avium
MTAAMSTRRSWRPRMADPSGFLKYTHRELPKRRPVPLRLRDWREVYEEFDHGTLREQATRCMDCGIPFCHNGCPLGNLIPEWNDLVRTGRWRDAIERLHATNNFPDFTGRLCPAPCEPACVLGINQDPVTIKQIELEIIDNAFDEGWVQPLPPDKLTGKKVAVVGSGPAGLAAAQQLTRAGHSVTVFERSDKIGGLLRYGIPEFKMEKRVLDRRLDQMRAEGTEFRAGVNVGVDITADQLRADFDAVVLAGGATAWRDLPIPGRELDGIHQAMEFLPWGNRQASGDLDEADMDADGQPPITAKGKKVIIIGGGDTGADCLGTVHRQGATEVHQFEIMPRPPDTRAPSTPWPTYPLMYRVSSAHEEGGERVFSVNTEEFVGENGRVTALKAHEVTMEDGKFVKVEGSEFELEADLVLLAMGFVGPEKEGLLTDLGVKFTERGNVARGADFDTSIPGVFVAGDMGRGQSLIVWAIAEGRAAAAAADRFLMGATALPAPVKPTAVPLQ

SEQ ID NO: 62103 - protein, 535 aa, Mycobacterium avium
MTVKRPNFLVIVADDLGFSDLGAFGGEIETPNLDRLAYAGIRLTDFHSAPACSPTRAMLLTGTDHHIAGIGTMLEVAAPQFHGAPGYEGYLNDRVVALPELLRDAGYLTLMSGKWHLGATIETSPWARGFERSFALLPAGASHYGGSGARGFSPVPTLYTEDDRFVSVGDDFYSSDSYTDTLLRYLDERAPDDDRPFFAYLPFQAPHWPLQAPDESIAKYRGRYDEGPDVLRAERLAALKRLGLCPPDVTPHPVVADGAPEWADMTDEERARSARTMEVYAGMVDRMDYNVGRVIDYLSRSGELDNTVVIFLSDNGAEGAIVEAMPLRGPQIAAQIEKHCDNSLDNLGRPTSFIWYGPRWAQAATAPSRLHKAFTTQGGIRVPGFITWPGFARQGQIGTAFSTVMDIAPTLLELAGTSHPGTAYRGREVAPMRGRSLVGYLSGAADTVHDADTETGWELFGRRAIRQGNWKALHLPAPYGPGSWQLYDLASDPGEVDDLAAARPDKLAELLALWDRYVEETGVILDPISVFDAEL

SEQ ID NO: 62104 - protein, 390 aa, Mycobacterium avium
MTSALAGGGAAWRSPVTLSAVEPDRQADIAALDSTLTTVERVLDVDGLRARIEKLEHEASDPQLWDDQARAQRVTSELSHAQGELRRIEELRARLDDLPVLYELAAEEGEGAAEALAEADAELKALRADIEATEVRTLLSGEYDEREALVTIRSGAGGVDAADWAEMLMRMYIRWAEQHKYPVEVFDTSYAEEAGIKSATFAVHAPFAYGTLSVEQGTHRLVRISPFDNQSRRQTSFAEVEVLPVVETTDHIDIPEGDVRVDVYRSSGPGGQSVNTTDSAVRLTHIPTGIVVTCQNEKSQLQNKISAMRVLQAKLLERKRSEERAELDALKGEGGSSWGNQMRSYVLHPYQMVKDLRTEYEVGNPAAVLDGDIDGFLEAGIRWRNRKDDE

SEQ ID NO: 62105 - protein, 320 aa, Mycobacterium avium
MTTAAHRWHDFWRGELGEWIITRGLRIVMVLIAAVLAARFVNWVALQVSRQLTTGFVESDALVRSEASKHRQAVASVISWVSVVIIGIWVMLQIASILQFSVGGLVAPATVVGAALGFGAQQLVKDLLSGFFILAERQYGFGDLVTLTVVAATEASGTVENVTLRVTRLRSPDGEVLTIPNGQIVKVVNLSKDWARAVVDIPVSTSADLNRVNEVLHQECDRAMDNPVLGQLLLDSPTVMGVESIEVDTVTLRLVARTLPGKQFEVGRQLRVLVIRALARAGIVTAADARVGLVEDASVPAAQAAEQQSDDDVQGAVQKR

SEQ ID NO: 62106 - protein, 252 aa, Mycobacterium avium
MTGPQGQPVFLRLGPPPDEPNAFVVEGAPTSYPPEVRARLEVDAKEIMGRYPDKRSALLPLLHLVQSQDSYLTPAGLEFCGEQLGLTGAEVSAVASFYTMYRRGPTGDYLVGVCTNTLCAIMGGDAIFDALKEHLGIGNDETTPDGSVTLQHIECNAACDYAPVVMVNWEFFDNQTPESARELVDSLRAGKPRHPTRGAPLCVFRETSRILAGLPDERPDQGQGGAGAATLAGLKVAKEHGMQAPYPPEGQQ

SEQ ID NO: 62107 - protein, 178 aa, Mycobacterium avium
MTTLETLLHDPEMAGVWNLVPDRSAITFSIKNMWGLLTVRGRFTDFTGDGQLTGKGAVFGRVDIRAASLDTGIGRRDQHLRSPDFFDVERFEKISVVVTGLQPTKGKNADLRTDFTVKGVSAQLPLPVTILELDDGSIRITGETTLDRARFDLGWNRFGMIGRTATAAADVIFVRDSQ

SEQ ID NO: 62108 - protein, 302 aa, Mycobacterium avium
MSRRQLIRHTAWFGAAVGFAVTGGEVISHVAGRAAAQHTRAQPTLRFAQISDSHLGFTGAPNPDVAGTFGRAIDQVNNLGYTPDFVIHTGDLTHLSTPEQFDQAKQMMSALKTPHVFTVPGEHDSVDDAGQKYRSVFGAGSAGDGWYSLDVAGVHLIALVNTLNLRKLGHLGADQLEFVKKDVAGLSSDTPIIVFSHIPLFAMYPQWGWGTDDAAQALSYLRRFASVTCLNGHVHQLFSKTEDNVTFHSGTTTAYPLPHPGDGPAPKPVTLPAGRLRDALGVREVAYSRGDTVLALKELTLQ

SEQ ID NO: 62109 - protein, 474 aa, Mycobacterium avium
MAAPQSSVASGGDDAVRGGIGALTAMAATLPAPAPAGLADGHPLDESAEQQRRRLRIVVAASLLGTTVEWYDFFLYATAAGLVFNKVFFPNESSLVGTLLAFATFAVGFVMRPIGGLVFGHIGDRIGRKRSLALTMLIMGGATALIGVLPTAAQIGAWAPVLLLVLRVLQGFALGGEWGGAVLLAVEHSPGDRRGRYGAVPQVGLALGLALGTGIFAFLQIVLGPARFLSYGWRIGFLLSVLLVAIGIVVRLRVEETPAFRELQDLQAASTVPIRDILRERRSRRNTVLGLLSRWAEGSAFNTWGVFAISYATGALGLNRVSVLIAVTIAALLMAVLLPVSGVLTDRFGARRVYLAGIACYGLAAFPAFALFGTKKLLWFGLAMVIVFGVVHALFYGAQGTLYSALYPTNTRYTGLSFVYQFSGVYASGVTPMILTALIAALGGAPWLACGYLVATAVISVLATALIRDRDLYL

SEQ ID NO: 62110 - protein, 1114 aa, Mycobacterium avium
MTASLEVPTATSVRAIPAKLLIDNRIVINNQLKRTRGGKISFTHLLGYALVQAIKKFPNMNRHYAEIDGKPTAITPAHTNLGLAIDLQGKDGKRSLVVAGIKNCETMRFAQFVTAYEDIVRRARDGKLTAEDFAGVTISLTNPGTIGTVHSVPRLMNGQGAIIGVGAMEYPAEFQGASEERIAELGIGKLITLTSTYDHRIIQGAESGDFLRTIHEMLLSDAFWDDIFRELSIPYLPIRWSTDNPDSIVDKNARVMELIAAYRNRGHLMADIDPLRLDGSRFRSHPDLEILNHGLTLWDLDRVFKVNGFAGAEYKKLRDILGLLRDAYCRHIGVEYTHILDPEQQEWLQQRVETKHVKPTVAEQKFILSKLNAAEAFETFLQTKYVGQKRFSLEGAESVIPMMDAAIDQCAEHGLDEVVIGMPHRGRLNVLANIVGKPYSQIFSEFEGNLNPAQAHGSGDVKYHLGATGVYLQMFGDNDIQVSLTANPSHLEAVDPVLEGLVRAKQDLLDHGADDQGDEKAFSVVPMMLHGDAAFAGQGVVAETLNLTHLPGYRVGGTIHIIVNNQIGFTTAPEHSRSSEYCTDVAKMIGAPIFHVNGDDPEACAWVAKLAVDFRQKFKKDVVIDMLCYRKRGHNEGDDPSMTNPAMYDVVDIKRGVRKSYTEALIGRGDISMKEAEDALRDYQGQLERVFNEVRELEKHGVGPSESVEADQMLPAGLATAVDKALLARIGDAFLALPEGFTAHPRVQPVLEKRREMAYEGKIDWAFAELLALGSLVAEGKLVRLSGQDTRRGTFSQRHSVIIDRNTGEEFTPLQLLATNPDGTPTGGKFLVYDSPLSEYAAVGFEYGYTVGNPDALVLWEAQFGDFVNGAQSIIDEFISSGEAKWGQLSNVVLLLPHGHEGQGPDHTSARIERFLQLWAEGSMTIAMPSTPSNYFHLLRRHALDGIKRPLIVFTPKSMLRNKAAVSDIKDFTEIKFRSVLEEPTYEDGIGDRGKVSRVLLTSGKLYYELVARKNKDNRDDVAIVRIEQLAPLPKRRLGETLDRYPNVREYFWVQEEPANQGAWPRFGLELPELLPDKLTGLKRISRRAMSAPSSGSSKVHAVEQQEIIDTAFA

SEQ ID NO: 62111 - protein, 415 aa, Mycobacterium avium
MGSGHAVGYPKQPMTARFDLFVVGSGFFGLTIAERVATQLGKRVLVVERRPHIGGNAYSEPEPHTGIEVHKYGAHLFHTSNKRVWDYVRQFTDFTDYRHRVFAMHNGQAYQFPMGLGLVSQFFGKYFSPEEARKLIAEQAAEIDTADAQNLEEKAISLIGRPLYEAFVKGYTAKQWQTDPKELPASNITRLPVRYTFDNRYFSDTYEGLPVDGYTAWLQNMAAHENIEVRLNTDWFDVRDGLRAGSPEAPVVYTGPLDRYFDYAEGRLGWRTLDFEVEVLPIGDFQGTPVMNYNDLDVPYTRIHEFRHFHTERDYPTDKTVIMREYSRFAEDDDEPYYPINTEADRALLAAYRARAKAETASAKVLFGGRLGTYQYLDMHMAIASALNMYDNVLAPHLRDGASLTEAQSKQESGA

SEQ ID NO: 62112 - protein, 141 aa, Mycobacterium avium
MRDGADAPQWTAMDQVSFYDAVGGAETFQAIVSRFYAQVPEDEILRELYPLDDLEGAEERLRMFLEQYWGGPRTYSDRRGHPRLRMRHVPFRITPLARDAWLRCMHTAVASIDSKTLDDEHRRELLDYLEMAAHSLVNSPL

SEQ ID NO: 62113 - protein, 67 aa, Mycobacterium avium
MAQGTVKWFNGEKGFGFITPDDGTKDLFVHYSEIQGSGYRSLDENQRVQFDVEQGAKGPQAVGVSTV

SEQ ID NO: 62114 - protein, 486 aa, Mycobacterium avium
MAPSGEHRPENLGQAAVHAAAVATGNSATTLRQQVKNLNAHASGKTITEQCELLTKQAGIAEKVSADLGIVAAALKIREDAARAWNRDAPKDSEIAAAKKAVADAKKALMDASAASGDTSAASPKLEAAQKKLGELIRRRRDADKAYDAAEKRADAKLKEISGQYAPHGGGRGHTADGTPETPAPSPGSPSPGAGSPSPGTGKPSAGAPGKTASGTAKPSATPAATPSSTKPTETETKSGDDLSGLLTQLASQQQQQPQSAQQAQPTAQATPAAATPQQQPEKDKDTAQGKASPLDRILGADGILDTGDLATLGVGAPLTLGGGSSHATPAAAVTPSAPASAAPSSTGLSASATANAQPVTSGTSAQGLHTSTDVTGRSGEPRSAFSVGPETKTSGASGATGTSAAPAHAAGTRPMGAGGMPMMPMGGMGGPAGGAGSSKDKESTTLASGSAESDLLHGRHTAAEAVPGGTIAQKDHPRRRGEDAA

SEQ ID NO: 62115 - protein, 341 aa, Mycobacterium avium
MVSTTHNQQAYVRDTLDGFLAQRVDFPMEVIVADDASTDATPRIIQDYADRHPNLFRPILRSRNVGLNANLTGALSAARGEYIALCEGDDYWVDPLKLTKQVALLDEDPDTTVCFHPVQVVWTHECAEDEKLVHTLYRKFEEIFLPKFPPPFRAGDLSFETLISRNFIQTNSVMYRRLPRYDDIPADVMPLDWYLHVRHAAEGAIAMLPETMAVYRRHPRGMWYKSITDPATFWRMQGPGHAATLDAMLDVVSGDPVHESIVAKNADWVLGAIAKQVPDPEGQQVLTQTTAKYPRIAALALRNRCTKTLGGRVKRLRRKLSRNATAPNSDAERRIDEPLSA

SEQ ID NO: 62116 - protein, 153 aa, Mycobacterium avium
MGGVKARTDVTSELFGVVGRFRRQLRRSAGRAFDPARLSESQSELLWLVGRRPGISVSAAAAELGLVPNTASTLVTKLVSGGFLLRAAADTDRRVCQLRLTESAQQIVDESRAARRALLSEVVDELNDDQIEALTRGLEVLDMMTQKLRERRP

SEQ ID NO: 62117 - protein, 182 aa, Mycobacterium avium
MGRPRSDTRERIQQVARELFSQRGVQRTSLQDIADRLGITKPALYYHFPSREDLVRSILVPLIEEGERFVAEHESREHTEARELLEGYFDFHYRHRRDLVLLLTELSTLIDLDLIDTVLAWRERLARLVFGKRPTLAQSTRAVVAFGGLQDCCVQFPDAPQAELRDKSVAAALDALGERPRR

SEQ ID NO: 62118 - protein, 84 aa, Mycobacterium avium
MTSAPLTVYTTSWCGYCHRLMTVLKSNGIPYEAVDIEHDPAAAEFVSSVNGGNKTVPTVKFADGSTLTNPSAAQVKAKLAEVGN

SEQ ID NO: 62119 - protein, 163 aa, Mycobacterium avium
MSEPLHVTFVCTGNICRSVMAEKMFADQLRRRGMADAVRVSSAGTGNWHVGECADERAAGVLRAHGYPTEHRAAQVGAEHLSADLVVALDRNHARMLRHLGVDEDRIRMLRSFDPRTGAHTPDVDDPYYGDSKDFERVYTVIEAALPGLHDWVDERLAQNGSS

SEQ ID NO: 62120 - protein, 245 aa, Mycobacterium avium
MKADVAQQRSLLELANVDAELSRLAHRAEHLPEQQACERMQQEYDAAGDRLGAVRIALEDIDAHVRRLEAEVDAVRQREDRDRSLLQSGAIDAKQLADLQHELETLQRRQTSLEDSLLEVMERREELQAQLDGEQQTLKELEAAMATARRDLDAARGEISESRALHSSRREALSAELDPELFALYERQRARGGPGAGQLLGRRCGACRLEIDRGELSRISAAAEDDVVRCPECGAILLRVKGPGQ

SEQ ID NO: 62121 - protein, 394 aa, Mycobacterium avium
MTETLAALLHRLSRPEVTIALGDGVGGLTTLDSGVSIGETVSRFAADTGAVSLILGWCPVPPQGLCADAFARIVTLMPGWGMRELLSSHVVHSIPTSMAAIPGLLAGHLRPDALITRMAHSGDGLQFCSEVSWQQALVDAGVPLWAVLDDSAPKASAEAPIPLDAVTIIGRAGSGTAEIPVRSADSIHDDLADRVLRFIPAGARLQYGPGQLGTALLRRTKIPLSIDTGLLTDAVIDLERRGLLVGQPSATYLLGSAELYRWADRRPILRGVGYTHDVSRLSRGAPFVAVNTAIEIDPYGQINVEGIADKVVGGIGGHPDYCVAARLSRNGLSIIAVPARFNGRSPLVERLSRPASTPAHDVDMIITEHAHVDLRGADWCQRHRLISELFDRAA

SEQ ID NO: 62122 - protein, 876 aa, Mycobacterium avium
MKLHRLTLTNYRGIAHREIEFPDHGVVVVCGANEIGKSSMIEALDLLLEAKDRSTKKEVKQVKPTHSDVGAEVSAEISCGPYRFVYRKRFHKKCETELTVITPYREQLTGDEAHERVRAMLAETVDSDLWHAQRVLQAASTAAVDLSGCDALSRALDVAAGDSGGLCGTEPLLIERIDAEYARYFTPTGRPTGEWAAAIARLADAEAAVAECAAAVAEVDERVSRHAALTEQVADLSQRRIAAGPRVTAARQAADRIAELTAQRREAQLVAEAAAATKAAAAQAHSGRLQLLADIDTRAAAVTQTHAQVQQAAADHAVAQADAQACDTALQHATEALAELERRVQEAQRTVERSAGREEADRLAARLDKIDAIQRDRERISAELSTIAVTEELLRRIEDAAAAVDRIGDQLASTSAAVEFTAVADIHLVIGDRQVSLPAGQSWSITAVGPTAVEVPGVLTARVTPGATTLDVQAKHAAAQQELAAALTAGAVADLGAARSADQRRRELQGTRDQLGATLAGLCGDEPLDELRSRLARLRAEHPEQPAAPTGGAADLAAARTELEALAQARACASAECVTRRQAATAAAARLAETATAATVLQNRLDTLRAELDAATGRLAAERASVGDEELAASADAALRAEQAAERRVAELADALAAASPDSVAAELADATQESESLRERYEEAAGALREVTIELSVFGSEGRQGKLDAAETEREHAASEHSQVGRRARAAQLLRSVMTRHRDTTRQRYVEPYRAELQRLGRPVFGPTFEVDIDSDLCIRSRTLNGITVPYESLSGGAKEQLGILARLAGAALVAKEDAVPVVVDDALGFTDPDRLAKMGQLFDSVGSHGQVIVLTCSPDRYDGVKGAHRIDLSA

SEQ ID NO: 62123 - protein, 241 aa, Mycobacterium avium
MRCTSRRNPILERRPVPTVAGDHFLDRPPPRGPEGAPGPQPAHRQQTALDVGRRNAEQLCDFIFVMQMQRGDARPVSPGVQGQLKVPHRREDRAVQRGQVEGFVAVDARQVRLVARDYQHGHPGQVLDQPLGRRHDAALGCSGGHQAGEQPSADPPQIGVAIQLGDPGAQRRIADHQPAPRLRVRPVRGLQADAQALADVAGFDRGVQVQRLARRRRGGEQVLDIHHGLPLLARRAPTSVR

SEQ ID NO: 62124 - protein, 254 aa, Mycobacterium avium
MTNRWTQRIGDGDPRIGMWVASGSGYVTEICAGSGIDWLLLDQEHAPNDLRSTLGQLQVLAGYPDVDVLVRPPSADPVFIKQLLDIGAQNIIVPMIDGPGEAVAAVSATRYPPNGIRGVGSALARASRWNRISDYLVTADTAVSLTVQVESVAGLAQLGEITDVDGVDAVFIGPADLAASMGKLGQPEDPDVVSTIETALATIVEHGKRAGVNAFSEPLARRYMAAGASFVLVGADVALLARGTEQLAARYRRQ

SEQ ID NO: 62125 - protein, 334 aa, Mycobacterium avium
MASYVAGSGEFTRDTDYITTRITADGRDGYPVEPGRYRLVVARACPWANRAIIVRRLLGLESVLSIGFCGPTHDERSWTFDLDPGGVDPVLKIPRLQDAYFKRFPGYPKGITVPAIVDVGTGAVVTNDFAQMTLDLSTEWTAYHRDGAPELYPERLRAEIDEVNKRVYTEINNGVYRCGFAGSQQAYEAAYDRLFTALDWVSDRLADRRYLVGDTITEADVRLFTTLARFDAVYHGHFKCNRSKLSEMPVLWAYARDLFQTPGFGDTVDFVQIKQHYYIVHSDINPTGIVPKGPDLAGWLTPHGREALGGRPFGDGTPPGPPVEAERVPAGHGA

SEQ ID NO: 62126 - protein, 134 aa, Mycobacterium avium
MPAATDGDMGPEPGLPAHDHDGLAAAGHPGPADYPVPPPRDILDAAGELLRALAAPVRIAIVLQLRQSHRCVHELVDALGVPQPLVSQHLKILKAAGVVAGERSGREVLYRLADHHLAHIVVDAVAHAGEEPRP

SEQ ID NO: 62127 - protein, 458 aa, Mycobacterium avium
MKPNGAPDLVGETRYQAGATATAVVVDGRLQWEVRRHGDDHVRYTDRLAHISHWSTERELSALRRSPVADFPRLGGPAGGTLFYPDCSNNNWNSEQDAVDFVNQLIPQGFSGMCHKVSEGDYYEDPFWPVVLQACRDANLPVLGYHYVTTNNLGAQAQTYLAAGGLPNAMFDWEANGGDLANYYAVASAFNAAGITVGVGYCPRWYFDEVGGGDLSQAGAIVSSAYPGGTGYASQIYEAAGGDEGSGWAPYGGVTPTCWQFTDQALVAGITVDCNAFKGTEDQLAQLFTGGTVTQPESTEQQEIDAIAGQLGAWPQLAGKPDALAVLAQKIADGDDLTLVDAVAAHIFGLLPVQTPAKLGAMSPNAGAIAQTVMCALAGIDAQTGAPLSYRQVDQLHEYEGPGVYFPPEAPGQTTSSVLDVETTSGKVGLRLYKGLDWFDMIVALYQQAGEPTPKAAS

SEQ ID NO: 62128 - protein, 377 aa, Mycobacterium avium
MRIGPIELASPVVLAPMAGVTNVAFRTLCRELERELVGTVSGLYVCEMVTARALVERHPATMHMTTFAPDESPRSLQLYTVDPATTYAAAKMIANEGLADHIDMNFGCPVPKVTKRGGGSALPYKRRLFGQIVAAAVRATQGTEIPVTVKFRIGIDEEHHTHLDAGRIAEAEGAAAVALHARTAAQRYSGTADWEQIALLKQQVRTIPVLGNGDIYDASDALTMMAATGCDGVVIGRGCLGRPWLFAELSAAFTGSPPPTPPTLGQVADIVRRHGRLLAAHFGEDKGMRDIRKHIAWYLHGFPAGSELRRALAIVKTLDELDRLLDRLDGSVPFPDEATGPRGRQGSPARVVLPEGWLDDPDDCTVPAGADVMHSGG

SEQ ID NO: 62129 - protein, 701 aa, Mycobacterium avium
MSDAESDGTRNGRHGPGAAHVQPIPVGPSPSLAAAPWERLFEPPPDDRLHRWRPDAAALEPVAAPEDDDEPGGCHTGGGVTVADLIAKVGAPNRPVHRRAAPEETEPFEPEPVEPEPVGSEPPGPASGLPLELQQTQVIDDLAYSVDAVSELRELMATDYPNDGDSDQQSADAAGEPRRRRRPMLMAGRSVAALAAVLALATTGGAWQWSASKNARLNTINALDRNSSDIRDPGGQYGDEDFLIVGLDSRAGDNANMGAGSTDDADGARSDTVMLVNIPANRKRVVAVSFPRDLAITPMQCEAWDPSTGKYGPIYDPKTKSWGPKMVYTETKLNSAFAFGGPKCLVKEIQKLSGLSINHFIAVDFAGFAKMVDALGGVEVCSSTPLHDYELGTVLEHGGRQVLDGDTALNYVRARQVTTEVNGDYGRIKRQQLFLSSLLRSLISADTLLDLNKLNNVVNLVINDTVVDNVKSKDLVQLGQSLQGMAAGHVTFVTVPTGVTDQNGDEPPRMSDMRALFDAIINDDPLPEENDQNAQNLSASGSTTGAPKAPTTRKSPTPTPEPQREQVTTTSPSGVTVRVSNATTQSGLAATATSQLKRDGFNVMTPDDYPSSVNTTTVLFSPGNEEAAATVASSFANAKVQRVSGYGQVVQVVLGPDFKSVTAPSPSGSTMSLQIERGSSNAPAKLPEDLTVTNAADTTCE

SEQ ID NO: 62130 - protein, 258 aa, Mycobacterium avium
MAKRLDLKGVNIYYGSFHAVAEVTLSVLPRSVTAFIGPSGCGKTTVLRTLNRMHEVVPGGRVEGSVLLDDEDIYGPGVDPVGVRRAIGMVFQRPNPFPAMSIRDNVVAGLKLQGVRNRKVLDETAEYSLRGANLWDEVKDRLDRPGGGLSGGQQQRLCIARAIAVQPDVLLMDEPCSALDPISTMAIEELISELKQDYTIVIVTHNMQQAARVSDYTAFFNLEAVGKPGRLIEVDDTEKIFSNPSQKATEDYISGRFG

SEQ ID NO: 62131 - protein, 1223 aa, Mycobacterium avium
MEFIMTAPGAARPETPIAGLVELALTAPTFQQLIDTAAASPADLSLVGPASARLFVASALARLGPLLVVTATGREADDLTAELRGVVGDAVAVFPSWETLPHERLSPGVDTVGARLTVLRRLAHPDDARLGPPLQVVVTAVRSLLQPMTPQLGLVEPVTLSVGQEIEFEHVIARLVELAYSRVDMVGRRGEFAVRGGILDVFPPTAEHPVRVEFWGDEVSEMRMFSVADQRSIPEIAVDTVIAVPCRELLLTEDVRARAAELAAQHPASEPAITGSVSDMLAKIADGIAVDGMEALLPVLRPGKQVLLTDQLAERTPVLLCDPEKIRTRAADLIKTGREFLEASWSVAALGILENQAPIDVEQLGGSGFAELDEVRAAAVRGGHPWWTLSQLSDESAVELDVRAAPSARGHQHDIDGIFAMLRAHVSTGGHAAVVAPGTGTAHRVVERLAECDTPAAMLESGAAPRAGVVGVLKGPLHDGIVIPGANLVVITETDLTGSRVAAVEGKRLAAKRRNTVDPLALTAGDLVVHDQHGIGRFVEMTERTVGGARREYLVLEYASSKRGGGSDKLYVPMDSLDQLSRYVGGQAPALSKLGGSDWANTKTKARRAVREIAGELVSLYAKRQASPGHAFSPDTPWQAEMEDAFGYTETVDQLTAITEVKSDMEKPIPMDRVICGDVGYGKTEIAVRAAFKAVQDGKQVAVLVPTTLLADQHLQTFTDRMAGFPVTVKGLSRFTDAAESRAVIEGLADGSVDIVIGTHRLLQTGVRWKDLGLVVVDEEQRFGVEHKEHIKSLRTHVDVLTMSATPIPRTLEMSLAGIREMSTILTPPEERYPVLTYVGPHDDKQVAAALRRELLRDGQAFYVHNRVSSIDRAAARVRELVPEARVVVAHGQMPEERLERTVQGFWNREYDILVCTTIVETGLDISNANTLIVERADTFGLSQLHQLRGRVGRSRERGYAYFLYPPHAPLTETAYDRLATIAQNNELGAGMAVALKDLEIRGAGNVLGVEQSGHVAGVGFDLYVRLVGEAVEAYRAAADGQTVTTAEEPKDVRIDLPVDAHLPPDYIASDRLRLEAYRRLAAAGSDDEIDAVVEELVDRYGALPEPALRLVAVARLRLLCRAAGITEVSAPSAATVRLSPITLPDSAQVRLKRMYPAASYRATTSTVQVPIPRAGGVGAPRLRDVELVQMVANLVTALQGKPQTDVGTGAPVAAMASEEGRG

SEQ ID NO: 62132 - protein, 334 aa, Mycobacterium avium
MIVILCDPRRPSLVPVEAVEHLTGEVQYTEEMPIAVPWSLPAARPVHSGDPDDPAPVLLSSDRDHPAVTARLAAGARLISAPDAPRGERLVDAVAMMDKLRTAGPWESEQTHESLRRFLLEETYELLDAVAGGNAEALRDELGDVLLQVLFHARIAEDAPQSAFTIDDVAAALIRKLGNRVPGVLAGQTISLEEQLAQWEERKAAEKPRKSVMDDVHTGQPALALAQKVIGRAEKAGLPADLIPPQVTSIAISADVDAESALRTAVLDFVATVRGVERSIAAARRGTSVPDEFDIAPLGEISEQEWRQHWPAGDTDPEPAPAEQLTDDAGGDEN

SEQ ID NO: 62133 - protein, 429 aa, Mycobacterium avium
MPIIEQVGAREILDSRGNPTVEVEIALTDGTFARAAVPSGASTGEHEAVELRDGGERYGGKGVQKAVQAVLDEIGPAVIGLNADDQRLVDQALVDLDGTPDKSRLGGNAILGVSLAVAKAAADSAELPLFRYLGGPNAHILPVPMMNILNGGAHADTAVDIQEFMVAPIGAPSFAEALRWGAEVYHSLKSVLKKEGLSTGLGDEGGFAPDVAGTTAALDLIGRAIESAGFKLGTDVALALDAAATEFYSDGTGYKFEGSTRTAEQMAEFYAGLLGAYPLVSIEDPLSEDDWDGWAALTASIGDRVQLVGDDVFVTNPERLEEGIEKGVANALLVKVNQIGTLTETLDAVALAHHSGYRTMMSHRSGETEDTTIADLAVAVGSGQIKTGAPARSERVAKYNQLLRIEEALGDAARYAGDLAFPRFALETR

SEQ ID NO: 62134 - protein, 284 aa, Mycobacterium avium
MRVSSNRRERQAPPAPEPLAPLIDAHTHLDACAAGPETGAADVRAIVDRAAAVGVQAVVTVADDLDSARWVTRAAEWDPRVYAATALHPTRADALDDAARAEIERLVAHPRVVAVGETGMDLYWPGRLDGCAEPAVQREAFAWHIDLAKRCGKPLMIHNREADAEVLDVLAAEGAPDVVIFHCFSSDAAMARRCVDAGWLLSLSGTVSFRNARALREAVPLIPPGQLLVETDAPFLTPHPHRGTANEPYCLPYTVRAIAELVDRRPEELAAVTTDNARRVYGLA

SEQ ID NO: 62135 - protein, 277 aa, Mycobacterium avium
MHDANTVRRVVSTSGVSRSDHVLEVGPGLGSLTLALLDRGAHVTAVEIDPVLAERLPHTVAEHSHSEIQRLTVLNRDVLTLRRDELAEPPTAVVANLPYNVAVPALLHLLAEFPSIRTVTVMVQAEVAERLAAEPGGKEYGVPSVKVRFFGRVRRCGMVSPTVFWPIPRVYSGLVRIDRYPTSPWPTDPAFRRQVFQLVDIAFGQRRKTCRNAFVDWAGSGNESADRLLAASIDPARRGETLSIDDFVRLLQRSADRGGSDREGTSPPTAGQGAPAC

SEQ ID NO: 62136 - protein, 219 aa, Mycobacterium avium
MAKQALNQLTAAVRTETGKGASRRARRAGKIPAVLYGHGTDPQHLELPGHDFAAVLRHAGTNAVLTLDIDGKEQLALTKALDIHPIRRTIQHADLLVVRRGEKVVVEVTVVIEGDAAPGSLVTQEASTIEIEAEALSIPEQFTVSVEDAEPGTQFTAGQIALPKGVNLISDPELLVVNVVNAPTAEELAEEGAGEVTEEPAAAEAEEAGEEEAAEAESE

SEQ ID NO: 62137 - protein, 617 aa, Mycobacterium avium
MPRSLDLVVTSVATALMEATASTARSVSETVLAQLVEQFDVDASFLHHHDAAGPVPVAEWPRRTDAAGPMAALRSEDVESVLAQCERQRRPVVSSPDQADGWLRRWLQRDKAAGAPSVAAAPLVSGDATTGVLGFVKFGARRWKPEEINTLEAVAALFAQLQARIAAEERLRYLAEHDDLTGVYNRRALVAHLTERLAAGNPGPVAVFYLDLDRLKPINDYLGHTAGDWFIRVFAQRIEECAGEQSMIARLGGDEFVVIPHQPMASEAAEAFARRLSTLLCDRLTIGGHVISRTVSIGLAVGTPGADNCTDLLRRADEAVLTAKRAGGNQTAVSTDDMSLKRAFRNDIELHLQGDIESEGLLLHYLPEVDLWTGAVVGAEALVRWRHPIWGLLLPDSFIGVAESTNLGAELGGWVMRSACADFSRWRANGVGHGAMLRINVSPIQLISRGFVETVADTIGEFGIDAGSVCLEITERAVVHDTETTRKTLSELKEVGVQIAIDDFGTGYAVLSHLKSLPVDMLKIDAGFVREVGTDAGDLAIVRAIIGLAEAFGLEVVAEGVETPAAALTLMQHGCHRAQGFLLSRPIPGEAMEALLSARWMPMPFLADREASSMGSI

SEQ ID NO: 62138 - protein, 512 aa, Mycobacterium avium
MSYIDCFSRVVARRRMRALPLSNATLPLHSQRIDVPTYDRSALQRGVVHIGAGNFHRAHQAVYFDDLACSGISDQWGVSAISLRSHDVKDLLSAQDGLYTVVQRGHDHQTARVVGSIGSVHYAPNDGAAVRAALTDPRTRIVSLTITPNGYFLDPVTREFDADHPDVRADLVASGCYGTAWGYLTEALEQRRRAGIAPFTVLCCDNIPDNTQAARTALVSFAALKNPGLARWIDRHVAFPSTMVDRITPQTSDSEREFVERTFGVADNWPVLTEPHSQWIIEDSFSDGRPPLDEVGVQFVTDVSDHKLIKTRLLNGTHIALACLATLAGYRRTDEAMKDPIIFDYVERLMRDEVQPLLPPVPGMNTPDYRDTLLTRLGNPRMSDQLSRLARRGSTKIASFLLPSLHEAIAQDRPHTLLMLALAGWARYLRGYDLNGRKIRIDDPEADLLTKLANMAGNNPDPLLRHEILADLRLVPGFSERLGEMVASIDEHGVIATLRQSLQDDSRELVAR

SEQ ID NO: 62139 - protein, 470 aa, Mycobacterium avium
MEADGINLNNATLPTLPIEAPNYDRGSVTVGIAHIGAGHFHRAHQAMYIDRLLQAGLAREWGICGVGVMPADWTMRDVLNDQDGLYTLILEKPDGSRDAHVIGSIIDYRYAPDDPESALEVLAAPTTRIISLTITEGGYRDPEGPAFAFIVEALDRRRRRGIAAPTIASCDNIENNGEIARRAVLANAEARSPELAEWVDEHVCFPSSMVDRITPSTTLQMAAEVRRDFGVNDRWPVVAEPFTAWVLEDKFADGRPPLERAGVLLVDDVAPYELMKLRMLNAGHQCLAYFAHLCGFEFVHEAARDPLFAEYLWAYFESEAIPTLPPVPGIDLYDYGHRLIERFTNPGVRDTIARLCAFSSDRIPKWLLPVINDNLANDGSVRIAAAAVASWARYAEGTDEWGKPFEVVDQLADSLIPIARSQYENPTAFIEIAGVFGDLAHQPRFVQAYSWALESLHRKGARATLEELVR

SEQ ID NO: 62140 - protein, 408 aa, Mycobacterium avium
MAQRTQGSLKGNWYLLGPAFVAAIAYVDPGNVAANVSAGSQYGYLLLWVIVAANVLAGLVQYLSAKLGLVTGRSLPATIGKRMSRPARLVYWVQAELVAIATDAAEVVGGAIALHILFGLPLLAGGLITGVVALLLLGIQDRRGQILFERVITGLLLVIAIGFAASFFVKTAPPEAVLSGLLPRFRGTESVLLAAAILGATVMPHAVYMHSGLVLDRHGHPDEGPHRRLLLRVTRWDVVLAMAVAGTVNAAMLLIAATNLQHRDVSASIEGAYAAIHNTLGATIAVMFAVGLLASGLASSSVGAYAGAMIMQGLLHRSIPMVVRRLITLCPALLILAVGYDTTRALVLSQVVLSFGIPFAVLPLIKLTSDRELMGSDANHRITTILGWGVGILISLLNMVLIWLTVTG

SEQ ID NO: 62141 - protein, 226 aa, Mycobacterium avium
AARGRLLISAMAAGAAAAAAHTATSHADTPKTDAVLTANASSLTGGAGGSNTVRGPQVIAAEPAATDALHNQELAKGVAFANDRAQREARLQQPLYVMPTKGIFTSNFGYRWGVLHAGIDLANSIGTPIYAVSDGVVIEAGPAGGYGMLVKLRHADGTVTLYGHINTALVSVGERVMAGDQIATMGNRGNSTGPHLHFEVLQGGTERIDPVPWLAKRGLMVGNYAG

SEQ ID NO: 62142 - protein, 554 aa, Mycobacterium avium
MTSVHTLPDITATPAWDALRKHHDRIGDTHLRQFFEEDPDRGRELTVTVGDLYIDYSKHRVTRETLRLLVDLARTAKLEERRDQMFAGVHINTSEDRAVLHTALRLPRDAELIVDGRNVVADVHEVLDAMGEFTDRLRSGEWTGATGKRISTVVNIGIGGSDLGPVMVYQALRHYADAGISARFVSNVDPADLIATLADLDPATTLFIVASKTFSTLETLTNATAARRWITDALGDAAVAHHFVAVSTNKRLVDDFGINTDNMFGFWDWVGGRYSVDSAIGLSVMAVIGREAFADFLSGFHIVDRHFQTAPLESNAPVLLGLIGLWYSNFMGAQSRAVLPYSNDLARFAAYLQQLTMESNGKSTRADGSPVTTDTGEIFWGEPGTNGQHAFYQLLHQGTRLVPADFIGFSQPIDDLPTAEGSGSMHDLLMSNFFAQTQVLAFGKTAEEIAAEGTPADIVPHKVMPGNRPSTSILANRLTPSVLGQLIALYEHQVFTEGVIWGIDSFDQWGVELGKTQAKALLPVITADNSPAPQSDSSTDALVRRYRSERGRTS

SEQ ID NO: 62143 - protein, 364 aa, Mycobacterium avium
MTLTALGLPTMPSRFDGPAADGALAAPAPSSGPLRDTYGRIATDLRISLTDRCNLRCSYCMPAEGLDWLPGEQLLTSDELTRLMRIAVTRLGVTSVRFTGGEPLLARHLEEVVAAAAALRPRPEISLTTNGVGLARRAAVLARAGLDRVNISLDSVDREHFAAITRRDRLADVLAGLAAAKEAGLTPVKVNAVLDPGTGREDVVQLLRYCLEYGYQLRVIEQMPLDAGHQWRRDAALSADAVLAVLRKHFRLRPDPAPRGSAPAQLWLVDTGPGTPGGKFGVIASVSHAFCSTCDRTRLTADGQIRSCLFSTRETDLRGLLRGGAADDAVEAAWRAAMWAKPAGHGINDPNFIQPDRPMSAIGG

SEQ ID NO: 62144 - protein, 490 aa, Mycobacterium avium
MSRITAGQLRDAVLDENSFLRWDSEPLAVPVSAAYAQELADARAATGLDESVLTGEGRIFGRRVAVVVCEFGFLGGSIGVAAAERITAAVQRATAEGLPLLASPSSGGTRMQEGTVAFLQMVKIAAAVRLHKQAHLPYLVYLRNPTTGGVFASWGSLGHVTVAEPGALIGFLGPRVYQQLYGEPFPEGVQTAENLQRHGVIDGVVPLDELRRTLDRAMTVIADAPEPLAAPPPPEPIPDVAAWDSVVASRRPDRPGVRLLLRHGATDPVLLSGTGQGEAATTLLALARFAGQPVVVLGQQRLTGGLVGPASLREARRGMALAAELRLPLVLVIDTAGPALSAEAEQGGLAGQIAQCLAELVTLDTPTVSVLLGQGSGGPALAMVPADRVLAALHGWLAPLPPEGASAIVFRDTDHAAELAAAQGIRSRDLLASGIVDVIVPEHPDAADEPVEFARRLALAVAAEVAALREIPADERLAARLRRYRRVGLP

SEQ ID NO: 62145 - protein, 424 aa, Mycobacterium avium
MTATPRACNRDRVALQAVHFFMADMEAGMGPFLGVLLQSRGWTTGAIGAAMTLGAIVGMVTVAPAGALVDATRHKRGCVIVVGLAAVAASAVILTSRQFWTVATAQAVMCISGATIAPAMIGITLGVVGQAAFTRQNGRNQAYNHAGNMAGAALGGVAGWVFGYAGIFWLAAGFAVATIAAVLAIPGGDIDHHVARGEARAAGEAPVKAMRVLARSRPLLVLAAAMVLFHLGNAAMLPLYGLAVVATHANPFTTVASTVVVAQAVMVPASLLAMRIAATRGYWPAILIALTALPVRGVLAASVITSWGVIPVQVLDGIGAGMLSVAVPGLVARILDGTGHINVGQGAVMAAQGLGGALSPVLGGAVAQHLGFRAAFLLLAGLSLGALIIWVTFAPMLRRAARLPAAPSDRAGAPPTATADNQAK

SEQ ID NO: 62146 - protein, 649 aa, Mycobacterium avium
MTAAAAPAGTRGLAARPCACTTLSRMCGIVGYVGQQPACAVVMAALRRMEYRGYDSSGVALVNGDGTLTVSRRAGRLANLEEAVAQLPPSALTGTTGLGHTRWATHGRPTDRNAHPHRDAAGKIAVVHNGIIENYAGLRHELEADGVEFASDTDTEVAVHLVAQAYRHGLTAGDFAASVLAVLRRLDGHFTLVFANADEPGTIVAARRSTPLVIGIGDGEMFVGSDVAAFIPHTRNAIELGQDQAVVLTADGYRITDFDGNDDLGPGAYREFHIDWDLAAAEKGGYEYFMLKEIAEQPAAVADTLLGHFVDGRIVLDEQRLSDQELREVDKVFVVACGTAYHSGLLAKYAIEHWTRLPVEVELASEFRYRDPVLDRSTLVVAISQSGETADTLEAVRHAKEQKAKVLAICNTNGSQIPRECDAVLYTRAGPEIGVASTKTFLAQITANYLVGLALAQARGTKYPDEVEREYHELEAMPDLVARVLATIKPVAALAQRFAQSPTVLFLGRHVGYPVALEGALKLKELAYMHAEGFAAGELKHGPIALIEDDLPVIVIMPSPKGSAVLHAKLLSNIREIQARGAITIVIAEEGDDTVRPYADHLIEIPSVSTLLQPLLSTIPLQVFAASVAQARGYDVDKPRNLAKSVTVE

SEQ ID NO: 62147 - protein, 391 aa, Mycobacterium avium
MAAVAVTPISLTPGVLAEALVDLGAIEHNVRLLCEQARGAQVMAVVKADGYGHGAVQTARAALAAGAAELGVATVDEALALRAAGISAPVLAWLHPPGIDFRPALLAGVQIGLSSQRQLDELLTAVRDTGRTATVTVKVDTGLNRNGVPPAQYPSMLTALRRAVAEQAIVPRGLMSHMVYADQPANPVNDVQAQRFTDMLAQAREQGVRFEVAHLSNSSATMSRPDLAFDMVRPGIAVYGLSPVPELGDMGLVPAMTVKCTVALVKSIRAGESVSYGHTWTAQRDTNLALLPVGYADGIFRSLGGRLQVSINGRRRPGVGRICMDQFVVDLGPGRPDVAEGDEAILFGPGSNGEPTAQDWADLLGTIHYEVVTSPRGRITRTYREAHTVES

SEQ ID NO: 62148 - protein, 113 aa, Mycobacterium avium
MEETSVTYTIAEPCVDIKDKACIEECPVDCIYEGARMLYIHPDECVDCGACEPVCPVEAIYYEDDVPDQWSQYTQINADFFAELGSPGGAAKVGLTENDPQVVKDLPPQGEGD

SEQ ID NO: 62149 - protein, 173 aa, Mycobacterium avium
MTPAPATQAVRIVTTESVDVQQLADLAARTFPLACPTSAAPEDIAAFIDANLSAECFARYLADPHRAVLAAELDGRILGYAMLIHDLAGDAAELSKIYVAPEQHGAGTAAALMRLALDTAGRWGATRVWLGVNQKNQRAQRFYAKHGFTVSGTRTFQLGAGREDDYLMSRTLR

SEQ ID NO: 62150 - protein, 183 aa, Mycobacterium avium
MGAGVSVRTLFEAPTVAQLAPRVRGGGRTLARVVAGERPAVVPLSFAQSRLWFLDQLHGPSPVHNMAIALHLRGSLDTDAMGAALLDVVGRHESLRTVFAVCDGTPHQVVIPAEQADIGWRVIDANGWPASRLNDAIDAIARHRFDLCHEIPLAATVFPASPEERACACGRWPIKSPAERDGR

SEQ ID NO: 62151 - protein, 268 aa, Mycobacterium avium
MAPGSGPHIETRNAWVEFPIFDAKSRSLKKAFLGKAGGTIGRNNSNVVVVEALRDITMSLELGDRVGLVGHNGAGKSTLLRLLSGIYEPTRGWAQVTGRVAPIFDLGVGMDPEISGYENIIIRGLFLGQTRKQMLAKVDEIAEFTELGDYLSMPLRTYSTGMRVRLAMGVVTSIDPEILLLDEGLGAVDADFMKKAQSRLQGLVERSGILVFASHSNEFLARLCKTAMWIDHGEIRMSGGIEDVVRAYEGEDAARHVREVLAETAEQP

SEQ ID NO: 62152 - protein, 496 aa, Mycobacterium avium
MADTIVGVLDEAAASRPARPLLRDCDGATLTVAETAALSAAGTRWLWDAGIRPGMTIAWQLPSHVSAALLMLALARCSVTQAPVLHLYRQREACAALAVAGVDTLIVDESTTANVPPGARVVKLPDGFVELLRALPTDPQPELAQSHRADDARWIYFTSGTTGRPKGVRHTDATLLAAARGYAQYLGLGEHPNEVGTIAFPIAHIGGMVYLASALIADFPVLMVPKVDVETLPRLLAQHDVTVTGASTAYYQMLLSAQVASGSGEPVVPSLRMLIGGGAACPPELHKQVREQMGVPIVHAYGMTEAAMVCVSPATDTEEQQSNSSGRPIPGSDVRISETGEVELRGANLTPGYVDAEQWKSVLTSDGWFRTGDRGYLRPDGRIVITGRTKDLIIRKGENIAPDEIENELLAHPLVDEVAVVGQPDDLRGEMVCAVVRRSPRHRDVTLDELCAFLDQRGMMKQKWPERLFFVDEFPLTGLGKVAKAELVQQISGGRR

SEQ ID NO: 62153 - protein, 396 aa, Mycobacterium avium
MTTAFTDSGLATALRARISPGSTIAIGDGVGGLRYLDDGTSVGAVVSAVARDVGSVRLILGWVPAPLDDLEADAFAEIVALMPGWGLRDVLAGPTARFVPTRLSGIQALLTGVLRPDVLVTRVVDRSGGLRFSTEVSWQREVVDAGVPVLAILDGTAPCADAGPPLAPGMVHVSGCSSEGPARMPRKDPEPVHDALADAALRFVPEGARLQYGPGQLGTALLRRTAMPLRVDTGLLTDAVVDLDKRGLLIDIPSATYLFGSEELYDWADGKSILRGIDYTHDISRLAGGETFVAVNTAIEIDPYGQVNVEGLGEKVVGGIGGHPDYCAAARMSHSGLSIIATPTEVNGRSPLVEQLSRPASTPAHDIDLIVTESGYADLRGADWSQRRRLITTLFE

SEQ ID NO: 62154 - protein, 250 aa, Mycobacterium avium
MEVDVEVTSLREPKMADRVATVLRRMFIRGEIPEGTMLPPESELMERFGVSRPTLREAFRVLESESLIVVQRGVRGGARVTRPRRETLARYAGLILEYEGVTLKDVYDARVTLETPMIVQLAKDRNPAVIAELEQIVEREAELKPGSDTVDQLTDFHAAIARLSGSKTLQIVSDMLHHIVEKANRSLQPTEGTRAAQAVSRSAKTHRMVLDMIKAGEAEKAGELWKKHLQKAEAFVLSGAELSTVVDLLE

SEQ ID NO: 62155 - protein, 204 aa, Mycobacterium avium
MPQSPERLDPTAVAVVCVECQNGVLGADSVLPALAADCAGVVANLRRLLDAARPRGVRVVHATYEGTLGGDHTGTARLWRALGPATASWAPGSVATQVMPELLADSDLVLPRHHGLFPTLDSELLPVLKGFGVHTVVLTGVSLNLALPITAGHTTQAGFHLVVPRDAVGGTPSGYGYQVLDNTIAVLGRITTVDKLIAEWAAKD

SEQ ID NO: 62156 - protein, 360 aa, Mycobacterium avium
MTLRVGIIGVGWGAHVQVPGFRAAKGYEPVALCARTPERLERVADKLGIEETSTDWESFVTRDDLDVISVATPTVLHRDMTLAALAAGKPVLCEKPLAGDLDAARDMVRAAAEANVPTACCFENRWNPDWLAVADRVRSGFLGTQYLARVSRSASYWHPSHPLQAHWMYDREQGGGYLAGMLVHDLDFLCSLLGRPVSVCAEVRTSDPVRELPDGGTLHVTADDTAAVLMRMESGVTAVLSVSVMGAHADHYRLELFGSDGTIIGDGDLRSAAYSLGAATDDGLRSLAVDEREPAHPDRLPRGLAGHASRAMALMLQDWLPAFDGAPSNVATFEDGLLSLAIIDAARRSAEGGGWEPVQA

SEQ ID NO: 62157 - protein, 471 aa, Mycobacterium avium
MGEVQNRVLIFSADGHVGAKRMADYLPYFDPDVRDIVKDLLAEEEQAYRRMLAPDFSSGPPEEPAPELDPRWAPAFPDRFGGWDIGVRMEQLDREGVAGEMLVPGHQFSSLPLFSVVNKPFEANLRDAGMRAYQRWLADFMSGGDGRLYGMADPGSCHDIDASVRELHWARENGFVSVGVPGIIEDPTLPSIDSDHYEPFWKACVDLDLTLAVHAGWGFPQGRYQEFISAFVATHLGGAEASQMMAAQQRLDEEAREALQKEFAESPASPFRLDYGPRRLLWQLMIGGIFDRYPQLRFVLTEVRSDWLPVTLQILDSWYEQRETSLKMRPSEYWERHCFATPSSIHKVEVDARDEIGVDRLMLGIDYPHPEGMWPDTWNWIKVAFAGVPENEARMILGENALRAFPVDGNHLRAIADRIGPDPSILLSGGDAVPTEHVEHYHRRGGFLRPTERVDQDAILRFADEDLQITR

SEQ ID NO: 62158 - protein, 626 aa, Mycobacterium avium
MARSHSKYGSKSANSAGSDVAIVLVLLHVIAGRLVQVTDQDFLVAQQELLDGPGADHGLGRFQGVGVLQRVLLERHRGQLLGQAFPRVARRHEVQRGLEDVPVHRGGPVVVGQKPAGLPDQQHEVRVEQPRVDAPLRHPLDVDTRWQVQLFDDLRLVPRTEQPAAQHLVHRLDHGHVRGRCLTTPGRLQAVRPGQLVVQCLVAELLDLGGFLLGVLPLVQDRRVVELDERVDEQLPVAAHLGPIGIRLGHLPEGVALDALGQRPEVVGERGRVVVEVDEDEAFPHLATHRRQAVVALVEVEELLFLLHEGQVAVQAVAPGVVFAGELAAGAGRLLVGKVVPHQLVSAMTADVVVRLDRPVLGLDDDHRGALAGRRELPGEVAAGAGQSIDAADVEPGLLEDRLAFGFEEGRVDRVGVIDWAGSEFGVVLCPAACGWLGEVRHRCYSSFSVLFGMFELDAKSVEGHGQQGVAAHREDVVHALPVVEALAQRRPGPVGQFRFLVELVDPGEHRVVERVEWAGAVAGKTANRRDLLVRDSLVLGHADVMGPLVGALPTMGHPQDGQFAHPRRQRGSRQQVDVESKKRLGQRRVVGQRGQRVVGVGSAHRRERLPGRLVPLLGGERLQAH

SEQ ID NO: 62159 - protein, 326 aa, Mycobacterium avium
MSHDWTDNRKNLMLFSGRAHPELAEQVAKELDVHVTAQTAREFANGEIFVRFHESVRGCDAFVLQSAPAPVNSWLMEQLIMIDALKRGSAKRITAVMPFYPYARQDKKHRGREPISARLVADLLKTAGADRIVTVDLHTDQIQGFFDGPVDHMRGQNLLTGYIRDNYPDGNMVVVSPDSGRVRIAEKWADALGGVPLAFIHKTRDPRVPNQVVSNRVVGEVAGRTCVLIDDMIDTGGTIAGAVKLLRDEGAGDVIIAATHGVLSDPAAERLASCGAREVIVTNTLPIGEEKRFPQLTVLSIAPLLASTIRAVFENGSVTGLFDGDA

SEQ ID NO: 62160 - protein, 328 aa, Mycobacterium avium
MVVTRGTATAQLPAPTTLNARVSRRGDRLFKAIAAAAGFTIVVAIALIAVFLLLRAVPSLRVNHANFFTSAQFSTSDPHRLAFGIRDLLMVTVLSSLSALVLAVPIAVGIAVFLTQYAPRRLARPFGAIVDLLAAVPSIIFGLWGIFVLAPQLEPVAAFLNRHLGWFFLFKTGNVSLAGGGTIFTAGVVLSVMILPIVTSVSREVFRQTPHIQMEAAQALGATKWEVVRMTVLPFGRSGVIAASMLGLGRALGETVAVLIILRSAARPGHWSLFDGGYTFASKIASAAAEFSSPLPTGAYISAGFALFVLTFIVNALARAIAGGKVNG

SEQ ID NO: 62161 - protein, 307 aa, Mycobacterium avium
MTVAPEGRKLLRLEVRNADTPIERKPPWIRVRARMGPEYTELKSLVRREGLHTVCEEAGCPNIFECWEDREATFLIGGDQCTRRCDFCQIDTGKPAELDRDEPRRVADSVRTMGLRYATVTGVARDDLPDGGAWLYAETVRAIKELNPSTGVELLIPDFNGRPDRLAEVFGSRPEVLAHNVETVPRIFKRIRPAFTYRRSLDVLTAAREAGLVTKSNLILGLGETPDEVRTALADLRGAGCDIITITQYLRPSARHHPVERWVKPEEFVEFARHAEELGFSGVLAGPLVRSSYRAGRLYRQAARARA

SEQ ID NO: 62162 - protein, 132 aa, Mycobacterium avium
MSAGARTAASPSTPTAPRRPRGAGYALADRRVVAHAIPDLYERIAPRPTTPFAQALRLALIDAAPDVAQDPVVVVLSPGIYSETAFDQAYLATLLGFPPVREPPPCWCPTALVVGCVRLGTQKTGRRGAAPG

SEQ ID NO: 62163 - protein, 137 aa, Mycobacterium avium
MASETEGAQTKRPEPRLAQGREHVVATVDEIPPGTHKLVPIGRHGVGVYNVNGTFYAIANYCPHQGGPLCSGRPRGRTIVDETAPGDSVMVRDLEYIYCPWHQWGFELATGTTAVKPEWSIRTYPVRVVGNDVVVQA

SEQ ID NO: 62164 - protein, 284 aa, Mycobacterium avium
MGRQILRDVMVFARVGEAGQVDVQAAAPPALHEGPLGLQLQRIPGGQVVGGQPAARGAGRGEPAQQPVLLGGLQVADQQLLGDPRRGLGRVETHPPQRRRPVVAQVDADRAPVGGQPGVQPAQHPGFEIEHPRPVDLVDRGPARPPQPVRPGVQARCQDHHLANARAARLGEEFVHEPGVGGQRIQQRRHRRVVADRRFIGRERVVGDRAGEVVDADGAQQRLGVRVVEQPLPGGDGPGGGAQGCGHPHLGCRCHRRPGRRLRRRSGAAGSARRPPASRATPAR

SEQ ID NO: 62165 - protein, 627 aa, Mycobacterium avium
MADERAAARLGSAARRAATGLGAAVIARLPAAQAAMRPRLLRLICAVVGGGLLCASFPAVNWWWAAVPAAAVLAWVLTHPATTPTGGLGYAFVFGLAFYLPLLPWVGLLVGAVPWLVLAAVSALFPAVFGLFAVLVRRLPGWPVWFALLWAAQEWLKSIFPFGGFPWGSVAFGQTHGPFLPLVQLGGVALLSFAIMLVGFSATALALEIVKWWRSGYPAAQSSAGPAAPPAVVLPGVCICLVLFAAVIVWPQVRHSGTGSGGEPSVTVAAVQGNVPRLGFGFNEQRRAVLDNHVRETLRLAEDVRAGAAPQPQFVIWPEDSSDIDPLVNGDAALEISQAASAIGAPILIGSVLEVPGRPAQDPRYTNTMIVWNPATGPADRHDKEIVQPFGEYLPMPWLFKHLSGYADRAGAMVPRPGSDVVHMAGVPVGVATCWEVIFDRVPRRAVTHGAQLLVVPANNATFNQRMSEQQLAFAKVRAVEHDRYVVVAGTTGISAVIAPDGAELARTDFFQPAYLDIQVRLKTRLTPATRWAPLLQWVMVAVAGAVILVAIRQNGWFPRSIRQRPGRSGAPKHPDASPAETEGDTHPAHNAAPDEDGDHAPPEDGGDDTGPPEGGRPHIGRHRGAT

SEQ ID NO: 62166 - protein, 519 aa, Mycobacterium avium
MRPFYVTTAITYPNGDPHVGHAYEYIATDAIARFKRLDGFDVRFLTGTDEHGLKMVETAAAEGIGTAELARRNSDVFQRLQERLNISFDRFIRTTDPDHHEASKAIWRRMQAAGDIYLDSYSGWYSVRDERFFVESETKVLDDGTRVAAETGAPLTWTEEQTYFFRLSAYTDKLLAHYEANPDFIAPEVRRNEVVSFVSGGLRDLSISRTSFDWGVKVPDHPDHVMYVWVDALTNYLTGVGYPDTESEMFRRYWPADLHMIGKDIIRFHTVYWPAFLMSAGIELPRRVFAHGFLLNRGEKMSKSVGNIVDPITLVDTFGVDQLRYFLLREVPFGQDGSYTKDAIITRINTDLANELGNLAQRSLSMIAKNLHSVVPEPGDFTGDDRELLQTADGLLPRVRASFDSQAMHLGLEAIWLMLGEANKYFSAQQPWVLRKSESEADQTRFRTVLYVTCEVVRIAALLVQPVMPDSAGKLLDLLGQGQDRRAFDALGARLAPGTVLPPPTGVFPRYQAESEKVD

SEQ ID NO: 62167 - protein, 303 aa, Mycobacterium avium
MTWQFPDRLSTNSALPGPAFSGQPAVDLSSFADFLRRQAPELLPAALGGAQSGPASSSGGTGQLPHGTTIVALKYPGGVVLAGDRRSTQGNMIAGRDVKKVYITDDYTATGIAGTAAIAVEFARLYAVELEHYEKLEGVPLTFAGKVNRLAIMVRGNLAAAMQGLVALPLLAGYDIDARDPEGAGRIVSFDAAGGWNLEEEGYQSVGSGSIFAKSSMKKLYSQVVDADSAVRVAIEALYDAADDDSATGGPDLVRGIYPTAVTIGAEGALEVPESRIAELAREVIQSRSRADTFGPDAAGGDK

SEQ ID NO: 62168 - protein, 494 aa, Mycobacterium avium
MSKVAGPIATMTDALRTAVDRRACPPEPGKGVHRLVASVIDTVVNLAKRRGFVYPSGEIYGGTRSAWDYGPLGVEFKENIKRQWWRSVVTAREDVVGLDSSIILPRQVWVASGHVEVFHDPLVESLITHKRYRADHLIEAYEAKHGHPPPNGLADIRDPDTGEPGRWTEPREFNMMLKTYLGPIETEEGLHYLRPETAQGIFVNFANVVTTARKKPPFGIGQIGKSFRNEITPGNFIFRTREFEQMEMEFFVEPSTAKEWHQYWIDTRLQWYVELGIDPQNLRLFEHPADKLSHYSDRTVDIEYKFGFAGNPWGELEGVANRTDFDLSTHSKHSGVDLSFYDQATDSRYIPYVIEPAAGLTRSFMAFLIDAYVEDEAPNAKGKMEKRTVLRLDPRLAPVKAAVLPLSRHADLSPKARDLAAELRRFWNIEFDDAGAIGRRYRRQDEIGTPFCVTVDFDSLEDNAVTVRRRDDMSQERIGMDAVADYLSARLKGC

SEQ ID NO: 62169 - protein, 710 aa, Mycobacterium avium
MSDSIIGWDKDADGIVTLTIDDLDNGANMLTDAYVEQMGAMIDRLEAEVDETTGVVITSGKSTFFAGADLTQIRSAGPEHAQQLFDGSTAIKRDLRRLETLGKPVVAAINGAALGGGLELALATHHRIAADVAGSVIGLPEVMLGVLPGAGGVARSVRLLGIQNALMQVLLTGNRFKPAKAQQVGLVDELVESVEELVPAAKTWILANPDKHVQPWDVPGFEIPGGGPATSAFAANLPAFPANLRKQLKGSRMPAPRAIMAAALEGAQVDFDTAQVIETRYFVHLVTGPIAKNMIQAFFFDLQAVQGGTSRPADVPERTINKVGILGAGMMGAGIAYVTAKAGIDVVLKDITLQAARKGKAYSENLEQKALAKGRTTEAKSQALLDRITPTADAADFAGVDFVIEAVFENTELKNKVFAEIENIVEPGAVLGSNTSSLPITDLAAGVSRPENFIGIHFFSPVEKMDPIEIIRGAKTSDETLARVIDYTLAIKKYPIVVNDGRGFFTTRVFSTYLLEAFNMLAEGIDPATIEQAALQAGYPAGPLQVADELSFGTIRKIMDETVQAAAADGLPLDESVRVAAEVVTTLMDTFDRNGKQGGAGFYDYADGTRAGLWDGLRTAFNTTRALSVPFDDLQDRYLFIQAIETQKAYDDGVISSDPDANVGSIFGIGYPPWTGGVRQFATGYPGGADAFRRRADELAAAYGGRFRWI

SEQ ID NO: 62170 - protein, 297 aa, Mycobacterium avium
MPAGRGIIAIMPDLTRRAVLRMGAGASLGAAGVFALSALLDPGTARAATLPQAPAPFEPPTAGKTLPTRLTGSFVSAARGGIKTNYVIAIPPGQTGMLRPVIALHGVDGDANQMLDMGVPDGLAQLVKAGKPPFAVVGVDGGNTYWHKRTSGEDSGAMVLDELLPMLSTMGFDTSRVGFMGWSMGGYGALRLGAKLGPSRTAGICAISPALYTSYATSAPGAFDSNEDFVQNSVLGLPALNSIPLRVDCGNFDRFYFATKQFVYQLKTPPAGSFSLGGHDIAFWRSQLPAELAWMAT

SEQ ID NO: 62171 - protein, 503 aa, Mycobacterium avium
MSVAANAELMDYDDVIARFDPVLGLEVHVELSTVTKMFCGCTTAFGAEPNTQVCPVCLGLPGSLPVLNQAAVESAIRIGLALNCEIVPWCRFARKNYFYPDMPKNYQISQYDEPIAINGYLEAPLDDGTTWRVDIERAHMEEDTGKLTHIGSETGRIHGATTSLIDYNRAGVPLIEIVTKPIVGAGERAPQIARAYVTALRDLLRALGVSDVRMDQGSMRCDANVSLKPIGTAEFGTRTETKNVNSLKSVEVAVRYEMQRQAAVLASGGRITQETRHFHEAGYTSPGRVKETAEDYRYFPEPDLEPVAPSRELVERLRLTIPELPWLSRKRIQQEWGVSDEVMRDLVNAGAVDLVIETVKHGAPSEQARAWWGNFLVQKANEANIGLDELNISPAQVAAVIALVDEGKLSNKLARQVVEGVLAGEGEPDQVMNARGLELVRDDSVTQAAVDEALAANPDVAEKIRGGKIAAAGAIVGAVMKATRGQADAARVRELVLAACGQG

SEQ ID NO: 62172 - protein, 79 aa, Mycobacterium avium
MAEENKSGPAEAVKGVVEDVKGKAKEAVGAVAGRDDLTREGQAQQDKAEAQRDAAKKEAEAEAARGGAEAAEERQRANQ

SEQ ID NO: 62173 - protein, 265 aa, Mycobacterium avium
MTESREPHVAGSAAPRPEPANGLASGQPSSRARYSRVLLKLGGEMFGGGQVGLDPDVVAQVARQIAEVVRGGVQVAVVIGGGNFFRGAQLQQRGMERTRSDYMGMLGTVMNSLALQDFLEKEGIVTRVQTAITMGQVAEPYLPLRAVRHLEKGRVVIFGAGMGLPYFSTDTTAAQRALEIGAEVVLMAKAVDGVFSADPRQYPEAELITAISHREVIDRGLRVADATAFSLCMDNGMPILVFNLLTNGNIARAVAGEKIGTLVTT

SEQ ID NO: 62174 - protein, 382 aa, Mycobacterium avium
MPQTPAPTLAPRRRTRQLMVRDVGVGSDYPISVQSMCTTKTHDVNSTLQQIAELTAAGCDIVRVACPRQEDADALAEIARHSQIPVIADIHFQPKYIFAAIDAGCAAVRVNPGNIKEFDGRVGEVAKAAAAAGIPIRIGVNAGSLDKRFMAKYGKATPEALVESALWEASLFEEHGFSDIKISVKHNDPVVMVAAYEQLAEQCDYPLHLGVTEAGPAFQGTIKSAVAFGALLSRGIGDTIRVSLSAPPVEEVKVGIQILESLNLRPRSLEIVSCPSCGRAQVDVYTLANEVSAGLDGLDVPLRVAVMGCVVNGPGEAREADLGVASGNGKGQIFVRGEVIKTVPESQIVETLIEEAMRIAAQMNSEGGPEATSSGSPVVTVS

SEQ ID NO: 62175 - protein, 185 aa, Mycobacterium avium
MIDEALFDAEEKMEKAVAVARDDLSTIRTGRANPGMFSRIVIDYYGAATPITQLASINVPEARLVVIKPYEASQVGAIETAIRNSDLGVNPTNDGTLIRVAVPQLTEERRRELVKQAKSKGEDAKVSVRNIRRKAMEELHRIRKDGEAGEDEVGRAEKDLDKTTHQYITQIDELVKHKEGELLEV

SEQ ID NO: 62176 - protein, 311 aa, Mycobacterium avium
MATSDPGAGDEPEHAVENTTEGAAGQRAKKKTSRAGRDLRAAIAVGAGIGAVLIVTLVFAPRFWVPIVAMAILVASHEVVRRLREAGYVIPVIPLLAGGQLTVWLTWPFHAAGALAGFGVTVVACLFWRLFMQDNRKRPEPFAGSPSANYLRDASATVFLACWVPLFASFAALLVYPADGAGRVFCLMITVVASDVGGYAVGVLFGKHPMVPAISPKKSWEGLAGSLVLGITAATLAATFLAGKAPWVGALLGVVLVFTCTLGDLVESQVKRDLGIKDMGRLLPGHGGLMDRLDGVLPSAVAAWTVLTLVP

SEQ ID NO: 62177 - protein, 276 aa, Mycobacterium avium
MAVVTMKQLLDSGTHFGHQTRRWNPKMKRFIFTDRNGIYIIDLQQTLTFIDKAYEFVKETVAHGGTVLFVGTKKQAQESIAAEATRVGMPYVNQRWLGGMLTNFSTVHKRLQRLKELEAMEQTGGFEGRTKKEILGLTREKNKLERSLGGIRDMSKVPSAIWVVDTNKEHIAVGEARKLGIPVIAILDTNCDPDEVDYPIPGNDDAIRSAALLTKVIASAVAEGLQARAGVGRGDGKPEVEAAEPLAEWEQELLASATATAAPTEAGAPEPTTDPS

SEQ ID NO: 62178 - protein, 275 aa, Mycobacterium avium
MANFTAADVKRLRELTGAGMLDCKNALAESDGDFDKAVEALRIKGAKDVGKRAERATAEGLVAAQGGALIELNSETDFVAKNAEFQALADQIVAAAASSKAADVDALKAAKIGDTTVEQAIAELSAKIGEKLELRRVAHFDGTVEAYLHRRAADLPPAVGVLVEYQGSGKDSDKEAAHAVALQIAALKARYLSRDDVPEDVVASERRIAEETAKAEGKPEQALPKIVEGRLNGFFKDAVLLEQPSVSDSKKTVKALLDEAGVTVTRFVRFEVGQA

SEQ ID NO: 62179 - protein, 203 aa, Mycobacterium avium
MGFVAQQQPVPGVQAKMEPIPDCGENSYRGSGKLLGKKAIVTGGDSGIGRAVAIAYAREGADVLIAYLNEDDDARDVARYVTDAGRKCVLVPGDLSDPAHCRAVVDRAVQELGGVDILVNNAAYQMMHKNLDEISDEEWDYTFRLNVGAYFYLTKAVLPHLRAGSSIIGSSSVNSDTPNPTLAPYAATKAAIANFSASLAQLL

SEQ ID NO: 62180 - protein, 130 aa, Mycobacterium avium
MGIVGVGIDLVSIPEFAEQVDQPGTVFSETFTPGERRDASDKSSSAARHLAARWAAKEAVIKAWSGSRFAQRPVLREDIHRDIEVVTDMWGRPRVRLSGDIAKHLADVTIHVSLTHEKDTAAAVAILETP

SEQ ID NO: 62181 - protein, 339 aa, Mycobacterium avium
MLAQFGMSIPLVAAPMSGGPTTPAMVSAAARAGALGILAAGYKTVQGIEAEIKAVRAESIPFGVNLFAPNPVPVDPQRYRDYHGIIQREADQFGLTLPPQPVEDDDAFDEKIALLLDDPVPLVSFTFGIPPREVIAALRRAETVVAQTVTTADEAAQAHDAGVDMLVVQATAAGGHSATLSPQRPVPSVPITDLVRQVTARVPLQVIATGGLATPAAVAEVIRAGAHAAAVGTVLLRATESGASATHQAALADPAYTETVLTRAFTGRPARGLRNAFIDAHEAGAPLGYPAIHHLTSPLRKAAAAAARPEYVHLWAGSGYRHATAEPAADILRRLTSAL

SEQ ID NO: 62182 - protein, 299 aa, Mycobacterium avium
MTEFRSGFVCLVGRPNTGKSTLTNALVGTKVAITSMRPQTTRHTIRGIVHRDDFQIILVDTPGLHRPRTLLGKRLNDLVRDTYAEVDVIGLCIPADEAIGPGDRWIVEQIRATAPKTTLVAIVTKIDKVPKDRVAAQLVAVSELVGDSAEIVPVSAVTGAQVDIVIDVLAAALPPGPAYYPDGELTDEPEEVLMAELIREAALEGVRDELPHSLAVVIDEVNPREDRDDLIDVHALLYVERDSQKGIIIGKGGARLREVGTAARAQIEKLLGTKVYLDLRVKVAKNWQSDPKQLGRLGF

SEQ ID NO: 62183 - protein, 260 aa, Mycobacterium avium
MPKREPLAPMATSQNNGAVRSPKTAEIVADTLRRMIVEGQLKDGDFLPYEAELMDHFQVSRPSLREAVRVLESDRLVEVRRGSRTGARVRVPGPEIVARPAGFLLEMAGTTLADVMTARMGIEPYAARLLAEDGTAAAHRELRELIEEIPAAWETGKLGAASTALHRRLVELSGNATLTVIVGMLHEIFERHMTAAFLSVQNVVPKAQYNKLMRSYTRLADLVAARDGAEAEAHWRRHMENASAELLKGHEKTKVRDIMH

SEQ ID NO: 62184 - protein, 246 aa, Mycobacterium avium
MEVTSLREPKMADRVATVLRRMFIRGEITEGTMLPPESELMERFGVSRPTLREAFRVLESESLIQVQRGVRGGARVTRPRRETLARYAGLILEYEGVTVKDVYDARVTLEVPMVEQLAKDRNPKVIAELEQIVERESQLNPGSEAVDQLTDFHAAIARLSGNSTLQIVSDMLHHIIEKANRSLQPTKGTRAEQAVRRSAKTHRMVLDMIKEGDAEKAGELWKRHLQKAEEFVLTGAELSTVVDLLE

SEQ ID NO: 62185 - protein, 2883 aa, Mycobacterium avium
MGVVEEVLAGVFGQVLGVGRVGVEDSFFDLGGDSLSAMRLIAAVNGVLGAGVSVRTLFEAPTVAQLAPRVRGGGRTLARVVAGERPAVVPLSFAQSRLWFLDQLQGPSPMYNMAAALKLQGPLDVSVLRAALADVIARHESLRTVFAVSDGTPHQVVIPAEQADIGWDVVDTAGWSPARMKEAIDAAAGHAFDLSTEIPLRATLFRNSLDEHVLVAVAHHIAADGSSLNPLLRDLTAAYTARCAGRVPDWVPLPVQYIDYALWQRAQFGDLEDPDSPIAGQLRYWQEALAGLPERLALPTDRPYPAVADHRGARVDIDWPASLQQQVSALARVHNATSFMVVQAGLAVLLAKLGASCDVAVGFPIAGRGDPALDDLVGFFVNTLVLRVDLSGDPTVGEILARVRQRSLAAYEHQDVPFEILVERLNPTRSLAHHPLIQVMLTWRGDDPTRLRLGELEVAALPIDIGTARMDLTFSLCERWTEEGRPAGIAGTVEFRTDVFDADTIRTLTERLRRVLDVLTADPGRHLSSIEVLEDTEFARLDIFGNRAALGRSTTGASVPALFGAWAQRVPGAVAISSADRCWTYREVDETANRLAHLLIQHGVDRGQYVGLLLDRSAEAVVAILGVLKAGAAYVPMDPAVPAARIAFIVADADLRVVVTDAGSRSRLTGLGAAIVDLDDPALADYPATEPAGPGPAAGDIAHVIYTSGTTGEPKGVAVSHRNITQLFASLDTGITLGPDQVWSQCHSLAFDFSVWEIWAALLHGGRLVVVSDAVARSPDDLRRLLIRERVTVLTQTPSAAGALSPQGLDSVALVIGAEPCPPELVDRWAPDRVMINVYGPTETTMWVSHSRPLAAGSGAPPIGSPVAGASFFVLDPWLCPAPVGVTGELYVAGAGVGAGYVGRAALTASRFVACPFGGTGTRMYRTGDLVRWGADGQLHYVGRADEQVKIRGYRIELGEIRSALTDLDGVEQAAVIAREDSPGHKRLVAYLTGTADPAQVRTQLADRLPGYMLPSAVLALDALPLTVNGKLDTRALPAPELRAENRYRAPQNPTEESLADVYARLLGLERVGVDDSFFELGGDSLSAMRLITAVNAELDADLTVRALFEAPTVAQLAPRVAAGTGRAGRLVAAERPAVLPLSFAQSRLWFIDQLHGPSPVYNMAVALNLRGPLDTDALGAALGDVVARHESLRTLFPAPDGAPRQVVLEAERAEVDWQVVDAARWPASWLAEATHEAARYTFDLATEIPLRAWLFRRNHDEHVLVAVVHHIAADGWSLTPLVRDLGAAYASRCRGRPPDWAPLPVQYADYTLWQRAQFGDLDDPDSPIATQLQYWQRALAGMPERVALPTDRPYPLVADHLGASVQVHWPAELQQHIAQLARTHNATSFMVVQAALAVLLSTLSANPDVAVGFPIAGRRDPALDDVVGFFVNTLVLRVDLADDPSIAELLGQVRHRSLQAYENQDVPFELLVERLNPTRSLAHHPLVQVMLAWQNNDPVDVSLGDVHVTPMPLENQVARMDLVWSLAERWTADGRPDGIDGTVEFRTDVFDAASIETLVRRLQRVLLAMTADPARPVSSIDILDEPEYAHLDALGNRAALTRPATGWVSISQLFAAQVARTPEAVAISCGERSWTYRELDSSANRLARVLAGRGARPGERVAVLVPRSAGAVVSILAVLKTGAAYVPIDPGLPSARIDFMLADAVPVVTVTTAELRASAGDPDRVVAIDDPAPHVPRIGGRAAPAPDDIAYVIYTSGTTGVPKGVAVTHHNVTQLLGSLDDRLGLGRVWSQCHSLAFDFSVWEIFGALLRGGRLVIVPDDVVRSPEDLHALLIGEGVTVLSQTPSAAAALSPERLESVALVLGGEACPVELMDRWAPGRLMVNQYGPTETTLYATMTTPLRAGGAAVPIGSPVPGAALFVLDGRLRRVPPGVVGELYVAGRGVAAGYLGRAALTASRFVACPFGGTGTRMYRTGDLARWGADGQLHYVGRADEQVKIRGFRIELGEIRSVLAGLDGVEQAAVIARDDGAGHPRLVAYITGTADPAELRAQLADRLPGYMVPSAVVVLDALPLTGNGKLDTRALPAPDYAGGRYRAPGDAIEEILAGIYAQVLGVERVGVDDSFFDLGGDSILSMQVVARARAAGVMCTARDVFVEQTVARLARVVTVAAADGELGAADEGIGPVQPTPIMRWLQDIDGPIDEFNQTMVLAAPAGVSQSDVAVVLQALLDRHPMLRLCLDDDGAGGWDLHVPPPGSVDARPILRTVDVLSEAALARARARLNPGAGLMLSAVWASETSQLALVVHHLAVDGVSWRTLIEDINIAWAQHHSGQEIALPVPGTSFARWSSILAEYAKSPAVVAAAAAWQQVVATPAVLPAVGPDDTYASAGQLSASLDVQTTRLLLGEVPAAFHAGVQDILLIAFGLACTEFVGGGAPIGIDVEGHGRHEEIASGVDLSRTVGWFTTKYPVALRMSRRLDWARVVAGEAALGAVIKDAKEQLRALPDGLSYGLLRYLNPEIEVQGPDPVIGFNYLGRLGGAAADLSDEHWRLSPDSPSVSAAAAAIPLPLGHTVELNAGTMDTDAGPQLHANWTWARSVLTDEQLNRLSRLWFEALTGICAHVQAGGGGLTPSDIAPTRLDQGRIEQLERRYDVADILPLTPLQQGLLFHATGSHAEGDVYAVQLSVTLRGALDPHRLHRALHTVVTRHPNLAARFCPELGEPVQIIPAEPEIAWRYLELDASDVDEQLEQLSADERAAVRELGDRPPFGAALIRTADTEHRFVLTVHHLVMDGWSLPVLLQEIFACYYGARLPAPAPYRGFVTWLAARDVPAARAAWRAVLDGFDTPTLVAPRGADAPGRRGVASFRMAAETTSAGKRSRTPPP

SEQ ID NO: 62186 - protein, 197 aa, Mycobacterium avium
MRLLPEGARIQYGPGQLGTALLRRAQVPLHIDTGLLTDAVVDLDRRGLLAGTPSATYLLGSDALYDWADGRRILRGLDYTHDLTRLSRGAPLVAVNTAIEIDQYGQVNVEGVRDKVVGGIGGHPDYCAAARVSSGGLSIIAVPTRVNGRSPLVEQLSRPTSTPAHDVDLIVTEAGYVDLRAADWPQRRTLIAELFTE

SEQ ID NO: 62187 - protein, 205 aa, Mycobacterium avium
MPPTPWDPETTAVVCVECQNGVLGPESVLPALAADSSELVSSVRRLLDSARQFGARVVHATYEGNLGGRPTGTARIWRALGPATAHWAPGTASTTVLPELLAPTDLVLPRHHGLFPTLDSELLPVLKGFGVSTIVLAGVSLNLAITHTAGHVTQAGFELVVPRDAVGGTPKDYAEQVLDNTIAVLGRLTTIDKLIDEWTSVRSDR

SEQ ID NO: 62188 - protein, 629 aa, Mycobacterium avium
MPFRNVAIVAHVDHGKTTLVDAMLRQSGALHHRGDDTQERILDSGDLEKEKGITILAKNTAVHRHHPDGSVTVINVIDTPGHADFGGEVERGLSMVDGVLLLVDASEGPLPQTRFVLRKALAAHLPVILVVNKTDRPDARIAEVVEASHDLLLDVASDLDDEAAKAAEHALGLPTLYASGRAGVASTEQPADGEVPAGENLDPLFDVLLEHIPAPSGDPEAPLQALVTNLDASTFLGRLALIRIYNGKLCKGQQVAWMREVDGLPVITSAKITELLATEGVERSPTDEAIAGDIVAVAGLPEIMIGDTLADPDHAHALPRITVDEPAISVTIGTNTSPLAGKVPGHKLTARLVRNRLDQELVGNVSIRVVDIGRPDAWEVQGRGELALAVLVEQMRREGFELTVGKPQVVTRTIDGQLHEPFEAMTIDCPEEFVGAITQLMAARKGRMEEMTNHAAGWVRMDFIVPSRGLIGFRTDFLTITRGTGIANAVFDGYRPWAGEIRARHTGSLVSDRAGTITPFAMIQLADRGQFFVEPGQDTYEGMVVGINPRAEDLDINVTREKKLTNMRSSTADVIETLAKPLELDLEQAMEFCAADECVEVTPEIVRVRKVELDATSRARSRARAKARG

SEQ ID NO: 62189 - protein, 496 aa, Mycobacterium avium
MADTRRVWSLRLRLLVGQIVVLALVCLGITAVTELALNHHLVKQLDGQLAGTSFRSALMYPEPNHPRHEHSPYPRPGPGPRFLDAPGQPAGMVAAVVSHGKTVDAGYLTSSGTRDALTSTAQTQLEQIAGSRAPVTVNLDGLGRYRVVAAPSRNGSDIIVTGLSMANIDATLIRMLVIFGIVTVIALAAATIAGVVIIRRALAPLRRVAQTAREVADLPLARGEVELPVRVRESDANPSTEVGQLGAALNRMLDHIADALSARQASETRVRQFVADASHELRTPLAAIRGYTELTQRMGDDREAVAQAMSRVASETERMTRLVEDLLLLARLDSGRPLEREPVDLSRLAVDAVNDAHVAGPDHQWELDLPEEPVVITGDAARLHQVLTNLLANARVHTGAGTVVTTRLSTEPAHTVLQVIDNGPGIPAELQSEVFERFARGDSSRSRKGGSTGLGLAIVSAVVKAHNGTISVNSSPGHTEFTVRLPPNGWQPHASA

SEQ ID NO: 62190 - protein, 377 aa, Mycobacterium avium
MILPAVTAGAELPDLPVDVVERIRIATIDSQSEGTRRAYSSAWRRFEGWCRRNGYESLPAHPTVIAAYLVDAAETVTENGERAYSTVSLGKWCAAIFDRHRRAGVEPNPAAHELVRQTASGIRRQYAARGDRPRQPRTPLLTDDVMLLVSTAREQATGWASQVCERRDSALLLMGFAGAFRRSELSGLTGGDVELHAADGIHVHLRKSKTDQLGEGGTYPLPRTKDALRCPACAYVRWAAVVSAHEDGGNGAVIRLLTDSPEFGSRHTCRSRAPKIDRRAPLFRSCRNGVLSEGPLSGAGIHAVIRRRALRAGFDREAVERLGGHSLRAGFVTQAARAGADHHAIMRQTGHRTPAMVTRYVRESAPLIGNAVTVLGL

SEQ ID NO: 62191 - protein, 357 aa, Mycobacterium avium
MTQPVQTIDVLLAEHADLERRLSDPDLHSNPDEARKAGRRFARLAPIVGTYRKLMAAREDLETARELAADDDSFTAEVADLESRVAQLDTQLTDMLAPRDSHDADDIVLEVKSGEGGEESALFAADLARMYIRYAERHGWTVTVLDEITSDLGGYKDATLSIRSKGDSADGVWSRMKFEGGVHRVQRVPVTESQGRVHTSAAGVLVYPEPEEVAEVQIDESDLRIDVFRSSGKGGQGVNTTDSAVRITHLPTGVVVTCQNERSQLQNKARALQVLAARLQAMAEEQASAEASADRASQIRTVDRSERIRTYNFPENRITDHRIGFKAHNLDQVLDGDLDALFDALAAADKQSRLQQA

SEQ ID NO: 62192 - protein, 312 aa, Mycobacterium avium
MSSGTIRLSLRRAIDDATATLAEAGIASARWDAEQLAAHLAGVDRGRLGLLESPGQEFFQRYRDAVLARARRVPLQHLLGTAAFGPVLLHVGPGVFVPRPETEALLEWATAQQLPPRPVIVDLCTGSGALAVALAHHRAGRGLPARIVGVDNSDAALEYARRNAAGTTVELVRADVIELARVPGSAPDLDGRVDLVVANPPYVPDGAVLEPEVAQHDPHHAVFGGPDGLAVIAPVVELAGRWLRPGGLIGIEHDDTTSHQTVELFDRTGLFDDVRAHRDLTGRPRFVTARRRSGADVSRRDDAERSDEEERR

SEQ ID NO: 62193 - protein, 407 aa, Mycobacterium avium
MSSTVSLVSSDVTDLAGGLLALSDRGAGVPLRELALVGLTAAIITYFATGPVRVLATRLGAVAYPRERDVHVTPTPRMGGLAMFLGVVCAVFLASQLPALTRGFVYSSGMPAVLVAGAVIMGIGLIDDRWGLDALTKFAGQITAASVLVTMGVAWSVLYIPIGGVGTIVLDQASSILLTLALTVSVVNAMNFVDGLDGLAAGLGLITALAICMFSVGLLRDHGGDVLFYPPAVISVVLAGACLGFLPHNFHRAKIFMGDSGSMLIGLMLAAASTTAAGPVSQNAYGARDVFALLSPFLLVAAVIFVPMLDLLLAIVRRTRAGRSAFSPDKMHLHHRLLQIGHSHRRVVLLIYLWVGIVAFGAASTIFFRPRDTAAVMLGAIVVAGIATAIPLLRRGDDYEDEEYDRQ

SEQ ID NO: 62194 - protein, 252 aa, Mycobacterium avium
MPETTFLAESAIEVGEHNHATWLGMTVNTDTILSTGIAALIVLALAFFLRAKITSTGVPSGVQLFWEAITVQMRDQIESAVGMRIAPFVLPLAVTIFVFILISNWLSVLPLQYTDKSGHTTELLKSAAADINYVLALALFVFVCYHVAGIWRRGVVGHPLAVLKGHVAFLAPINVVEELAKPISLSLRLFGNIFAGGILVALIALFPPYIMWAPNAIWKAFDLFVGAIQAFIFSILTILYFSQAMEIEEHHD

SEQ ID NO: 62195 - protein, 197 aa, Mycobacterium avium
  MISC_FEATURE (189)..(189): X=any amino acid
MAERFVVTGGNRLSGEVAVGGAKNSVLKLMAATLLAEGTSTITNCPDILDVPLMAEVLRGLGATVELDGDVARITSPDEPKYDADFAAVRQFRASVCVLGPLVGRCKRARVALPGGDAIGSRPLDMHQAGLRQLGATCNIEHGCVVAQADTLRGAEIQLEFPSVGATENILMAAVVAEGVTTIHNAARXTDVVDLCT

SEQ ID NO: 62196 - protein, 84 aa, Mycobacterium avium
MALDPQVAAAALIGGGLIMGGGAIGAGIGDGIAGNALVSGIARQPEAQGRLFTPFFITVGLVEAAYFINLAFMALFVFATPVGT

SEQ ID NO: 62197 - protein, 178 aa, Mycobacterium avium
MMGDASLSVLASSQVVAEGGNNFLVPNGTFFFVLAIFLIVLAVIGTFVVPPVMKVLRERDAMVAKTAADNRKAAEQFEAAQADYEEAMTEARVQASSLRDNARAEGRKVVEDARAKAEQEVLSTLQLAARQLKRERDAVELDLRANVASMSATLASRILGVDVAPAAATTSATKTSGR

SEQ ID NO: 62198 - protein, 554 aa, Mycobacterium avium
MAELTISADDIQSAIEEYVGSFTSDTSREEVGTVVDAGDGIAHVEGLPSVMTQELLEFPGGVLGVALNLDEHSVGAVILGDFEKIEEGQQVKRTGEVLSVPVGDAFLGRVVNPLGQPIDGQGDIETDIRRALEIQAPSVVQRQSVKEPLQTGIKAIDAMTPIGRGQRQLIIGDRKTGKTAVCVDTILNQRQNWESGDEKKQVRCVYVAIGQKGTTIASVRRALEEGGAMDYTTIVAAPASDSAGFKWLAPYTGSAIAQHWMYDGKHVLIVFDDLSKQAEAYRAISLLLRRPPGREAYPGDVFYLHSRLLERCAKLSDELGGGSMTGLPIIETKANDISAYIPTNVISITDGQCFLESDLFNQGVRPAINVGVSVSRVGGAAQIKAMKEVAGSLRLDLSQFRELEAFAAFASDLDATSKAQLDRGARLVELLKQPQYQPMPVEEQVVSIFLGTGGHLDSVPVEDVRRFETELLDHMRASEDKILAGIRDTQKLSDEAAEELEKVINNFKKGFAATGGASVVPDEHVEALDEEELEKESVKVKKPAPEKKAKKEQK

SEQ ID NO: 62199 - protein, 550 aa, Mycobacterium avium
MTPADLAELLRNTAAAVLAERGLDAAALPATVVVERPRNPEHGDYASNLALQLGKKVGANPRELAGWLAAALAETDGIASAEVAGPGFINLRLEASAQAIVVTNVLDAGDRYGHSDAQSTHNINLEFVSANPTGPIHIGGTRWAAVGDALGRLLSTQGAGVVREYYFNDHGAQIDRFASSLIAAAKGEPTPEDGYAGSYINDIAAQVLRQAPDALSLPEPQLRETFRAIGVDLMFTHIKESLHEFGTDFDVYTHEDSMHTSGRVDQAIARLRETGNIYEKDGATWLRTSAFGDDKDRVVIKSDGKPAYIAGDIAYYLDKRQRGFDLCIYMLGADHHGYIARLKAVAAAFGDDPAAVEVLIGQMVNLVRNGQPVRMSKRAGTVITLDDLVEAIGVDAARYSLIRSSVDTPIDIDLALWSSASNENPVYYVQYAHARLSALARNAAELGLIPDTAHLELLSHDKEGTLLRTLGEFPRVLKTAASLREPHRVCRYLEDLAGDYHRFYDSCRVLPQGDEQPTDLHTARLALCQATRQVIANGLAILGVTAPERM

SEQ ID NO: 62200 - protein, 311 aa, Mycobacterium avium
MLPAGLVASAVVSASSANLGPGFDSIGLALSLIDEITVETTDSGLVVQVEGEGADQVPLGPEHLVVRAVECGLRAVGVRAAGLVVRCRNAIPHSRGLGSSAAAVVGGLAAANGLVAQANCQPLSDAALIQLSSEFEGHPDNAAAAVFGGAIVSWIDRGGQHPRYAAAPLRLHPDIHLYCAIPQERSLTAETRVLLPAQVSHEDARFNVSRAALLVVALTERPDLLMAATEDVLHQPQRAPAMPASAEYLRLLRRHNVAATLSGAGPSLIALTTASALPPEVTEYGAANGFTLAEMTAGQGVRWSPGVTVVG

SEQ ID NO: 62201 - protein, 596 aa, Mycobacterium avium
MTTDTPDAKTHAPVGALTTMVLPELRALANQVGVKGTSGMRKNELIAAIKEVRGQANGAAPAEQANGAEPAEDSGKPDAKDAKDDTTPDTKDANDHTGAQSAAEAPAQNGATAEAPRRERRSASRDAGAAGRGNDDADRETDGREQNKQDSREQSKQDGGDQDQQSSGGQQGRGSNQQDDDGEGRQGRRGRRFRDRRRRGERSGEGGDAELREDDVVQPVAGILDVLDNYAFVRTSGYLAGPHDVYVSMNMVRKNGLRRGDAVTGAVRVPKDGEQPNQRQKFNPLVRLDSVNGGSVEDAKKRPEFGKLTPLYPNQRLRLETTPDRLTTRVIDLIMPIGKGQRALIVSPPKAGKTTILQDIANAITKNNPECHLMVVLVDERPEEVTDMQRSVKGEVIASTFDRPPSDHTSVAELAIERAKRLVEQGKDVVVLLDSITRLGRAYNNASPASGRILSGGVDSTALYPPKRFLGAARNIEEGGSLTIIATAMVETGSTGDTVIFEEFKGTGNAELKLDRKIAERRVFPAVDVNPSGTRKDELLLSPDEFGIVHKLRRVLSGLDSHQAIDLLMSQLRKTKNNYEFLVQVSKTTPGAMDND

SEQ ID NO: 62202 - protein, 80 aa, Mycobacterium avium
MKADIHPTYAETTVLCGCGNTFQTRSTKDGGRIVVEVCSQCHPFYTGKQKILDSGGRVARFEKRYGKRKAGAEKAESADK

SEQ ID NO: 62203 - protein, 263 aa, Mycobacterium avium
MLTERSGRVAAAAKLHRHVGRRRAARFLAEGPNLVEAAAGRGLVRDVFVTEAAQQRYAPLLAALDCPVHLITERAAKALSDTVTPAGLVAVCDLPATGLRDVLAGSPRLIAVAVQISEPGNAGTLIRLSDAMGAAGVLLAGHSVDPYNGKCLRASAGSIFSVPVVAAPDLREAVAAVREAGLQLLATTVDGEVRLDRAGELLAKPTAWLFGPESHGLPSEVAAAADHRVRIPMAGGAESLNVASAAAICLYQSARALELFMRP

SEQ ID NO: 62204 - protein, 347 aa, Mycobacterium avium
MGDQPVDLSETALAEAVGAARQAFARAGDLDALARLKTEHLGDRAPLALARQALGGVPKDQRADAGKRVNAARAQAQQAYDERLAELRAERDAAVLVAERIDVTLPSTRQPVGARHPITILAEHIADTFIAMGWELAEGPEVEAEQFNFDALNFPADHPARSEQDTFYIAPEGSRQLLRTHTSPVQVRTLLARELPVYVISIGRTFRTDELDATHTPVFHQVEGLAVDRGLSMAHLRGTLDAFARAEFGPQARTRIRPHFFPFTEPSAEVDVWFVGKKGGAGWVEWGGCGMVHPNVLRAAGIDPDVYSGFAFGMGLERTLQFRNGIPDMRDMVEGDMRFSLPFGVGA

SEQ ID NO: 62205 - protein, 828 aa, Mycobacterium avium
MRVPYSWLREVVAAGAPDWDVAPAELEQTLIRIGHEVEEVIELGPVDGPLTVGRVTDIEELTGFKKPIQFCHVDVGDDVDREIVCGATNFVAGDLVVVALPGTTLPGGFAITARKTYGRNSDGMICSAAELGLGADHSGILVLPPGTAEPGADGAAVLGLDDVIFHLAITPDRGYCMSLRGLAREIACAYDLEFVDPADVKPLPVDGEAWPLTVQPDTGVRRFALRPVTGIDPAAVSPWWLQRRLLLSGIRATSPAVDVTNYVMLELGHPMHAHDRNRISGGLGVRFARPGETVVTLDDIERKLEPVDVLIVDDAATAAIGGVMGAASTEVRADSTDVLLEAAVWDPAAVSRTQRRLHLPSEAARRYERGVDPAISVAALDRCAALLAGIAGGTVSEALTDWRGEPACDGWSPPAIQMPADLPDRLAGVTYPPGTAAKRLAQIGAAVTADGGTLTVVPPSWRPDLLQPADLVEEVLRLEGLEVIGSVLPSAPAGRGLSAAQRRRRAIGRSLAQSGYVEILPTPFLPAGVFDVWGLPDDDPRRVTTQVLNPLESDRPHLATTLLPALLEALVRNVSRGLVDVSLYALAQVVQPTAETRAVQFIPVDRRPTDAEIAVLDASLPRQPQHVAAVLTGLREQRGPWGPGRRAEAADAFEAVRVIARAAGVDVRLRAAQQLPWHPGRCAEVLVGDTPVGYAGQLHPAVVERAGLPRGTCALELDLDAIPLVATLPAPRVSPFPAVFQDVSLVVAADVPAQAVADAVREGAGDLLEDLQLFDVFTGPQLGEHRKSLTFALRFRAPDRTLTEDDATAARDAAVRRAAEAVGAELRT

SEQ ID NO: 62206 - protein, 173 aa, Mycobacterium avium
MRIEDALRVAADADLDLVEVAPNARPPVCKIMDYGKFKYEAAQKARESRRNQQQTVVKEQKLRPKIDDHDYETKKGHVIRFLEAGSKVKVTIMFRGREQSRPELGYRLLQRLGADVAEYGFVETSAKQDGRNMTMVLAPHRGAKTRARARHPEGPGGAASDSDAAADAEPSSS

SEQ ID NO: 62207 - protein, 64 aa, Mycobacterium avium
MPKAKTHSGASKRFRRTGTGKIVRQKTNRRHLLEHKPTTRTRRLEGRTTVSANDTKRVNSLLNG

SEQ ID NO: 62208 - protein, 131 aa, Mycobacterium avium
MARVKRAVNAHKKRRSILKASKGYRGQRSRLYRKAKEQQLHSLNYAYRDRRARKGEFRKLWISRINAAARANDITYNRLIQGLKAAGVEVDRKNLADIAIADPAAFTALVDVARAALPEDVNAPSDSGEAA

SEQ ID NO: 62209 - protein, 472 aa, Mycobacterium avium
MSRRGKIVCTLGPATNSDELILALVEAGMDVARLNFSHGDYADHKAAYERVRVASDATGRAVGVLADLQGPKIRLGRFATGPTYWADGETVRITVADCEGSHDRVSTTYKQLAQDAAVGDRVLVDDGKVGLVVDGIEGDDVICTVVEGGPVSNNKGISLPGMNVSAPALSDKDIEDLTFALELGVDLVALSFVRSPSDVELVHEVMDRVGRRVPVIAKLEKPEAVDNLEAIVLAFDAIMVARGDLGVELPLEEVPLVQKRAIQMARENAKPVIVATQMLDSMIENSRPTRAEASDVANAVLDGADAVMLSGETSVGKYPLAAVRTMARIICAVEDNSTAAPPLTHVPRTKRGVISYAARDIGERLDAKALVAFTQSGDTVKRLARLHTPLPLLAFTAWPEVRSQLAMTWGTETFIVPMMTSTDGMIRQVDKSLLELGRYRRGDLVVIVAGAPPGTVGSTNLIHVHRIGEDDV

SEQ ID NO: 62210 - protein, 147 aa, Mycobacterium avium
MGAYRTVVVGTDGSDSSMRAVERAAQIAGPDAKLIVASAYLPQHEDARAADALREESYKVSGTAPIYAILRDAKERAHQAGAKNVDERPIVGAPVDALVHLAEEEQADLLVVGNVGLSTIAGRLLGSVPANVSRRAKTDVLIVHTTS

SEQ ID NO: 62211 - protein, 919 aa, Mycobacterium avium
MPKVRAVPATKAATKTATKTAAGAGEEQNRPTLMLLDGNSLAFRAFYALPAENFKTRGGLTTNAVYGFTAMLINLLRDEAPTHIAAAFDVSRQTFRSDRYPEYKANRSATPDEFHGQIDITKEVLAALGITVLAEPGFEADDLIATLATQAENEGYRVLVVTGDRDSLQLVSDNVTVLYPRKGVSELTRFTPEAVVEKYGLTPQQYPDFAALRGDPSDNLPGIPGVGEKTASKWIAEYGSLQALVDNVDSVRGKVGDALREHLASVIRNRELTDLIKDVPLAQTPDTLRLQPWDRDQIHRLFDDLEFRVLRDRLFETLAAVEPEVDEGFDVRGGALEAGELAVWLAEHSSGKRFGLAVAGTHLAYDADCTALAIVSADGEGRYIDTSALDPDDEAALASWLADPGPPKALHEAKLAMHDLAGRGWTLAGVTSDTALAAYLVRPGQRSFSLDDLALRYLRRELRAENPQQQQLSLLDDTDGTDDQAVQTLILRAVAVLDLADALDEELARINSTSLLSGMELPVQRVLAGMEKAGIAVDLDLLSELQSDFAHQIRDAAEAAYAVIGKQINLGSPKQLQAVLFDELQMPKTKRTKTGYTTDADALQSLFDKTGHPFLQHLLAHRDATRLKVTVDGLLNSVASDGRIHTTFNQTIAATGRLSSTEPNLQNIPIRTEAGRRIRDAFVVGDGYAELMTADYSQIEMRIMAHLSQDAGLIEAFNTGEDLHSFVASRAFGVPIEEVTGELRRRVKAMSYGLAYGLSAYGLSQQLKISTEEAKEQMDAYFARFGGVRDYLHAVVEQARKDGYTSTVLGRRRYLPELDSSNRQVREAAERAALNAPIQGSAADIIKVAMIEVDKAIKEAGLQSRILLQVHDELLFEVAAGEREQLEALARDKMGGAYPLDVPLEVSVGYGRSWDAAAH

SEQ ID NO: 62212 - protein, 971 aa, Mycobacterium avium
MADRLIVKGAREHNLRGVDLDLPRDALIVFTGLSGSGKSSLAFDTIFAEGQRRYVESLSAYARQFLGQMDKPDVDFIEGLSPAVSIDQKSTNRNPRSTVGTITEVYDYLRLLYARAGTPHCPVCGERIARQTPQQIVDQVLAMPEGTRFLVLAPVVRTRKGEFADLFEKLNAQGYSRVRVDGVVHPLTDPPKLKKQEKHDIEVVVDRLTVKASAKQRLTDSVETALNLADGIVVLEFVDHEHDAHNREQRFSEKLACPNGHALAVDDLEPRSFSFNSPYGACPECSGLGIRKEVDPDLVVPDPERTLAEGAVAPWSTGHTAEYFTRMMAGLGDELGFDVDTPWRKLPAKARKAILEGSDHQVHVRYRNRYGRTRSYYADFEGVLAFLQRKMAQTESEQMKERYEGFMRDVPCPVCEGTRLKPEILAVTLAAGRHGKKSIAEVCELSISDCAEFLNTLTLGPREQAIAGQVLKEIQSRLGFLLDVGLEYLSLSRAAATLSGGEAQRIRLATQIGSGLVGVLYVLDEPSIGLHQRDNRRLIETLTRLRDLGNTLIVVEHDEDTIAHADWIVDIGPRAGEHGGQIVHSGTYAELLANQDSITGAYLSGKESIEMPAIRRPVDRRRQLTVVGAREHNLRGIDVSFPLGVLTSVTGVSGSGKSTLVNDILATVLANRLNGARLVPGRHTRVTGLDHLDKLVRVDQSPIGRTPRSNPATYTGVFDKIRTLFAATTEAKVRGYQPGRFSFNVKGGRCEACTGDGTIKIEMNFLPDVYVPCEVCHGARYNRETLEVHYKGKTISEVLDMSIEEAAEFFEPITGIHRYLRTLVDVGLGYVRLGQPAPTLSGGEAQRVKLAAELQKRSTGRTIYILDEPTTGLHFDDIRKLLKVINGLVDKGNTVIVIEHNLDVIKTSDWIVDMGPEGGAEGGTVVAQGTPEDVAAVPESYTGKFLAEVIGRGGAAAGAPRRSSRRRKATA

SEQ ID NO: 62213 - protein, 480 aa, Mycobacterium avium
MPSPAVTSPQVAVNDIGSSEDFLAAIDKTIKYFNDGDIVEGTIVKVDRDEVLLDIGYKTEGVIPARELSIKHDVDPNEVVSVGDEVEALVLTKEDKEGRLILSKKRAQYERAWGTIEALKEKDEAVKGTVIEVVKGGLILDIGLRGFLPASLVEMRRVRDLQPYIGKEIEAKIIELDKNRNNVVLSRRAWLEQTQSEVRSEFLNQLQKGAIRKGVVSSIVNFGAFVDLGGVDGLVHVSELSWKHIDHPSEVVQVGDEVTVEVLDVDMDRERVSLSLKATQEDPWRHFARTHAIGQIVPGKVTKLVPFGAFVRVEEGIEGLVHISELAERHVEVPDQVVAVGDDAMVKVIDIDLERRRISLSLKQANEDYTEEFDPAKYGMADSYDEQGNYIFPEGFDPETNEWLEGFEKQRAEWEARYAEAERRHKMHTAQMEKFAAAEAAGHAGGEQSPGNGAPAEKAGGSLASDAQLAALREKLAGNA

SEQ ID NO: 62214 - protein, 272 aa, Mycobacterium avium
MSPATVLDSILEGVRADVAAREALISLSEIKAAAAAAPPPLDVMAALREPGIGVIAEVKRASPSAGSLATIADPAKLARAYEDGGARIISVLTEERRFHGSLDDLDAVRAAVSIPVLRKDFVVQPYQIHEARAHGADMLLLIVAALEQSALVSMLDRTESLGMTALVEVHTEEEADRALRAGAKVIGVNARDLATLEVDRDCFARIAPGLPSNVIRIAESGVRGTGDLLAYAGAGADAVLVGEGLVKSGDPRAAVADLVTAGTHPSCPKPAR

SEQ ID NO: 62215 - protein, 423 aa, Mycobacterium avium
MTVDISPRTRPDLPLPSAAIAEPTRHEPDAGGHFGVYGGRYVAEALMAVIEEVTTAYEKERVNQDFLDTLDYLQANYAGRPSPLYEAPRLSEQAGARIFLKREDLNHTGSHKINNVLGQALLAQRMGKKRVIAETGAGQHGVATATACALLGLECVIYMGAVDTERQALNVARMRLLGATVVSVQSGSKTLKDAINEAFRDWVTNADNTFYCFGTAAGPHPFPAMVRDFQRIIGLEARAQIQAQAGRLPDAVVACIGGGSNAIGIFHPFIDDPGVRLVGFEAAGDGVETGRHAATFSGGSPGAFQGSFSYLLQDEDGQTIESHSISAGLDYPGVGPEHAYLRETGRAEYRPITDAEAMDAFRVLCRTEGIIPAIESAHAVAGALKLGPELGRGAIIVVNLSGRGDKDVETAAKWFGLLGSSDR

SEQ ID NO: 62216 - protein, 284 aa, Mycobacterium avium
MRSGRAVTAAASRLRVFSLRELAVHRRRTTASIAVMAVSATYLVAVFGIFGSITGSVSRLADGIAGVAALEVSGITDAGFADSVLADVAAVPGVATAAPMIRTTAATPSGPVLLLGVDARTAALGGALTDAVSRPVRELSASPDGVQVGPRAGYAKGQAFQLGSAPVTVTEVLAGRQFAELNGGHYVLAPLALAQRVTARAGQLDSILITLTPGADPAAVRAAVGAAVGRRAIVAAPSSRAARAGDGVRLMNYMALLGAAVALVGGAFLIYTTMIMAITQRRPV

SEQ ID NO: 62217 - protein, 406 aa, Mycobacterium avium
MSSPRREYGDALRCGDRSAAVTEIRATLASLGLLASADEDLSTGRHVALELFDAELDQAVRAFQQHRGLLVDGIVGEATYRALKEASYRLGARTLYHQFGAPLYGDDVATLQARLQDLGFYTGLVDGYFGLQTHNALMSYQREYGLSADGICGPETLRSLYFLSSRVTGGSPHALREEELVRRSGPKLSGKRIIIDPGRGGADHGMIMQGPSGPISEADVLWDLASRLEGRMTAIGMETFLSRPVNRSPLDAERAATANNVGADLMISLRCEAQKSPAANGVASFHFGNSHGSVSTIGRNLADFIQREVVARTGLRDCRTHGRTWDLLRLTRMPTVQVDVGYVTNPHDRAMLVSTQTRDAIAEGILAAVKRLYLLGKNDRPTGTFTFAELLAHELSVERTSQMGGS

SEQ ID NO: 62218 - protein, 336 aa, Mycobacterium avium
MPNRQILLRRRPSGLVRPDDTELVTTPAPEPAEGEALLRTTYVGIDAAARTWLDDQPSYLPPVQLGEVIRAAGIGEVVASRCDAFAVGDVVTTLTGFQEYAIIRDDLFSTPIPGEDDQLAIMSVYGPTGATAYFGMTDIGRPQPGETVVVSAAAGATGSIAGQIAKIAGARVVGIAGGPEKCRAVVADFGFDACIDYKNDDVAAALKQHCPRRVDVYFDNVGGPILDAVLGRLAPRARVVLCGVISSYLTGDHPGPANYVNLLSKTALMQGFNALDQWGRFDEAFAALRKWEAEGRLHHRQTIFEGIESCVDALNGLFTGVNIGKTLVKLSEPGAG

SEQ ID NO: 62219 - protein, 338 aa, Mycobacterium avium
MITPLVFAGAVSATGPSLPVRTPPVHAAVTPVAAVSPTFPDLTGPAVVAIDRGPTAFHVAEPALSAPPPAAIVNAPGALGIPSIALAAYRNAEQKMAVAAPGCGVSWNLLAGIGRIESGHAGGGAVDARGTAITPIYGPSLDGTLPGNEVIIQSAAGNRVTYARAMGPMQFLPGTWARYASDGKGDGVADPQNLFDSTLAAARYLCSGGLNLRDQSQVLTAILRYNNSMPYAQNVLGWAAAYATGVVPVDLPPMTGPPPPLGDAHLEHPEGLGPNLPMNINGLPLDDPLARVPLIDLSSPALGSPQPMFPWMTPTPQQAPTQVPGCTVICISSQGSPP

SEQ ID NO: 62220 - protein, 68 aa, Mycobacterium avium
MMSEQHTHDAPHTHEHQHGGVTHAHAHTTHEHDHVEHEHSHAHTDGTEHTHRHVHQAGLEDVHQHAHA

SEQ ID NO: 62221 - protein, 283 aa, Mycobacterium avium
  MISC_FEATURE (272)..(272): X=any amino acid
  MISC_FEATURE (273)..(273): X=any amino acid
MPELPEVEVVRRGLHSHVVGKTIGAVRVHHPRAVRRHEAGPADLTARLLGARITGTDRRGKYLWLLLDGRDTALVVHLGMSGQMLLGAVPRAEHVRISALLDDGTVLSFADQRTFGGWMLADLLEVDGSVVPEPVAHLARDPLDPRFDADAVVKVLRRKHSEIKRQLLDQQVVSGIGNIYADEALWRAKVHGARIADALTRKQLTAVLDAAADVMRDALAKGGTSFDSLYVNVNGESGYFDRSLDAYGREGESCRRCGAVMRREKFMNRSSXXCPKCQPRPRL

SEQ ID NO: 62222 - protein, 253 aa, Mycobacterium avium
MTLVNFTSKVAVVTGAASGIGEATAKRLAEDGAKVVVADINEDGGERVVAEIAERGGEAAFLRTDISIEEDVNSLIDFAVSTYGGLHLAHNNAAVAHTPTPLHELSTDVFDTVTGIGLRGTFFCMRAEIAHMIGHGGGAIVNTASGAALKAAAGMHAYVATKHGIVGLTRNAGLDYARNGIRVNAVAPGSIKTPQMASFPQEMQDEWERIIPMGRMGRPEEVADVVAFLLSDAASFITATTVEIDGAYLQSSK

SEQ ID NO: 62223 - protein, 917 aa, Mycobacterium avium
MRGSPVHAGDQAHQPPDRARCAQAARDGADGPARLAGCSAFDAFRRPGFGGHPARRGRVRVAEVELVQDPPRSPGREVISGLGQGAQRGVDAGRLFHQPAHHHRRCALRADRPHRVEPVRRHDHRGAHQRHVDVGEGDVVGQHLRADHVGERVQGRLGRQIGAVLGVACLHTGAGHVDDVTESPLPPMRQQRQHHPHRAEVVDGHHPFVVVQPIGRVDHRAADRPAGVVHQVIDVVEPAQDVLDGVFHRRGIGDVTGKGMGRTAIGADLVDQRVQCGAVAGEREHGGAPLRDRDGRRPADAAGGAGDDDVPAVQRSPRIVAARPVGVEVLGPVPPQPGRVAGELGNFDSGARQRISRLLADEGGGQVDQVEHLRGDAELGGRHVAHHPGAAAHLEHRGGHRAGQRPAQRRQPGRLGHAPVDAAQADGLLGGEVEGLPVQAVGVHQRDQRVGDVVDRHDVGAPGVGEQHRGEPGQHRQLGQYAEEVVRPVHLVHLAGARVAHHHRRAVDAMTQAGRRAHQQLGLELGLVIRRGQLLAHVEVVLGVLAGEVTGHRDGRHVVQGGAEPLRQLDHGAGAVHVGGPLLGLPGGDVVDRRAVHQVVDVSQLGQGLVAQLQRRQLSDQRFHPVAPGGVALRREPFEAAQRLPADQHPHLRVGPGLQKTSDDAATNKPGTAGNDIPHEDIVAVPAAHVNRRVWGASLGGELRGGRGLAAEVADPVPIHQRPAGDRVAVDHHPAGVGQRMGVHQAVLGVAGVHQRPHHDRVRMREHHRVAVSAVVDLVDGRGELVVELLAADRAGDAVGDVALEPVRRRHQVGRLRHRLGFAVVPAGVDLLDAGQHLDLLAELGGQRGRGLLGPGHGGGVDAVVVLAAELVGDLFGLPLALRGQTRPGHLGVDGAAGVGLGLGVPDEGHRDGPGLR

SEQ ID NO: 62224 - protein, 360 aa, Mycobacterium avium
MTLRVGIIGVGWGARVQVPGFRAAKGFEPVALCARTPDRLERAAAKLGIEQTSTDWQSFVTRDDLDVISVATPTVLHHEMTIAALAAGKPVLCEKPLAGDLEAARHMVRAATDSKLPTACCFENRWNPDWLAVADKVRSGFLGSQYLARVSRSASYWHPSHPLQAHWMYDREQGGGYLAGMLVHDLDFLTSLLGRPVSVCAEVRTSDPVRELPDGGTLPVTADDTAALLMRMESGVTVILSLSVMGAHADHYRLELFGSDGTIIGDGDLRSAAYSLGAATDAGLSPLTVDEREPAHPERLPGGLAGHASRAMALMLQDWLPAFDGGPSGAATFEDGLLSLAVIDAAHRSAEGGGWEQVQV

SEQ ID NO: 62225 - protein, 318 aa, Mycobacterium avium
MANVIRIGTRGSLLATTQAGGVRDALIARGHPAELVTITTAGDRSSGPIESLGVGVFTTALREAIEEGRVDAAVHSHKDLPTADDPRFAVAAIPARNDPRDAVVARDGLVLGELPPGSLVGTSSPRRAAQLRALGLGLEIRPLRGNLDTRLNRVSSGDLDAIVVARAGLARLGRLGDVTETLEPVQMLPAPAQGALAVECRAGDSRLAAVLAELDDADTRASVTAERALLAELEAGCSAPVGAIAEVVESIDEDGRIFEELSLRGCVAALDGSDVIRASGIGTPGRARELGLSVAAELFELGARELMSGARHDPARGN

SEQ ID NO: 62226 - protein, 204 aa, Mycobacterium avium
MPQRGGYAPIIGGIGYLLAAGPAAYTLKSVAAKDVWVRPTERARAEAVGVPAVEPPAKTAAGTWAVSFPRVLSELFWIGRYGERAESMARLLIVTRDRFHVYRHHQHSEESECVPVLMAALGRITGTDTGTGAAAGGDAAETIAVAPSTLWSLTVDPQRPGSLVQSVEGLALAARAVRDQMSNDTWMVLAGVERALALDSEPPD

SEQ ID NO: 62227 - protein, 388 aa, Mycobacterium avium
MTPASGWRAVSSVPARRGDAHIDFARSPRPTIGVEWEFALVDAQTRDLSNEATAVIAEIGENPRVHKELLRNTVEVVSGICRTVPEAMEDLRQTLGPARRIVRDRGMELFCAGAHPFAQWTTQKLTDAPRYAELIKRTQWWGRQMLIWGVHVHVGISSPNKVMPIMTSLLNYYPHLLALSASSPWWTGVDTGYASNRAMMFQQLPTAGLPFQFQTWAEFEGFVYDQKKTGIIDHVDEVRWDIRPSPHLGTLEMRICDGVSNLHELAALVALTHCLVVDLDRRLEADESLPTMPPWHHQENKWRAARYGLDAVIILDADSNERLVTEDLDDVLNRLEPVARKLQCADELAAVADIPRHGASYQRQRRVAEEHDGDLRAVVDALVAELEI

SEQ ID NO: 62228 - protein, 417 aa, Mycobacterium avium
MGRLAIWDRPERRSGIPALDGLRAIAVALVLIGHGGIPGVSGGFIGVDVFFVLSGFLITSLLLDELGRTGRIELTGFWIRRARRLLPALVLMVLTVAAARQLLPERSLTGLRDDAIAAFLWMANWRFVAQKTDYFTQGAPPSPLQHTWSLGVEEQYYFVWPLLLIAVALALAARARRRCTRATVGGVRFSAFVIATVGALASAAVAIVMAADGTRDRIYFGTDTRAQALLVGAAAAALLVSDWPSMNRGWCMLRTRWARRVARILPVLGLAGLAAATHCASGASGEFRHGLLIGVAIAAVAVIAPVAVEQRGVVARVLALPPLVWLGTISYGVYLWHWPIFLALNGERTGWAGMPLFAARCAATVAVAAASWWLLEQPIRRWRPARVPLLPLAAATVASAAAVTLLVVAGGRRAGPA

SEQ ID NO: 62229 - protein, 318 aa, Mycobacterium avium
MQGVFGVFIGTFLIGLREGLEASLIVSIVAAFLKRNGQTLRPMFAGVAVAVLLSVAVGVGLDLLATSLPQAQQEMMETVINAVAVVFVTSMIIWMNRNAAQLKGELEREARQAVHRGGALALGAMAFLAVLKEGFETSVFLLAAAETSHGSRWFAVLGGVLGIATSIGLGVGLYFGGLRLNLGRFFRVTGVFLVLIAAGLVLGALRTAHEAGWLNIGQRQLFDLSGWIPSDSVLGAVTTGVLGIPADPRLVEVLGWLLYAVPVLVVFLRPARLAATPRARGRLLATAATLLLAIAAVLAVAAPARDTVDAARTRTVTD

SEQ ID NO: 62230 - protein, 435 aa, Mycobacterium avium
MGSVNRVYIARLARMLVLGPLGESVGRVRDVVISISIVRQQPRVLGLVVDLATRRSIFIPILRVAAIDPNAVTLSTGSVSLRHFEQRPGEVLAIGQVLDTVVKVNDPELPELAGVDVVVTDLGIEQTRTRDWMVTRVAVRPQRRLRRRGPVHVVDWRNVQGLTPSALALPGQAVAQLLEQFEGRKPVDVADAIRGLPPKRRYEVLKALNDDRLADILQELPELDQAEVLSQLGTERSADVLEEMDPDDAADLLGVLNPTDAEMLLKRMDPGDSASVRRLLTHSPDTAGGLMTSNPVVLTPDTAVAEALARARDPDLTAALSSMVFVVRPPTATPTGRYLGCVPLQRLLREAPAELVGGIVDSDLLTLRPETPLVAVTRYLAAYNLVCGPVVDDENHLLGAVTVDDLLDHLLPPDWRVDMQELDTAGRLEGLGGSG

SEQ ID NO: 62231 - protein, 849 aa, Mycobacterium avium
MARYRLAVRPRGTVALLDGLVRGFLGVAGDGQHRVALTQIHQPDALGLPCRLTDLARRGADDTAAGGDRVQLAVLVHNQRTHQPATAAVIHHGQHALAAAALHRILLDRGALGVPAGRRHQQVGALADHVERQQVVVGVEAHALHTGGGAAHRAQRLVGRREPDGLAVGRHQQQIVLGRAQHRAHEFVVVAQVDRHDAARTVRVEVGQLGLLHQAVAGGQHQVGGVLIAADLDHLGDPLLGLERQQVGHVLTAGGARRLGQFVGLGAVDPALGGEEQDPVVRRAHEEVPHDVVLFEAGALHALAAPLLAAVQVGLGALGVAGLGDGDDDVLAGDQILVADVAVGGHDPGAPRVAVLFDDLGELVAHNAALPFRLGQDVLQVGDLGLDLGQVVDDALPLQGGQPAQLHVQDRLGLDLVDVEQLDQALPRDVDGFRRPDQGDDLVERIERLDQTAQDVGPLVGLAQPVGGAPDDDVELVVDVVADQLVEPQGARHPIDDGQHVGAEAGLQLGVLVEVVQHHLGDGVALELDDDAQPDPVAGLVLDVGDAGQLAVAHLLGDRGDEVVVVDLIRQLGDDQRGATARILFHLNDSAHPDGAAAGLVGVGDALRADDQARSREVGSFHPFHHGGQGGLFVGLVIVQRPEHRLGELAEVVRRDVGGHADRDAPRPVGQQVGEPAGQHRRLLHPAVVVGNEIDCLLVDFAQHLHGQRGQPRLGVPHRGRRVVARRTKIALPVDQRIAQRPRLGHPHQGVVDRGVAVRVVVAHRFGDRPRRFGVAAVRAETRVVHGVEHPAVHRLEAVAHLGQRAADDHAHRVIDVAALHLLLDVDRFDAVGGVTAGWQRGVSHLFLV

SEQ ID NO: 62232 - protein, 300 aa, Mycobacterium avium
MDVVALRDPVSSVVARFIPRAGMIGTSLRDGEVELLGQRRGLDAYVADGKTMGIPILYPWANRLGGNTYAAEGATVTLTPGRNGVRADPNGLPLHGVLAGYPGWRVTAQTANELTAQLDFGADPELLAGFPFPHLLQVAVRLAGRTLTLTTTVTATGDTAVPVCFGFHPYLQLPGVPRAEWVIETPPLRHLGLDDHGLPTGESELQPERREPLRDKTFDDAYDRVDEGAVFAVSGGGRRLEVCFEHGYPAAQIFAPPAKPGEEAVICFEPMTAPTDALRRGGYRRAHPGRPAATRFSIRV

SEQ ID NO: 62233 - protein, 323 aa, Mycobacterium avium
MGTSEDKAPGQPVIHLSQLLRAPVLARSGETVGRVEDVIVRLRGADEYPLVTGIVAGVGGRRVFVGDKSIHEYSADRVLLTKNKIDLRGFERREGEVLLRTDVLGHRLIDVATVELVRAYDIELEQTAAGWMVARLDTRRPPRLFGLIKHSGGHASRDWKAFEPLIGHARSDAVRRLSDRFGELKAAEIADLLEEADKAEGGEILDRVHSDPELEADVFEELDPEKASRLLDEMPDDEVAALLGRMRADDAADAIVDLRQSRRRRVLDLMPAPQRTKVITLMGFNPESAGGLMNVDSVSCAASATAAEALALIASSHSFSPRR

SEQ ID NO: 62234 - protein, 78 aa, Mycobacterium avium
MGDQQSGPQEAVKGAVEGVKGKAKEVGGTILGRDDLTEEGQAQQDKADAQRDAGKKEAEAESARAGADAAEERQKKNQ

SEQ ID NO: 62235 - protein, 365 aa, Mycobacterium avium
MATPSHSDTTDYDEAVAASTSSTSPQDNAVAAPTVRPDSTRYAVRQRPIRRVMLTVPPAPGINPSANSGSPNTASSRALTHPQNAAISSPLPSTRPCTSARHARPNRAVSASSTSAGLCRVRARCALAGSAKVPNSARSPPLQKEGPLPLNTIPVTDGSSWATASASSSAARASVENALCRCGRLNAIRSTSPSRRASTGSAISGMRAGPRSSSQRANSGPACSVEYASDSVSSPRAAGPAGSTARNTSSQIALACGHRPQRAVSSSSDVDTESTVTARRSVQASSVRVKVAASSQNSDLAIWSAEPTATITPGGEAGPSCGALERSTTRSIGHTEYFSISPFLKSLPVSVRGSCSSNAIARGHL

SEQ ID NO: 62236 - protein, 388 aa, Mycobacterium avium
MATGAPTGALPGRIVRAIGEAGSMNPVVLLDEIDKVGSDYRGDPSAALLEVLDPAQNHTFRDHYLDLDLDLSDVVFLATANVVENIPSALLDRMELVTIDGYTEDDKVAIARDYLLPRQRERAALTEDEVTVTDAALRKIAADYTREPGVRQFERLLARALRKVTTKLAEQPGPVTIDEPDLVDYLGRPRFTPESAERTAVPGVATGLAVTGLGGDVLYIEAGATDGEPGLQLTGQLGDVMKESAQIALSYVRSHAAALGVDPKALDRRIHVHVPAGAVPKDGPSAGVTMVTALVSMATGRQVRSDVGMTGEVTLNGRVLPIGGVKQKLLAAQRAGLSTVFIPARNEPDLDDVPAEVLEALTVTPTTDVADIVAQALEPVTAPAAAAA

SEQ ID NO: 62237 - protein, 1269 aa, Mycobacterium avium
MCSETAWKSAHFMRPERRVLFLVGPLRVAGFLGVPGLLGFAGRILDHLICRINHRQFPLTGLAGLAADPQQLTGLDVGAAVAVMEDDRDLPAAVADHDPPAGAAALGDVLDLADPPLDGGPLPGDQAGHHDDRRRPRRMLVGRDLLVLVLRHPRLDLVELLGDALLERVRVGLPDPRFHVVGHDRRRGVGDLADGPGDLVRGPVVQQAAQQPREGPSRQQHRHVGIGMLVAHLGDHQLRGPADPPVRAVHDPQRCVKREVVPAVPQLRGVRRVDHEVHRHQLVGPQAPAVSQRLDHRQVDRVDEHQHLVPRVLHQLRAVGAEHLENGCLGPVFAVEPGQHEHQQREHHDHQPGALGELRHREDAHHDRRQDRRGQVDRQPVPPARFPMGQVVPGHPVTGHREPGEHADRVEGHQRVDRATGRDQQRHRQRGQGDDAVRKHQAVTAFRQLPGQEAVLGDEAGQRREPVEAGVGAGEQDGRRRRLDHDEEDVAHHAAAVDGVADLGQHRGVFGQVRGGVGDVGQIGDPGQQEAQDAGHRGEHPTGVAALRLSEVVHRVGDRLDPGQRRTAVGEGPQQHQDRRAQHQPVALMDRHGPGQVRGIVDRQVADDRAHDADHDGQAHHDDEGIGRHRERHSRFPQSAQVRVADDEHHADRDRQAVGAQHGDRRHHRDRPGGRLHGHGHHVVDQQRGGGDLRHPGAEIVPGDDVGAARAGVGHDDLPVGGGHQHQDEQDDAGDGQQQQERGQPRVRQQLDQDLLGTVGDGRHRVRRKCAQRNTIGQLLGRDVLGDQRLAQKHALGHIPERERDAQVAGRTGHEHRPYVRRLRALCTPARPPVRSGEPVRSGEPAHRGGDTLVVGRQRDPHVLRAARAVELAGRRQNAAPRQPGDRVPARLAAGDPQIQAGFGMVDGEAGRPQRGQQGGPAPFIALPLRPLVRVVVEGGHHGRLHRRRHHHPGVLAHRQQLGDQLGVPGDETGPVAGQRRALGQRVDREQPGGVAVADLRMQDRQRLRVPAQSQIALVGGHQAAPVAGPCRHLAQMIDAQHPPGRVARGVQVVQRRGLRAHLGQRVRAQHPRPGQPGADVIGRIRQLGHHDQVRRPQAQQGGQPRDELLAADHRQHAGLGQPDHPEPAGQGGHRRVPQPGGARGGGVSGRRAGGGQRLLDHGRHRVDGGADGQVDDAVGMRTGQRLGLGQRVPGKLRQGRRDGRATLPELVWHRAAQSPSPCGGRSLTTCGSFSVSPTLAAPPGEPSSAKKSALICVYWLHWSGTSSS

SEQ ID NO: 62238 - protein, 137 aa, Mycobacterium avium
MSVGFVAAVPVRWSDIDMYQHVNHATMVTILEEARVQFLREAFEVDILTIGLLIAEVKVTYKGQLRLVDSPLQVTMWTKRLRAVDFTLGYEVRSVNADPESRPAVIAESQLAAVHIEEERLVRLSPQHREYLQRWIR

SEQ ID NO: 62239 - protein, 131 aa, Mycobacterium avium
MGESSVGSGVRRVEAYVGLDSFRHLAKERALMAGLASSLKVPSEEVPARVANLVEPVSGPRRKKLERMRVASATGRGREPPPGARSESVNVRLVAQRMSGGMTGGRPALAGRRHPRQAGQRSRGGRADRRG

SEQ ID NO: 62240 - protein, 774 aa, Mycobacterium avium
MSVHVTDAKPVSEAEQLLEGLNPQQRQAVVHEGSPLLIVAGAGSGKTAVLTRRVAYLIAARGVGVGQVLAITFTNKAAAEMRERVVRLVGNRARAMWVSTFHSTCVRILRNQASLIEGLNSNFSIYDADDSRRLLQMIGRDMGLDIKRYSPRLLANAISNLKNELIDPAAAVANLTDDSDELSRTVASVYGEYQRRLRAANALDFDDLIGETVAVLRAFPQIAQHYRRRFRHVLVDEYQDTNHAQYVLVRELVGTDTEDGVPPGELCVVGDADQSIYAFRGATIRNIEDFERDYPDATTILLEQNYRSTQNILSAANSVIARNSGRRDKRLWTDAGAGELIVGYVADNEHDEARFVAEEIDALAQKGEITYNDVAVFYRTNNSSRSFEEVFIRAGIPYKVVGGVRFYERKEIRDIIAYLRVLDNPGDAVSMRRILNTPRRGIGDRAEACVAVYAENTGASFADALVAAAEGKVPMLNSRAEKAIAGFVELLDDLRGRLDDDLGDLVESVLERTGYRRELESSTDPQELARLDNLNELVSVAHEFSTDRANAAALDESLDAADDEDVPDTGVLAEFLERVSLVSDSDEIPEDGAGMVTLMTLHTAKGLEFPVVFVTGWEDGMFPHMRSLDDPVELSEERRLAYVGITRARQRLYLSRAIVRSSWGQPMLNPESRFLREIPQELIEWRRTAPAPSFSAPVSGAGRFGTPRAAPTRAAMSKRPLLVLAPGDRVTHDKYGLGRVEEVSGAGESAMSLIDFGSSGRVKLMHNHAPISKL

SEQ ID NO: 62241 - protein, 89 aa, Mycobacterium avium
MAATALAIGGLGLAGLGIATQAQAHPGPFPQWCPGEFWDPGWGNNWDWNNCHDWRGGPPPPPPGPPGPPPPGWGHPGPGGPPPPHGWHP

SEQ ID NO: 62242 - protein, 932 aa, Mycobacterium avium
MADPKLKENTSGGNGSRRRLVIVESPTKARKLASYLGSRYIVESSRGHIRDLPRAAADVPAKYKSEPWARLGVNVDADFEPLYIISPEKKHTVSELKGLLKDVDELYLATDGDREGEAIAWHLLETLKPNIPVKRMVFHEITEPAILEAAENPRDLDIDLVDAQETRRILDRLYGYEVSPVLWKKVAPKLSAGRVQSVATRIIVQRERDRMAFRSASYWDIVAQLDASVSDPQASPPTFAARLTSVDGLRVATGRDFDSQGQLRKADEVIVLDEPQATELAAGLQGAQLSVASVEEKPYTRRPYAPFMTSTLQQEAGRKLRFSAERTMSIAQRLYENGYITYMRTDSTTLSGSAINAARTQARQLYGEEYVSPSPRQYTRKVKNAQEAHEAIRPAGETFATPDAVRRELDGDEFRLYELIWQRTVASQMADARGTTLSLRIGGQAGDRQVVFSASGRTITFPGFLKAYVETVDELAGGEADDAESRLPQLTQGQRLDAIELTPDGHATNPPPRYTEASLVKALEELGIGRPSTYSSIIKTIQDRGYVHKKGSALVPSWVAFAVTGLLEQHFGRLVDYDFTAAMEDELDAIASGQERRTDWLNNFYFGGEHGVADSIARSGGLKKLVGVNLEGIDAREVNSIKLFDDEQGRPVYVRVGKNGPYLERMVTGDDGEPTPQRANLNDSLTPDELTLEVAEQLFATPQEGRVLGVDPATGHEIVAKDGRYGPYVAEVLPEPPPDDDDGSGAPAKKGKKPTGPKPRTASLLRTMDLQTVTLEDALRLLSLPRVVGVDPETGEEITAQNGRYGPYLKRGNDSRSLATEEQLFDITLEEALKIYAEPKRRGRQGAAAPPLRELGADPATGKPMVIKDGRFGPYVTDGETNASLRKGDDVMSLTDQRAAELLADRRARGPAKRTAKKTSRKAPAKKAAKRG

SEQ ID NO: 62243 - protein, 326 aa, Mycobacterium avium
MAYPRQRPRRLRSTPALRRLVAQTSLEPRHLVLPMFVADGIDEPRPIASMPKVVQHTRDSLRAAAASAVAAGVGGLMLFGVPRDEEKDPIGSAGTDPDGILNVALRDLAKDLGDATVLMADTCLDEFTDHGHCGVLDDRGRVDNDATVARYVNLAVAQAESGAHVVGPSGMMDGQVGAIRDGLDAAGFTDVVILAYAAKFASAFYGPFREAVSSSLSGDRRTYQQETGNSREALREIRLDLDEGADIVMVKPAMSYLDVVAAAAEVSPVPVAAYQVSGEYAMICAAAANNWIDERAAALESLTSIRRAGADIVLSYWAADAAGWLS

SEQ ID NO: 62244 - protein, 246 aa, Mycobacterium avium
MAVITEPVKTFSRKFMGYDTTAVDAHIEMLTAKQQLLIDDVESLRARLQESNEQTAALRKEVAALTDTSPAPHAVQQRMAKMLARAVDEVAEMQAEARAEADALIAAAEAEAQAAERKRDEVLADMAAQQEALEAEYRETKEKLDAELADMRAEAQAAIDEARRAAERECEQLLGDAKQGADHYRDTARRAVEEASAQRIKILEQLMSVYRELEDVPAALQAAYDEQQGSADDGVLAAVDGKVRAG

SEQ ID NO: 62245 - protein, 1116 aa, Mycobacterium avium
MTIDDRALHVGREQLTELDGGPFPLTRGQLDIWLAQETDQQGARWQLGYLLRIEGTVDPWLLEHTIRQVVREAEPLRAAFFQVDGQVFQKAVDYPDVELACYQRMGSQDPVQEAYRLAASIQRTVMPLDGPLFKFALLQTRVDEFYLFVCCHHIVADGIGLALICHRIGDVYNALASGAPIPPAYFGSLSDLIACEAEYEASTDYLDDRAYWAENLPSESEPGYRFAPASEREPYESSAPIELDPVAVAGIQKLSQELGVRRSSVLAAACALLVGGCDLENSEIVFEFPVSRRVRPEAQTVPGMITGFVPLVLKASPGSSVASFCEHVDTRLGEALQHQRFPVHTIENKRRGSTQTSNRVILNFIPTTNLANIAGARVSGTLTHTNLVDQLGLDFFSDHDRLFLGMQPGATTGGFGGAGQWLSDCDVHDVVGRLERVLVAMTADPGRRLSSVDVLGVGERVRLDELGNKAVLAGPRGVSVSIPDLFAAHVAGTPDAVAVSFGGRSVSYRQLDEASNRLAHLLVARGVGPGERVALLFSRSVDAVVAMLAVLKTGAAYLPIDPGVPDERVGFVLADAAPIAAITGTGLAERLGGQDVAVIGVDDPDVVPAVDAQPSTAPPGPAPDDVAYLIYTSGTTGVPKGVAVTHRNVTQLLGALDAGLPAPGVWALCHSLAFDVSVWEIFGALVRGGRLVVVPESVTVSPQQLHGMLVAEQVSVLTQTPSAVAALPADGLESVAVVVVGEACPVEVVDRWAPGRVMVNAYGPTETTMCVAISAPLEPGSGVPPIGAPVSTAALFVLDRWLRPAPPGVVGELYVAGAGVAIGYTGRAGLTASRFVACPFASMSGQRMYRTGDLVRWRADGQLDYLGRADEQVKIRGYRIELGEIRSALVDLDGVEQAAVIAREDRPGDKRLVAYVTESATGTADPGEIRARLAKRLPEYMVPAAVVVLDALPLTVNGKLDTRALPAPEFQNADYRAPASPVEEILAGVFADVLGLDRVGVDDSFFDLGGDSLLAMRVIAAIETTLNADLSVRTVFEAPTVTQLAQRVSGDRGRRQPLVAVERPAVVPLSFAQQRLWFIDQLLGPSPIYNMAAALRLTGRLDADALGTALADVVAR

SEQ ID NO: 62246 - protein, 233 aa, Mycobacterium avium
MLTSAFFAICSVLLEGKAEGPQQRSSFVVSRRRGDDVDVHAADPVDLVHIDLVEHRLLGQPEGVVADTVELLGREPAEVANTGQRDRGEPVEELPHPVPAQGDPGADRHALAQLELRDGLARPADLGPLPGDQRQVVDGTVDQLRVARRLTDAHVDHDLGHRRDLHDVGVSELLLQRIANLVAVALFQARLNFLCRGHLRCPCRCAWRYGRACRSPRRGGSRPGRACRRSRPP

SEQ ID NO: 62247 - protein, 476 aa, Mycobacterium avium
MGIDAGTTATPRTLAEKVWDDHVVVSGGANEPDLIYIDLHLVHEVTSPQAFDGLRLAGRPVRRPDLTLATEDHNVPTIDIDKPIADPVSRTQVETLRRNCAEFGVRLYPMGDAEQGIVHVVGPQLGLTQPGMTVVCGDSHTSTHGAFGALAMGIGTSEVEHVLATQTLPLRPFKTMAVNVDGELPAGVTAKDIILALIAKIGTGGGQGHVIEYRGSAIESLSMEGRMTVCNMSIEAGARAGMIAPDDTTYEFLRDRPHAPKGAQWDAAMRYWQQLRTDPGAVFDTEVYLDAASLSPFVTWGTNPGQGVPLAAAVPDPELMTDDAERQAAEKALAYMDLRPGTPMRDIAVDAVFVGSCTNGRIEDLRVVADVLRGRKVAPGVRMLVVPGSMRVRAQAEAEGLGEVFTAAGAEWRQAGCSMCLGMNPDQLAPGERCAATSNRNFEGRQGKGGRTHLVSPAVAAATAVRGTLSAPADLD

SEQ ID NO: 62248 - protein, 518 aa, Mycobacterium avium
MWPNGTITPYGADQLAAGDLPNLWVTSADRQHIFYLMGGLAPFPGVTDGILCVENPVGMAAKFKNLDLQAARQDGVTYQGKVYDPAIIKLKLQVHARTPQVLQQIMDEWMGAWSTPRDTTLTMEYITPDGGYWTAQVRLMPDSWGDAMKLTPREIGVWDMTHICRIDDSFWTTIPVVDSWRPTYADFSDNFATPTESGLGPGWSTIYNPKGSGYEYVGADRQVHWADSGNSTQGVLNIYTAQPTDTDNQVVTVTLGAGWDGVVLFGEATTVIGARMDANGNGVFCDFGWGGIEVYCVVDGVVTMLYRVVDLFSAPLPGETWQFIAGAVPGVPRSFAVTRFDGTEVVSFTEAGETSPLGPDNRYTGFGMTTGQGIFNEAQPAPIAYFAGADNNQAAETGYVGLSNQGTQEGWPDILFYGPGTWGFGNGPNSTNMITVGPLKAGDVAFLSTLPRQQRVVNMNNLTDTSFQKLLSGVYDTPIPGVATPDQVTLSQIPVSITGGTASSQIVMSLTPRRIHPA

SEQ ID NO: 62249 - protein, 453 aa, Mycobacterium avium
MTTTSETSEASGAPQATPLTPVISRFWDDPESWTLQTYHRHGGYAAMKKALAMEPDAVIGMVKDSGLRGRGGAGFSTGTKWSFIPQGDTGAAAKPHYLVVNADESEPGTCKDIPLMLATPHVLIEGVIIAAYAIRANHAFIYVRGEVLPVLRRLQNAVAEAYAAGYLGRDIDGSGFDLELVVHAGAGAYICGEETALLDSLEGRRGQPRLRPPFPAVAGLYGCPTVINNVETIASVPSIIGNGVDWFRSMGSEKSPGFTLYSLSGHVTRPGQYEAPLGITLRELLDYAGGVRAGHRLKFWTPGGSSTPLLTDEHLDVPLDYEGVGGVGSMLGTKALEIFDETTCVVRAVRRWTYFYKHESCGKCTPCREGTFWLDQIYERLETGKGTAEDIDKLLDISDTILGKSFCALGDGAASPVMSSIKYFRDEYVAHVENGRCPFDPRDSMLTPNGSDS

SEQ ID NO: 62250 - protein, 317 aa, Mycobacterium avium
MASALLVVLLLAGVGLGAGVAWFDTKLHREPVLADYPGRPEPGRGSNWLIVGSDSRQGLSAEQQQQLATGGDIGDGRTDTILLVHLPGVGSGVAPTMVSIPRDSYVPIPEHGKDKINAAFAMGGATLLVRTVEQATGLRIAHYAEIGFGGFAALVDALGGVRVCPQAPMHDPLAGLDLPAGCQTLDGRNALAYVRSRDTPRADLDRMVNQRQFVAALLHRAASPAVWLNPWRWYAAPRAVADSLTVDRADHAWDLARLGWALHGSPATVTVPIGEFTSGDAGSVVVWDHARAARLFDALSSDGQLPAGSTDEQQPSS

SEQ ID NO: 62251 - protein, 209 aa, Mycobacterium avium
MTDLAELVAPAHTAVITQEVQGAVVGPDAGLGALAAEARRVALPNIVRLLPPARAAGVRIVHCLVQRRPDGLGSNHNAKIFALGRRSGQGRVDISPGTPGATLLPELGPAPSDLVLSRWHGVGPMGGTDLDAVLRNLGVSTLVVVGVSLNIAIPNVVMDAVNAAYRVVVPRDAVAGVPAEYGEAVIANTLSLLATITTTDELLRAWSRP

SEQ ID NO: 62252 - protein, 467 aa, Mycobacterium avium
MKLNAHNLTGLKIPVPTYDRSQIGIGIAHFGVGGFHRAHQAMYLDRLLNDGLARDWGICGIGVLPDDRRMRDALRSQDYLYTLILEHPDGTQEPRVIGSIVDFRYAPEDPGSVVDLLADPATRIISLTITEGGYQPPLSAAFELVAEALNRRRERGLPSPTIVSCDNIIKNGDVARRAFTAHAEQVNPELAQWMRENTTFPNSMVDRITPTPTPDLVDRLAAEFGVQDAEPVVAEPFAMWVLEDDFADGRPPLDKAGVRLVDDVAPYEAIKLRLLNAGHQGLCYFAYLAGYREVHEAAQDPVIAEFLARYMDSEAMPTLPRMPGLEDFRDGLIPRFANAYVGDQVARLCADSSDHIPKWLLPVVHDNLRSGGPVQLSAAIVASWARYAEGVDEQGRPIEVVDRLADTLVPLARSQRENPDAFLANRAVFGDLIDAPRFREAYRWALDSLHRRGARATLRALIGADGS

SEQ ID NO: 62253 - protein, 605 aa, Mycobacterium avium
MTNTVDSAGTGGGRAAPGGSASALAVGTPLTSIPDYRNEIHTAEDVIDVEAYGGGFDLTRRATAPKLRVGRDRWFNLLWLIPIGFALLIAGVAVGKGLHNMPAVQSFIQRYPGTDSAGVPPGLPAWIGWTHFFNLFMMMFIIRTGIQILCDHPRLYFSRNATPGKDEWLRVGPPVPDDELWTANADTVALPPQFGLPGFRHSIGLARWWHLGVDVLWLLNGAVFYVLLFATGQWRHIVPTSWDVFPNAASVAVQYLSLDWPTDNGWVAYNGLQLLSYFTTVFIAAPAALITGLGMSPALSQRVHWLSKRLSIQHARSLHFLVLVYFLFFILVHVTMVLTTSALRNLNHMFAARDDNSWIGFGIFSAAMVLTAIAWVWATPFTIRHPRVVQRVGYALVGPFQRMLEQLDPKPGAFTEKDISPHHWRNGRLPETVEYKELEANDFKDWRLKVYGLVEHPMEFSLEDLMALPYHEQISQHFCIQAWSGVAKWGGVQMKTIMDIVKPLPEAKWAVFYSMGLGATGGIYYNAHHIGQMDHHMTMLAYKMNDQQLPYMHGRPLRLRNELQHGFKLVKWIKGIEFVADYRDIGSGYGGYSEDHKYFGRHQTL

SEQ ID NO: 62254 - protein, 296 aa, Mycobacterium avium
MVRAERAPKSTGFPQLPPAPDDYPVFPDKSTWPVVFPELPPSPGGGPSRPPQHISKAAAPRIPADRLPNHVAIVMDGNGRWATERGMSRTDGHKAGEAVVIDIVCGAIEIGIKWLSLYAFSTENWKRSPEEVRFLMGFNRDVVRMRRVNLNTIGVKIRWVGSRPRLWRSVINELAIAEEMTKRNDVITVNYCVNYGGRAEIAEATKEIARLAAAGRLNPERITESTVAHHLQRPDIPDVDLFLRTSGEQRSSNFMLWQAAYAEYIFQDKLWPDYDRRDLWAACQEYASRNRRFGSA

SEQ ID NO: 62255 - protein, 346 aa, Mycobacterium avium
MGLQEVWFGIIGMLFLGFFILEGFDFGVGMLMEPFARVGIGEPEPLRRTALNTIGPVWDGNEVWLIVGGAAMFAAFPGWYATVFSTLYLPLLAILFGMILRAVAIEWRGKIDDTKWRGWADFGIAAGSWLPAVLWGVAFAVLVRGLPVDADGHIHLSVTDVLNPYTLLGGLATAGLFLLYGAVFVALKTSGAIRDDAYRFAVWLSLPVTGLVAGFGLWTQLGYGKDWTWLVLAVAVVAQVAAVLLVWRRASDGWAFTCLALVVAAVVILLFGALYPNLVPSTLDSRWSLTIYNASSTHYTLKVMTWVTAIMAPVTVVYQAWTYWVFRQRLSADRIPAPVGLTRRPS

SEQ ID NO: 62256 - protein, 200 aa, Mycobacterium avium
MLGVERVGVDDSFFYLGGDSILSMQVVARARAAGVICRPRDVFVEQTVARLARVSQVAVDGELGAADEGIGPVRPTPIMRWLQDIDGPIDEFNQTMVLAAPAGVGVDDVAVVLQALLDRHPMLRLRVQDDGAGGWSLEAPEVGSVRAADCLRGGRQFCPNPALWRRRSRPQRVRRRPAVRGMGKRDKPNWPLVVHPPGGL

SEQ ID NO: 62257 - protein, 411 aa, Mycobacterium avium
MGQTAAMAEADRTWMVDTLLALLQTPSPSGRTDAVMQVIGDILDDFGVPFTLTRRGALTAELPGESATTDRALVVHSDTIGCMVRGLKDNGRLELVPVGTFSARFAAGARVRIFIDDPEEFITGTILPLKSSGHAFGDEIDTQPTGWEHVEVRIDRKVSCRDDLVRLGLQIGDFVALITSPELTADGFVVSRHLDGKAGVAIALALAKNFAENKVVLPHRTTIMVTITEEVGHGASHGLPPDVAELISVDNAVCAPGQHSLEDGVTIPMADMHGPFDYHLTRKLCRLAQDRGIPFARDIFRYYRSDAAAAIEAGANTRAALVGFGLDGSHGWERTHIDSLEAAYNLLHAWLQTPLTFAKWDAKPTGSLRDFPSSKQPAPSERWVPLSRGDYESPGDASPGTHWPPSEGPQS

SEQ ID NO: 62258 - protein, 389 aa, Mycobacterium avium
MPIVTATSALSRVFGSCGALAAATIRRAPRRVWATVMTVLIGVLTTVVITGTNADMIGSARAIFAPVAEADVWVSADPPDSFPTDVLPQGLSERLAALPGAARVTEGACGFAVVAGTRVLLDGFAAGSRDALFRALDDRVRAEVLAGRGVVLTQNLGKALNVRAGDRLRLQTPHGPREAAVLAVVPFFSTVIGTVGMDLAQLRAWFDRPAATTLQITAAPGVDPRRLLADVRATVPAPNHVYDGRAALAGLQAPLHQSMFIANAVWIIVVAVAAVALLNTLTLSVTERRREIGVLRAMGAGRRFILRMVLAEAAGIGCVGGGLGFLLGLADQWLFSRISGDMMNFPVAFRLSPLALACTAGALGITLLGSVPPARRAARLNIIEAVSVN

SEQ ID NO: 62259 - protein, 230 aa, Mycobacterium avium
MSVPDFAARPQLSDDVAHLIRGRIFDGSYAAGSYVRLDQLAAELGISVTPVREALFALRAEGLISQQPRRGFVVLPVTRRDVTDVANVQAHVGGELAARAAVNITDDQLRELKQIQAQLEDAYAGDEHERTVRLNHEFHRAINIAADSPKLAQLMSQITRYAPESVFPAIQGWPEQSMKDHRRILSALKKRDDKLARAAMSEHLAAGAVPLIDHLVARGVVVDGGGPDPG

SEQ ID NO: 62260 - protein, 423 aa, Mycobacterium avium
MTRNQHDPYDDFDRQRRVAEAPKTAGLPGTEGQHRTDFARDRARVLHSAALRRLADKTQVVGPREGDTPRTRLTHSLEVAQIGRGMAVGLGCDLDLVELAGLAHDIGHPPYGHNGERALDEVAAAYGGFEGNAQNFRILTSLEPKVLDAQGNSAGLNLTRASLDAVIKYPWRRGEGPGTSKFGFYDDDREAAAWVRAGAPAGRMCLEAQVMDWADDVAYSVHDVEDGVVSQRIDLRVLADDDEAAALAKLGESEFSRVGADDFMAAARRLSALPVVAAVGKYDATLASSVALKRLTSELVGRFASAAIATTRAAAGPGPLVRYRAELAVPDLVRAEVALLKILALQFIMSDPRHQQTQAGQRERIHRVAHWLYAGAPRTLDPVFAAAFNTAADDGARWRVIVDQIASYTEGRLERIDARQAGP

SEQ ID NO: 62261 - protein, 253 aa, Mycobacterium avium
MVATLFYTDELPDAGSLAVLGGDEGFHAATVRRIRPGERLVLGDGAGGLARCEVEHAGRDGLRARVLERWTVAPPNPPVTVVQALPKSERSELAVELATEAGADGFLAWQAARCVANWHGPRVDKGLRRWRAVAKAAARQSRRPHIPTVDGVLSTASLTSRIRDEVAAGAVVLALHESATDRLTDVPVAQAKSLFLVIGPEGGIADDELAALRQAGALSVRLGPQVLRTSTAAAVALGALGVLTPRWDDAASP

SEQ ID NO: 62262 - protein, 284 aa, Mycobacterium avium
MTPNLAKRVLHGTTMATVVSPDGTVIGYESVGAGPPLLLVHGSTGTRARWRPVTPELARRYTVHAMDRRGRGLSTAEAEPYSLGREAEDVAAVAEAVGGDVYVVGHSYGALAVLDAAPITRAFRRIVLYEPPIPSLGLDVGSPGGWARITALSDPRDILEAFYRETLQLSESAIKDLANREFPYLAGSIRHTAGRELAQTRAYRLTERHANITTPVRMLLGTESPAYLRAATAVLAAKIPGATIVALHGQGHQAIDYDPDQFARAVLEFDSEEVDSGGVGAVTA

SEQ ID NO: 62263 - protein, 325 aa, Mycobacterium avium
MNTVHVNIELARYSDWAFTSAVVALVIALLLLAFELAYAGGRRADARARVLAGAVSADSATPGVVDEVPRRPVDERAGRAGLAVVYLGTGLLLACLVLRGLATLRVPWGNMYEFINLTCLCGLVAGAIVLRRPQYRPLWVFLLLPVLILLTVSGRWLYTNAAPVMPALQSYWLPIHVSVVSLGSGVFLVAGIASILFLLRTSPLGDPGNDSAPARLVRRFPDAQTLDRIAYRTTIFAFPVFGFGVIFGAIWAEEAWGRYWGWDPKETVSFVAWVIYAAYLHARSTAGWRDRKAAWINVAGFVAMVFNLFFVNLVTVGLHSYAGVG

SEQ ID NO: 62264 - protein, 362 aa, Mycobacterium avium
MVGAAGSRSRAALMSRRMAASMLIGQVGEQRRAQVPLTEVGEHDDHQLAGVLGPAGHLQGGHQRRPRGDADQQPLLGGQPAGQRDRLLVADGDDLVDQIHGKHRRHEPSAETLDRMRPLLAAGQHRRRGRLHGDELRRRLAFLDDLGDTGDGAAGADAGDEDVDLAVGVAPHFLRGGAAVNRRVGRVLELLRHEIPVVALGQFLGLGDRARHAVGARRQHDLGAQGAQQHSPLHAHRLRHGEHAAVAARRGHQRQRDTGVAARRLENDGVRFDQARLLGRIDHGHPDTVLHAVARVEEFQLGDDVGDRTFGDPVQPDQRGVSDQLRDVLGDAHLPFVSHDVGPGLVGLPANIELYGHFGGDG

SEQ ID NO: 62265 - protein, 552 aa, Mycobacterium avium
MTTRGRKPTPGRITYVGSGPGDPGLLTARAAAVLANAALVFTDPDVPEPVLALIGKDLPPVSGPAPAEPAPNGEGAGSEQGQAQPAVISGGPDIRPALGDPAEVAKTLTAEARTGVDVVRLVAGDPLTVDAVITEVNAIARSHLHIEIVPGLAPTNAVPTYAGLPLGSSHTMADVRGDVDWEALAAAPGPLILQATASHLADAARTLIEHELAENTPCVVTAHGTTCQQRSIETTLQGLTDSAVLGGTDPAGPLTGPLVVTIGKTVSARAKLNWWESRALYGWTVLVPRTKDQAGEMSERLTSYGALPIEVPTIAVEPPRSPAQMERAVKGLVDGRFQWVVFTSTNAVRAVWEKFGEFGLDARAFSGVKIACVGESTADRVRAFGISPELVPAGEQSSLGLLDDFPLYDSVFDPVNRVLLPRADIATETLAEGLRERGWEIEDVTAYRTVRAAPPPAETREMIKTGGFDAVCFTSSSTVRNLVGIAGKPHARTIIACIGPKTAETAAEFGLRVDVQPETAAVGPLVDALAEHAARLRAEGALPPPRKKSRRR

SEQ ID NO: 62266 - protein, 201 aa, Mycobacterium avium
MDGVTELEKGPRGRRRGRGARERILGAAQQLFRERGINNTGMDLLCAAAQVSKRTAYQHFGSKDELIAEYLRRLDVDTTSEVFERDDLTPRERLLAVFATPPAFTDEPMPLCPFIAAAVEISDPQHPARVRAREYKTSVAARLSETAREAGAADPELLGEQLALLLDGASVRTRALGSDAFPTAAGIAAALVERAIPPTAR

SEQ ID NO: 62267 - protein, 77 aa, Mycobacterium avium
MAVGISPGELRELTDDELTERLRESKEELFNLRFQMATGQLTNNRRLRTVRQEIARVYTVLRERELGLASGPDGKES

SEQ ID NO: 62268 - protein, 122 aa, Mycobacterium avium
MVSTTHNQQTYVRDTLDGFLAQRVDFPMEVIVADDASTDATPRIIQEYADRHPNLFRPILRSRNVGLNANLTGALSAARGEYIALCEGDDYWVDPLKLTKQVAGLDEDPRPPRCVSTPVQVV

SEQ ID NO: 62269 - protein, 496 aa, Mycobacterium avium
MTVLDYPVWLRVDHWLNVLFVTLIIRSGIEILSTHPKLYWHDDSKPGTEWARFTRKVMPRDRIYDTLDEEEDYHPLISLPGHAQLGMGRHWHFFAVIGWVLVGLSYYVLLFATGQWHRYWPYSWSIFPEAFNDIVTYLTFNLPPVLPGEPLDAMQKLTYAGVVFVLAPFQILTGAAQSPAIEARFPWYVRMWGGRQWARSLHFLGLVAFVVFIVIHLSMIFFWGWGRLTAAMIFGSVRNTYWATAISLLIIAAIVGIHVAATLWSLRHPRSVQRVLGRVVTAARLMLLRPLNSRQNYPASKITPRHRINGKPPTSTEYKVMAVHNFVDWRLRVGGLVENPVVLDLAALRSLAEPETQRVMHNCVQGWTSIGEWTGVHLRRLVDLVRPLPQARYICFLTMQDNSTDEPASHGGGQFYEVLDLEFADKPQTLLAYEMNGAPLPIQHGAPLRLRVETQVGFKMAKWINQIEFVDDFAGIGMGTGGWREDRVYYDKDVEI

SEQ ID NO: 62270 - protein, 77 aa, Mycobacterium avium
MSDKSGPEEAIEGVVEGVKGKVKEVAGAVAGRDDLMREGQAQQDKAEAQREAAQKEAEAESARKAAEINEARQKAEQ

SEQ ID NO: 62271 - protein, 163 aa, Mycobacterium bovis
  MISC_FEATURE (10)..(10): X=any amino acid
GTAGAVNIEXSGTSVGSVYDPVVGINCMGGVDGAGGAAGAVTTITHASFNDPHGVAVNPGGNVYVTNFGSGTVSVINPATNTVTGSPITIGNGPSGVAVSPVTGLVFVTNFDSNTVSVIDPTTNTVTGSPITVGTAPTGVAVNPVTGEVYVTNFAGDTVSVIS

SEQ ID NO: 62272 - protein, 519 aa, Mycobacterium bovis
LLVNGRVYSPTHPEATAMAVRGDVVAWLGSDDVGRDQFPDADVQDLDGRFVAPGFVDSHIHLTATGLMLSGLDLRPATSRAQCLRMVADYAADHPGQPLWGHGWDESAWPENAAPSTADLDAVLGDCPAYLARIDSHSALVSSGLRRLVPELAAATGYTAQRPLTGDAHHLARAAARYLLTDVQLADARAVALQAIAAAGVVAVHECAGPEIGGLDDWLRLRALEHGVEVIGYWGEAVATPAQARDLVTETGARGLAGDLFVDGALGSRTAWLHEPYADAPDCIGTCHLDVDGIEAHVRACTKAEVTAGFHVIGDAAVSAAVAAFERVVADLGVVAVARCGHRLEHVEMVTADQAAKLGAWGVIASVQPNFDELWGGGDGMYARRLGAQRGSELNPLALLASQGVPLALGSDAPVTGFDPWASVRAAVNHRTPGSGVSARAAFAAATRGGWRAGGVRDGRIGTLVPGAPASYAIWDAGDFDVCAPLDAVQRWSTDPASRGPALPLLGPTDALPRCRHTV

SEQ ID NO: 62273 - protein, 346 aa, Mycobacterium bovis
MASSVIRPVTIQPRNRSRGPKSATGTSGPGLTTGTTGSSGRSLARTQDSGGRAVIGVDRRLSVMSSGRLLLGATPLGQPSDASPRLAAALATADVVAAEDTRRVRKLAKALDIRIGGRVVSLFDRVEALRVTALLDAINNGATVLVVSDAGTPVISDPGYRLVAACIDAGVSVTCLPGPSAVTTALVMSGLPAEKFCFEGFAPRKGAARRAWLAELAEERRTCVFFESPRRLAACLNDAVEQLGGARPAAICRELTKVHEEVVRGSLDELAIWAAGGVLGEITVVVAGAAPHAELSSLIAQVEEFVAAGIRVKDACSEVAAAHPGVRTRQLYDAVLQSRRETGGPA

SEQ ID NO: 62274 - protein, 317 aa, Mycobacterium bovis
MVDVHAVGAVTVGLAGAELTEMSMMNAGAAQVRMFSDDGFCVHDPLIMRRALEYATGLGVLIAQHAEEPRLTVGAFAHEGPMAARLGLAGWPRAAEESIVARDALLARDAGARVHICHASAAGTVEILKWAKDQGISITAEVTPHHLLLDDARLASYDGVNRVNPPLREASDAVALRQALADGIIDCVATDHAPHAEHEKCVEFAAARPGMLGLQTALSVVVQTMVAPGLLSWRDIARVMSENPACIARLPDQGRPLEVGEPANLTVVDPDATWTVTGADLASRSANTPFESMSLPATVTATLLRGKVTARDGKIRA

SEQ ID NO: 62275 - protein, 154 aa, Mycobacterium bovis
MFRLLFVSPRIAPNTGNAIRTCAATGCELHLVEPLGFDLSEPKLRRAGLDYHDLASVTVHASLAHAWEALSPARVFAFTAQATTLFTNVGYRAGDVLMFGPEPTGLDEATLADTHITGQVRIPMLAGRRSLNLSNAAAVAVYEAWRQHGFAGAV

SEQ ID NO: 62276 - protein, 344 aa, Mycobacterium bovis
MWIATAVIAALVVIAALTLGLVLYRRRRISLSPRPERGVVDRSGGYTASSGITFSQTPTTQPAERIDTSGLPAVGDDATVPRDAPKRTIADVHLPEFEPEPQAPEVPEADAIAPPEGRLERLRGRLARSQNALGRGLLGLIGGGDLDEDSWQDVEDTLLVADLGPAATASVVSQLRSRLASGNVRTEADARAVLRDVLINELQPGMDRSIRALPHAGHPSVLLVVGVNGTGKTTTVGKLARVLVADGRRVVLGAADTFRAAAADQLQTWAARVGAAVVRGPEGADPASVAFDAVDKGIAAGADVVLIDTAGRLHTKVGLMDELDKVKRVVTGRASVDEVLLVLD

SEQ ID NO: 62277 - protein, 436 aa, Mycobacterium bovis
  MISC_FEATURE (227)..(227): X=any amino acid
PTGLRPNAVVGVRLAALADQVGAALAEGPAQRAVTEDRTVTGVTLRAQDVSPGDLFAALTGSTTHGARHVGDAIARGAVAVLTDPAGVAEIAGRAAVPVLVHPAPRGVLGGLAATVYGHPSERLTVIGITGTSGKTTTTYLVEAGLRAAGRVAGLIGTIGIRVGGADLPSALTTPEAPTLQAMLAAMSNAGWNTVVMEVSSHALALGRVDGTRFAVGAFTNLSRDHXDFHPSMADYFEAKASLFDPDSALRARTAVVCIDDDAGRAMAARAADAITVSAADRPAHWRATDVAPTDAGGQQFTAIDPAGVRASHRNPATGPLQVANCLVALAILDTVGVSPEQAVPGLREIRVPGRLEQIDRGQGFLALVDYAHKPEALRSVLTTLAHPDRRLAVVFGAGGDRDPGKRAPMGRIAAQLADLVVVTDDNPRDEDPTAI

SEQ ID NO: 62278 - protein, 344 aa, Mycobacterium bovis
MKFVNHIEPVAPRRAGGAVAEVYAEARREFGRLPEPLAMLSPDEGLLTAGWATLRETLLVGQVPRGRKEAVAAAVAASLRCPWCVDAHTTMLYAAGQTDTAAAILAGTAPAAGDPNAPYVAWAAGTGTPAGPPAPFGPDVAAEYLGTAVQFHFIARLVLVLLDETFLPGGPRAQQLMRRAGGLVFARKVRAEHRPGRSTRRLEPRTLPDDLAWATPSEPIATAFAALSHHLDTAPHLPPPTRQVVRRVVGSWHGEPMPMSSRWTNEHTAELPADLHAPTRLALLTGLAPHQVTDDDVAAARSLLDTDAALVGALAWAAFTAARRIGTWIGAAAEGQVSRQNPTG

SEQ ID NO: 62279 - protein, 278 aa, Mycobacterium bovis
MTIDVWMQHPTQRFLHGDMFASLRRWTGGSIPETDIPIEATVSSMDAGGVTLGLLSAWRGPNGQDLISNDAVAEWVRLYPNRFAGLAAVDLDRPMAAVRELRRRVGEGFVGLRVVPWLWGAPPTDRRYYPLFAECVQSAVPFCTQVGHTGPLRPSETGRPIPYIDQVALDFPELVIVCGHVGYPWTEEMVAVARKHENVYIDTSAYTIKRLPGKLVRFMKTDTGQRKVLFGTNYPMIAHTHALTGLDELGLSDEARRDFLHGNAVRVFKLDPRGKVQT

SEQ ID NO: 62280 - protein, 172 aa, Mycobacterium bovis
  MISC_FEATURE (41)..(41): X=any amino acid
  MISC_FEATURE (58)..(58): X=any amino acid
  MISC_FEATURE (117)..(117): X=any amino acid
  MISC_FEATURE (119)..(119): X=any amino acid
  MISC_FEATURE (137)..(137): X=any amino acid
  MISC_FEATURE (144)..(144): X=any amino acid
MKTLTLQLQRYLHHLTIERCVAANTLSSYRRDLRRYSKHLXERGITDLSKVSEHDVSXFLVALRCSDSDSRTAALYPVSASPTLIELRGLLRFRAGKDRPELDVVRAVRSPTPSMPXSXSMTIDYVLSLLACAVGEXPNDSLSXAATPAVLELLTSTVTRIFEGARLDLHSL

SEQ ID NO: 62281 - protein, 101 aa, Mycobacterium bovis
MAKKSKIVKNQRRAATVARYASRRTALKDIIRSPSSAPEQRSTAQRALARQPRDASPVRLRNRDAIDGRPRGHLRKFGLSRVRVRQLAHDGHLPGVRKASW

SEQ ID NO: 62282 - protein, 54 aa, Mycobacterium bovis
MARTDIRPIVKLRSTAGTGYTYTTRKNRRNDPDRLILRKYDPILRRHVDFREER

SEQ ID NO: 62283 - protein, 78 aa, Mycobacterium bovis
LSAHCQVTGRKPGFGNTVSHSHRRSRRRWSPNIQQRTYYLPSEGRRIRLRVSTKGIKVIDRDGIEAVVARLRRQGQRI

SEQ ID NO: 62284 - protein, 105 aa, Mycobacterium bovis
MPVVKINAIEVPAGAGPELEKRFAHRAHAVENSPGFLGFQLLRPVKGEERYFVVTHWESDEAFQAWANGPAIAAHAGHRANPVATGASLLEFEVVLDVGGTGKTA

SEQ ID NO: 62285 - protein, 311 aa, Mycobacterium bovis
MSADNHQVPIEIRGLTKHFGSVRALDGLDLTVREGEVHGFLGPNGAGKSTTLRILLGLVKADGGSVRLLGGDPWTDAVDLHRHIAYVPGDVTLWPSLTGGETIDLLARMRGGIDNARRAELIERFGLDPTKKARTYSKGNRQKVSLISALSSHATLLLLDEPSSGLDPLMENVFQQCIGEARQRGVTVLLSSHILAETEALCEKVTIIRAGKTVESGSLDALRHLSRTSIKAEMIGDPGDLSRIKGVEDISIEGTTVRAQVDSESLRELIQVLGHAGVRSLVSQPPTLEELFLRHYSLGPEVAAEQQVATP

SEQ ID NO: 62286 - protein, 809 aa, Mycobacterium bovis
MDSFNPTTKTQAALTAALQAASTAGNPEIRPAHLLMALLTQNDGIAAPLLEAVGVEPATVRAETQRLLDRLPQATGASTQPQLSRESLAAITTAQQLATELDDEYVSTEHVMVGLATGDSDVAKLLTGHGASPQALREAFVKVRGSARVTSPEPEATYQALQKYSTDLTARAREGKLDPVIGRDNEIRRVVQVLSRRTKNNPVLIGEPGVGKTAIVEGLAQRIVAGDVPESLRDKTIVALDLGSMVAGSKYRGEFEERLKAVLDDIKNSAGQIITFIDELHTIVGAGATGEGAMDAGNMIKPMLARGELRLVGATTLDEYRKHIEKDAALERRFQQVYVGEPSVEDTIGILRGLKDRYEVHHGVRITDSALVAAATLSDRYITARFLPDKAIDLVDEAASRLRMEIDSRPVEIDEVERLVRRLEIEEMALSKEEDEASAERLAKLRSELADQKEKLAELTTRWQNEKNAIEIVRDLKEQLEALRGESERAERDGDLAKAAELRYGRIPEVEKKLDAALPQAQAREQVMLKEEVGPDDIADVVSAWTGIPAGRLLEGETAKLLRMEDELGKRVIGQKAAVTAVSDAVRRSRAGVSDPNRPTGAFMFLGPTGVGKTELAKALADFLFDDERAMVRIDMSEYGEKHTVARLIGAPPGYVGYEAGGQLTEAVRRRPYTVVLFDEIEKAHPDVFDVLLQVLDEGRLTDGHGRTVDFRNTILILTSNLGSGGSAEQVLAAVRATFKPEFINRLDDVLIFEGLNPEELVRIVDIQLAQLGKRLAQRRLQLQVSLPAKRWLAQRGFDPVYGARPLRR

SEQ ID NO: 62287 - protein, 338 aa, Mycobacterium bovis
  MISC_FEATURE (160)..(160): X=any amino acid
PPAEVRHPVYATRVLCEVANERGVPTADVLAGTAIEPADLDDPDAVVGALDEITAVRRLLARLPDDAGIGIDVGSRFALTHFGLFGFAVMSCGTLRELLTIAMRYFALTTMHVDITLFETADDCLVELDASHLPADVRGFFIERDIAGIIRRQRVSRFRXPRSMRIKYRPNLAVDAELLRPLLELVPVHDVAFGRAHNRVHFPRAMFDEPLPQADRHTLEMCIAQCDVLMQRNERRRGITALVRSKLFRDSGLFPTFTDVAGELDMHPRTLRRRLAEEGTSFRALLGEARSTVAVDLLRNVGLTVQQVSTRLGYTEVSTFSHAFKRWYGVAPSEYSRR

SEQ ID NO: 62288 - protein, 445 aa, Mycobacterium bovis
MIPLAGDPVSSHRTPVWLASPPEVHSALLSAGPGPGSLQAAAAGWSALSAEYAAVAQELSAVVAAVGAGVWQGPSAELFVAAYVPYVAWLVQASADSAAAAGEHEAAAAGYVCALAEMPTLPELAANHLTHAVLVATNFFGINTIPIALNEADYVRMWVQAATVMSAYEAVVGAALVATPHTGPAPVIVKPGANEASNAVAAATITPFPWHEIVQFLEETFAAYDQYLSALLSELPAVAWVWFQLFVDILGFNIIGFIITLASNAQLLTEFAINASYVAVGLLYAIAGVIDIVVEWVIGNLFGVVPLLGGPLLGALAAAVVPGVAGLAGVAGLAAVPAVGAAAGAPAALVGSVAPVSGGVVSPQARLVSAVEPAPASTSVSVLASDRGAGALGFVGTAGKESVGQPAGLTVLADEFGDGAPVPMLPGSWGPDLVGVAGDGGLVSV

SEQ ID NO: 62289 - protein, 396 aa, Mycobacterium bovis
  MISC_FEATURE (13)..(13): X=any amino acid
  MISC_FEATURE (116)..(116): X=any amino acid
  MISC_FEATURE (174)..(174): X=any amino acid
  MISC_FEATURE (276)..(276): X=any amino acid
AKITSVVSHAKPXITAMADNAGNIWDRFLHSNPVSVVIDGTGQQLKGFGEEAFGMAKDSWNLGPLRASIDPFGWYRSWQEMLTGMAPLPGLDGENAPGVVESWKQFGKSLIHWDEXTTNPNEALGKTVFDAATLALPGGPLSKLGSKGRDILAGVRGLKPPTQERPHPNRSAVXRIALPAFPAPRSGVVLAGTDGRPAREPPWPDSTGPASPDDSSRDHLGKHATARCAHWRYRPPSSASCPYNRPCLRHWPSSPGSCTYSAHHESLSNIPGNDFXTLFRSKIWSSSRPSDRQTDTNPPSPATPTKSGPQLPGSSAPAHHHQTHRPTPSTPPAAQPTPCQPSQQTPTPQHPDQKPAPTPTCSREPAPPPTPTAPAATPHHPTPAPHCPPTPPARQQ

SEQ ID NO: 62290 - protein, 122 aa, Mycobacterium bovis
MLSAVILTERGYPAVPLAGHLVHQRLVRPCRLVLVTGFLKYLTRAADRDRTVSRRSKPSSRAALMGEQPNPWDLLQPQDATSRHRGAKPSRRYGLLGKISLLSPGYLLSVERHPFHSGVPDH

SEQ ID NO: 62291 - protein, 137 aa, Mycobacterium bovis
  MISC_FEATURE (89)..(89): X=any amino acid
  MISC_FEATURE (100)..(100): X=any amino acid
  MISC_FEATURE (130)..(130): X=any amino acid
GTGISTRCPSTTPVGLALGPDSPWADWPGPGTLGLSAGKVLTCLVATHACILTPPPSTTGHPVASLNEGRSPTHTHHKVDVPRLRRCAXAPLHYRRTITXPVSYYALFQGWLLLSQPPGCLCDCTSFPTXHTLGGLS

SEQ ID NO: 62292 - protein, 57 aa, Mycobacterium bovis
MTSSHHAPYVQGFTHATMAGTKGCDAARLSESLKAGLSSDRGLQLDPVKSESLVIAD

SEQ ID NO: 62293 - protein, 418 aa, Mycobacterium bovis
MAERFVVTGGNRLSGEVAVGGAKNSVLKLMAATLLAEGTSTITNCPDILDVPLMAEVLRGLGATVELDGDVARITAPDEPKYDADFAAVRQFRASVCVLGPLVGRCKRARVALPGGDAIGSRPLDMHQAGLRQLGAHCNIEHGCVVARAETLRGAEIQLEFPSVGATENILMAAVVAEGVTTIHNAAREPDVVDLCTMLNQMGAQVEGAGSPTMTITGVPRLHPTEHRVIGDRIVAATWGIAAAMTRGDISVAGVDPAHLQLVLHKLHDAGATVTQTDASFRVTQYERPKAVNVATLPFPGFPTDLQPMAIALASIADGTSMITENVFEARFRFVEEMIRLGADARTDGHHAVVRGLPQLSSAPVWCSDIRAGAGLVLAGLVADGDTEVHDVFHIDRGYPLFVENLVSLGAEIERVCC

SEQ ID NO: 62294 - protein, 470 aa, Mycobacterium bovis
MSTNEGSLWGGRFAGGPSDALAALSKSTHFDWVLAPYDLTASRAHTMVLFRAGLLTEEQRDGLLAGLDSLAQDVADGSFGPLVTDEDVHAALERGLIDRVGPDLGGRLRAGRSRNDQVAALFRMWLRDAVRRVATGVLDVVGALAEQAAAHPSAIMPGKTHLQSAQPILLAHHLLAHAHPLLRDLDRIVDFDKRAAVSPYGSGALAGSSLGLDPDAIAADLGFSAAADNSVDATAARDFAAEAAFVFAMIAVDLSRLAEDIIVWSSTEFGYVTLHDSWSTGSSIMPQKKNPDIAELARGKSGRLIGNLAGLLATLKAQPLAYNRDLQEDKEPVFDSVAQLELLLPAMAGLVASLTFNVQRMAELAPAGYTLATDLAEWLVRQGVPFRSAHEAAGAAVRAAEQRGVGLQELTDDELAAISPELTPQVREVLTIEGSVSARDCRGGTAPGRVAEQLNAIGEAAERLRRQLVR

SEQ ID NO: 62295 - protein, 152 aa, Mycobacterium bovis
MSAKIDITGDWTVAVYCAASPTHAELLELAAEVGAAIAGRGWTLVWGGGHVSAMGAVASAARACGGWTVGVIPKMLVYRELADHDADELIVTDTMWERKQIMEDRSDAFIVLPGGVGTLDELFDAWTDGYLGTHERTIVMVDPCGHFDGLRA

SEQ ID NO: 62296 - protein, 386 aa, Mycobacterium bovis
MRQRWQAVMMNNYGTPPIALASGDGAVVTDVDGRTYIDLLGGIAVNVLGHRHPAVIEAVTRQMSTLGHTSNLYATEPGIALAEELVALLGADQRTRVFFCNSGAEANEAAFKLSRLTGRTKLVAAHDAFHGRTMGSLALTGQPAKQTPFAPLPGDVTHVGYGDVDALAAAVDDHTAAVFLEPIMGESGVVVPPAGYLAAARDITARRGALLVLDEVQTGMGRTGAFFAHQHDGITPDVVTLAKGLGGGLPIGACLAVGPAAELLTPGLHGSTFGGNPVCAAAALAVLRVLASDGLVRRAEVLGKSLRHGIEALGHPLIDHVRGRGLLLGIALTAPHAKDAEATARDAGYLVNAAAPDVIRLAPPLIIAEAQLDGFVAALPAILDRA

SEQ ID NO: 62297 - protein, 307 aa, Mycobacterium bovis
VIRHFLRDDDLSPAEQAEVLELAAELKKDPVSRRPLQGPRGVAVIFDKNSTRTRFSFELGIAQLGGHAVVVDSGSTQLGRDETLQDTAKVLSRYVDAIVWRTFGQERLDAMASVATVPVINALSDEFHPCQVLADLQTIAERKGALRGLRLSYFGDGANNMAHSLLLGGVTAGIHVTVAAPEGFLPDPSVRAAAERRAQDTGASVTVTADAHAAAAGADVLVTDTWTSMGQENDGLDRVKPFRPFQLNSRLLALADSDAIVLHCLPAHRGDEITDAVMDGPASAVWDEAENRLHAQKALLVWLLERS

SEQ ID NO: 62298 - protein, 308 aa, Mycobacterium bovis
MSVVFADVDTGIDDALAVIYLLASPDADLVGIASTGGNIAVGQVCANNLSLLELCGAADIPVSKGADEPLGGRWPDHPKFHGPKGIGYAELPASNRRLTDYDATTAWIAAAHSHAGDLIGLVTGPLTNLALALRAEPALPRLLRRLVIMGGMFDGQPITEWNIRVDPEAASEVFTAWAGQRQLPIVCGLDLTRRVAMTPDILARLASVCGSSPVMRVIEDALRFYFESHEARGHGYLAYMHDPLAAAVAMDPELLTTRTATVDVDPTGATVTDWSGKRNPNARIGMSVDPAVFFDRFVERIGRFARRT

SEQ ID NO: 62299 - protein, 700 aa, Mycobacterium bovis
MTTLEEISALTRPRHPDDWTEIDSAAVDTIRVLAADAVQKVGNGHPGTAMSLAPLAYTLFQRTMRHDPSDTHWLGRDRFVLSAGHSSLTLYIQLYLGGFGLELSDIESLRTWGSKTPGHPEFRHTPGVEITTGPLGQGLASAVGMAMASRYERGLFDPDAEPGASPFDHYIYVIASDGDIEEGVTSEASSLAAVQQLGNLIVFYDRNQISIEDDTNIALCEDTAARYRAYGWHVQEVEGGENVVGIEEAIANAQAVTDRPSFIALRTVIGYPAPNLMDTGKAHGAALGDDEVAAVKKIVGFDPDKTFQVREDVLTHTRGLVARGKQAHERWQLEFDAWARREPERKALLDRLLAQKLPDGWDADLPHWEPGSKALATRAASGAVLSALGPKLPELWGGSADLAGSNNTTIKGADSFGPPSISTKEYTAHWYGRTLHFGVREHAMGAILSGIVLHGPTRAYGGTFLQFSDYMRPAVRLAALMDIDTIYVWTHDSIGLGEDGPTHQPIEHLSALRAIPRLSVVRPADANETAYAWRTILARRNGSGPVGLILTRQGVPVLDGTDAEGVARGGYVLSDAGGLQPGEEPDVILIATGSEVQLAVAAQTLLADNDILARVVSMPCLEWFEAQPYEYRDAVLPPTVSARVAVEAGVAQCWHQLVGDTGEIVSIEHYGESADHKTLFREYGFTAEAVAAAAERALDN

SEQ ID NO: 62300 - protein, 373 aa, Mycobacterium bovis
MTAQNPNLAALSAAGVSVWLDDLSRDRLRSGNLQELIDTKSVVGVTTNPSIFQKALSEGHTYDAQIAELAARGADVDATIRTVTTDDVRSACDVLVPQWEDSDGVDGRVSIEVDPRLAHETEKTIQQAIELWKIVDRPNLFIKIPATKAGLPAISAVLAEGISVNVTLIFSVQRYREVMDAYLTGMEKARQAGHSLSKIHSVASFFVSRVDTEIDKRLDRIGSRQALELRGQAGVANARLAYAAYREVFEDSDRYRSLKVDGARVQRPLWASTGVKNPDYSDTLYVTELVAPHTVNTMPEKTIDAVADHGVIQGDTVTGTASDAQAVFDQLGAIGIDLTDVFAVLEEEGVRKFEASWNELLQETRAHLDTAAQ

SEQ ID NO: 62301 - protein, 514 aa, Mycobacterium bovis
MKPAHAAASWRNPLRDKRDKRLPRIAGPCGMVIFGVTGDLARKKVMPAVYDLANRGLLPPTFSLVGFARRDWSTQDFGQVVYNAVQEHCRTPFRQQNWDRLAEGFRFVPGTFDDDDAFAQLAETLEKLDAERGTGGNHAFYLAIPPKSFPVVCEQLHKSGLARPQGDRWSRVVIEKPFGHDLASARELNKAVNAVFPEEAVFRIDHYLGKETVQNILALRFANQLFDPIWNAHYVDHVQITMAEDIGLGGRAGYYDGIGAARDVIQNHLMQLLALTAMEEPVSFHPAALQAEKIKVLSATRLAEPLDQTTSRGQYAAGWQGGEKVVGLLDEEGFAEDSTTETFAAITLEVDTRRWAGVPFYLRTGKRLGRRVTEIALVFRRAPHLPFDATMTDELGTNAMVIRVQPDEGVTLRFGSKVPGTAMEVRDVNMDFSYGSAFAEDSPEAYERLILDVLLGEPSLFPVNAEVELAWEILDPALEHWAAHGTPDAYEAGTWGPESSLEMLRRTGREWRRP

SEQ ID NO: 62302 - protein, 266 aa, Mycobacterium bovis
MAPTAAGHPVVGDQAMTVYFIGAGPGAADLITVRGQRLLQRCPVCLYAGSIMPDDLLAQCPPGATIVDTGPLTLEQIVRKLADADADGRDVARLHSGDPSLYSALAEQCRELDALGIGYEIVPGVPAFAAAAAALKRELTVPGVAQTVTLTRVATLSTPMPPGEDLAALARSRATLVLHLAAAQIDAIVPRLLDGGYRPETPVAVVAFASWPQQRTLRGTLADIAARMHDAKITRTAVIVVGDVLTAEGFTDSYLYSVARHGRYAQ

SEQ ID NO: 62303 - protein, 575 aa, Mycobacterium bovis
MKLTDVDFAVEASGMVRAFNQAGVLDVSDVHVAQRLCALAGESDERVALAVAVAVRALRAGSVCVDLLSIARVAGHDDLPWPDPADWLAAVRASPLLADPPVLHLYDDRLLYLDRYWREEEQVCADLLALLTSRRPAGVPDLRRLFPTGFDEQRRAAEIALSQGVTVLTGGPGTGKTTTVARLLALVAEQAELAGEPRPRIALAAPTGKAAARLAEAVRREMAKLDATDRARLGDLHAVTLHRLLGAKPGARFRQDRQNRLPHNVIVVDETSMVSLTLMARLAEAVRPGARLILVGDADQLASVEAGAVLADLVDGFSVRDDALVAQLRTSHRFGKVIGTLAEAIRAGDGDAVLGLLRSGEERIEFVDDEDPAPRLRAVLVPHALRLREAALLGASDVALATLDEHRLLCAHRDGPTGVLHWNRRVQAWLAEETGQPPWTPWYAGRPLLVTANDYGLRVYNGDTGVVLAGPTGLRAVISGASGPLDVATGRLGDVETMHAMTIHKSQGSQVDEVTVLMPQEDSRLLTRELLYTAVARAKRKVRVVGSEASVRAAIARRAVRASGLRMRLQSTGCG

SEQ ID NO: 62304 - protein, 494 aa, Mycobacterium bovis
MTDIIRSDAATLAAKIAIKEVSSTEITRACLDQIEATDETYHAFLHVAADEALAAAAAVDKQVAAGEPLPSALAGVPLALKDVFTTSDMPTTCGSKILEGWRSPYDATLTARLRAAGIPILGKTNMDEFAMGSSTENSAYGPTRNPWNLDRVPGGSGGGSAAALAAFQAPLAIGSDTGGSIRQPAALTATVGVKPTYGTVSRYGLVACASSLDQGGPCARTVLDTALLHQVIAGHDPRDSTSVDAEVPDVVGAARAGAVGDLRGVRVGVVRQLHGGEGYQPGVLASFEAAVEQLTALGAEVSEVDCPHFDHALAAYYLILPSEVSSNLARFDAMRYGLRVGDDGTRSAEEVMAMTRAAGFGPEVKRRIMIGTYALSAGYYDAYYNQAQKVRTLIARDLDAAYRSVDVLVSPTTPTTAFRLGEKVDDPLAMYLFDLCTLPLNLAGHCGMSVPSGLSPDDGLPVGLQIMAPALADDRLYRVGAAYEAARGPLLSAI

SEQ ID NO: 62305 - protein, 160 aa, Mycobacterium bovis
MSTRSARIVVVSSRAAAGVYTDDCGPIIAGWLEQHGFSSVQPQVVADGNPVGEALHDAVNAGVDVIITSGGTGISPTDTTPEHTVAVLDYVIPGLADAIRRSGLPKVPTSVLSRGVCGVAGRTLIINLPGSPGGVRDGLGVLADVLDHALEQIAGGDHPR

SEQ ID NO: 62306 - protein, 463 aa, Mycobacterium bovis
MAIRQHVGALFTDLYEVTMAQAYWAERMSGTAVFEIFFRKLPPGRSYIMAAGLADVVEFLEAFRFDEQDLRYLRGLGQFSDEFLRWLAGVRFTGDVWAAPEGTVIFPNEPAVQLIAPIIEAQLVETFVLNQIHLQSVLASKAARVVAAARGRPVVDFGARRAHGTDAACKVARTSYLAGAAGTSNLLAARQYGIPTFGTMAHSFVQAFDSEVAAFEAFARLYPATMLLVDTYDTLRGVDHVIELAKRLGNRFDVRAVRLDSGDLDELSKATRARLDTAGLEQVEIFASSGLDENRIAALLAARCPIDGFGVGTQLVVAQDAPALDMAYKLVAYDGSGRTKFSSGKVIYPGRKQVFRKLEHGVFCGDTLGEHGENLPGDPLLVPIMTNGRRIRQHAPTLDGARDWARQQIDALPPELRSLEDTGYSYPVAVSDRIVGELARLRHADTAEAHPGSNVVGAKAKRP

SEQ ID NO: 62307 - protein, 201 aa, Mycobacterium bovis
MARYTGPVTRKSRRLRTDLVGGDQAFEKRPYPPGQHGRARIKESEYLLQLQEKQKARFTYGVMEKQFRRYYEEAVRQPGKTGEELLKILESRLDNVIYRAGLARTRRMARQLVSHGHFNVNGVHVNVPSYRVSQYDIVDVRDKSLNTVPFQIARETAGERPIPSWLQVVGERQRVLIHQLPERAQIDVPLTEQLIVEYYSK

SEQ ID NO: 62308 - protein, 139 aa, Mycobacterium bovis
MPPAKKGPATSARKGQKTRRREKKNVPHGAAHIKSTFNNTIVTITDPQGNVIAWASSGHVGFKGSRKSTPFAAQLAAENAARKAQDHGVRKVDVFVKGPGSGRETAIRSLQAAGLEVGAISDVTPQPHNGVRPPNRRRV

SEQ ID NO: 62309 - protein, 124 aa, Mycobacterium bovis
MARLVGVDLPRDKRMEVALTYIFGIGRTRSNEILAATGIDRDLRTRDLTEEQLIHLRDYIEANLKVEGDLRREVQADIRRKIEIGCYQGLRHRRGMPVRGQRTKTNARTRKGPKRTIAGKKKAR

SEQ ID NO: 62310 - protein, 73 aa, Mycobacterium bovis; identical to SEQ ID NO: 61703

SEQ ID NO: 62311 - protein, 436 aa, Mycobacterium bovis
MDPLNRRQFLALAAAAAGVTAGCAGMGGGGSVKSGSGPIDFWSSHPGQSSAAERELIGRFQDRFPTLSVKLIDAGKDYDEVAQKFNAALIGTDVPDVVLLDDRWWFHFALIGVLTALDDLFGQVGVDTTDYVDSLLADYEFNGRHYAVPYARSTPLFYYNKAAWQQAGLPDRGLQSWSEFDEWGPELQRVVGAGRSAHGWANADLISWTFQGPNWAFGGAYSDKWTLTLTEPATIAAGNFYRNSIHGKGYAAVANDIANEFATGILASAVASTGSLPGITASARFDFGAAPLPTGPDAAPACPTGGAGLAIPAKLSEERKVNALKFIAFVTNPTNTAYFSQQTGYLPVRKSAVDDASERHYLADNPRARVALDQLPHTRTQDYARVFLPGGDRIISAGLESIGLRGADVTKTFTNIQKRLQVILDRQIMRKLAGHG

SEQ ID NO: 62312 - protein, 460 aa, Mycobacterium bovis
MGRCLECGRWGTVDEVAVLSAVGGTRRRSVAPASGAVPISAVDAHRTRPCPTGIDELDRVLGGGIVPGSVTLLAGDPGVGKSTLLLEVAHRWAQSGRRALYVSGEESAGQIRLRADRIGCGTEVEEIYLAAQSDVHTVLDQIETVQPALVIVDSVQTMSTSEADGVTGGVTQVRAVTAALTAAAKANEVALILVGHVTKDGAIAGPRSLEHLVDVVLHFEGDRNGALRMVRGVKNRFGAADEVGCFLLHDNGIDGIVDPSNLFLDQRPTPVAGTAITVTLDGKRPLVGEVQALLATPCGGSPRRAVSGIHQARAAMIAAVLEKHARLAIAVNDIYLSTVGGMRLTEPSADLAVAIALASAYANLPLPTTAVMIGEVGLAGDIRRVNGMARRLSEAARQGFTIALVPPSDDPVPPGMHALRASTIVAALQYMVDIADHRGTTLATPPSHSGTGHVPLGRGT

SEQ ID NO: 62313 - protein, 231 aa, Mycobacterium bovis
MVREAGEVVAIVPAAGSGERLAVGVPKAFYQLDGQTLIERAVDGLLDSGVVDTVVVAVPADRTDEARQILGHRAMIVAGGSNRTDTVNLALAVLSGTAEPEFVLVHDAARALTPPALVARVVEALRDGYAAVVPVLPLSDTIKAVDANGVVLGTPERAGLRAVQTPQGFTTDLLLRSYQRGSLDLPAAEYTDDASLVEHIGGQVQVVDGDPLAFKITTKLDLLLAQAIVRG

SEQ ID NO: 62314 - protein, 76 aa, Mycobacterium bovis
NQLPRVGLGTDVHPIEPGRPCWLVGLLFPSADGCAGHSDGDVAVHALCDAVLSAAGLGDIGEVFGVDDPRWQGVSG

SEQ ID NO: 62315 - protein, 566 aa, Mycobacterium bovis
  MISC_FEATURE (82)..(82): X=any amino acid
RHVAPCRRPDHPAWLSGRQRCGAGDRQPTEDRLAPARGAGGAVTSAQRAGVGVGYHHRRAGPHWPRRGLGRNRYGIGGSLRXRTPGPDARAAGAAIGQVSWHVVTDRARLRLHDTAAGVVRDFVPLRPGHVSIYLCGATVQGLPHIGHVRSGVAFDILRRWLLARGYDVAFIRNVTDIEDKILAKAAAAGRPWWEWAATHERAFTAAYDALDVLPPSAEPRATGHITQMIEMIERLIQAGPRYTGGGDVYFDVLSYPEYGQLSGHKIDDVHQGEGVAAGKRDQRDFTLWKGEKPGEPSWPTPWGRGRPGWHLECSAMARSYLGPEFDIHCGGMDLVFPHHENEIAQSRAAGDGFARYWLHNGWVTMGGEKMSKSLGNVLSMPAMLQRVRPAELRYYLGSAHYRSMLEFSETAMQDAVKAYVGLEDFLHRVRTRVGAVCPGDPTPRFAEALDDDLSVPIALAEIHHVRAEGNRALDAGDHDGALRSASAIRAMMGILGCDPLDQRWESRDETSAALAAVDVLVQAELQNREKAREQRNWALADEIRGRLKRAGIEVTDTADGPQWSL

SEQ ID NO: 62316 - protein, 165 aa, Mycobacterium bovis
MIHYRTIDSPIGPLTLAGHGSVLTNLRMLEQTYEPSRTHWTPDPGAFSGAVDQLNAYFAGELTEFDVELDLRGTDFQQRVWKALLTIPYGETRSYGEIADQIGAPGAARAVGLANGHNPIAIIVPCHRVIGASGKLTGYGGGINRKRALLELEKSRAPADLTLFD

SEQ ID NO: 62317 - protein, 376 aa, Mycobacterium bovis
MGSLKDFSASELGAIAIKGALEKANVPASLVEYVIMGQVLTAGAGQMPARQAAVAAGIGWDVPALTINKMCLSGIDAIALADQLIRAREFDVVVAGGQESMTKAPHLLMNSRSGYKYGDVTVLDHMAYDGLHDVFTDQPMGALTEQRNDVDMFTRSEQDEYAAASHQKAAAAWKDGVFADEVIPVNIPQRTGDPLQFTEDEGIRANTTAAALAGLKPAFRGDGTITAGSASQISDGAAAVVVMNQEKAQELGLTWLAEIGAHGVVAGPDSTLQSQPANAINKALDREGISVDQLDVVEINEAFAAVALASIRELGLNPQIVNVNGGAIAVGHPLGMSGTRITLHAALQLARRGSGVGVAALCGAGGQGDALILRAG

SEQ ID NO: 62318 - protein, 799 aa, Mycobacterium bovis
MTTIESRPPSPEDLADNAQQPCGHGRMMRKEDPRFIRGRGTYVDDVALPGMLHLAILRSPYAHARIVRIDVTAAQAHPKVKAVVTGADLAAKGLAWMPTLANDVQAVLATDKTRFQGQEVASVVAEDRYSARDACELVDVDYEPRDPVVDARTALDPSAPVIRTDLEGKSDNHIFDWETGDAAATEAVFAKADVVVQQEIVYPRVHPAPMETCGAVADLDPVTGKLTLWTTSQAPHAHRTLYALVAGLPEHKIRVISPDIGGGFGNKVPIYPGYVCAIVASLLLDKPVKWMEDRSENLTSTGFARDYIMVGEIAANRDGKILAIRSNVLADHGAFNAQAAPAKYPAGFFGVFTGSYDIEAAYCHMTAVYTNKAPGGVAYACSFRITEAVYFVERLVDCLAFELKMDPAELRLRNLLRPNQFPYQSKTGWVYDSGDYETTMRKAMNMIGYEALRAEQKQRRARGELMGIGMSFFTEAVGAGPRKDMDILGLGMADGCELRVHPTGKAVLRLSVQTQGQGHETTFAQIVAEELGIAPDDIEVVHGDTDQTPFGLGTYGSRSTPVSGGAAALVARKVRDKAKIIASGMLEVSVADLQWEKGKFHVKGDPSAAVTIADIAMRAHGAGDLPEGIEGGLDAEVCYNPSNLTYPYGAYFCVVDIDPGTAVVKVRRFLAVDDCGTRINPMIIEGQVHGGIVDGIGMALMEMIAFDEDGNCLGGSLMDYLIPTALEVPHLETGHTVTPSPHHPIGAKGIGESATVGSPPAVVNAVVDALAPFGVRHADMPLTPSRVWEAMQGRATPPI

SEQ ID NO: 62319 - protein, 179 aa, Mycobacterium bovis
MAGPDRAELAELVRRLSVVHGRVTLSSGREADYYVDLRRATLHHRASALIGRLMRELTADWDYSVVGGLTLGADPVATAIMHAPGRPIDAFVVRKSAKAHGMQRLIEGSEVTGQRVLVVEDTSTTGNSALTAVHAVQDVGGEVVGVATVVDRATGAAEAIEAEGLRYRSVLGLADLGLD

SEQ ID NO: 62320 - protein, 149 aa, Mycobacterium bovis
MAELTETSPETPETTEAIRAVEAFLNALQNEDFDTVDAALGDDLVYENVGFSRIRGGRRTATLLRRMQGRVGFEVKIHRIGADGAAVLTERTDALIIGPLRVQFWVCGVFEVDDGRITLWRDYFDVYDMFKGLLRGLVALVVPSLKATL

SEQ ID NO: 62321 - protein, 155 aa, Mycobacterium bovis
MASALLLLSAVTAACLFAVLDTLRIQRTADDLVAHTRQVLHPAAAHQHHRVLLQVVALAGNVRRDLDLTRQLHAGNLPKRRVRLLRSGGVHAGAYTTTLRAALQSRGLDLTDLVPTTLADQLLDGWHLPAFYLGRFHVLFVGHAPPRLPAAGCVA

SEQ ID NO: 62322 - protein, 221 aa, Mycobacterium bovis
LGADLAGEVSTAEPYVVEPDGPPGVSRFTVAALDLGIKTNTPRNFARRGIRCHVLPASTTFEQIAELNPHGVFLSNGPGDPATADHVVALTREVLGAGIPLFGICFGNQILGRALGLSTYKMVFGHRGINIPVVDHATGRVAVTAQNHGFALQGEAGQSFATPFGPAVVSHTCANDGVVEGVKLVDGRAFSVQYHPEAAAGPHDAEYLFDQFVELMAGEGR

SEQ ID NO: 62323 - protein, 1115 aa, Mycobacterium bovis
MPRRTDLHHVLVIGSGPIVIGQACEFDYSGTQACRVLRAEGLQVSLVNSNPATIMTDPEFADHTYVEPITPAFVERVIAQQAERGNKIDALLATLGGQTALNTAVALYESGVLEKYGVELIGADFDAIQRGEDRQRFKDIVAKAGGESARSRVCFTMAEVRETVAELGLPVVVRPSFTMGGLGSGIAYSTDEVDRMAGAGLAASPSANVLIEESIYGWKEFELELMRDGHDNVVVVCSIENVDPMGVHTGDSVTVAPAMTLTDREYQRMRDLGIAILREVGVDTGGCNIQFAVNPRDGRLIVIEMNPRVSRSSALASKATGFPIAKIAAKLAIGYTLDEIVNDITGETPACFEPTLDYVVVKAPRFAFEKFPGADPTLTTTMKSVGEAMSLGRNFVEALGKVMRSLETTRAGFWTAPDPDGGIEEALTRLRTPAEGRLYDIELALRLGATVERVAEASGVDPWFIAQINELVNLRNELVAAPVLNAELLRRAKHSGLSDHQIASLRPELAGEAGVRSLRVRLGIHPVYKTVDTCAAEFEAQTPYHYSSYELDPAAETEVAPQTERPKVLILGSGPNRIGQGIEFDYSCVHAATTLSQAGFETVMVNCNPETVSTDYDTADRLYFEPLTFEDVLEVYHAEMESGSGGPGVAGVIVQLGGQTPLGLAHRLADAGVPIVGTPPEAIDLAEDRGAFGDLLSAAGLPAPKYGTATTFAQARRIAEEIGYPVLVRPSYVLGGRGMEIVYDEETLQGYITRATQLSPEHPVLVDRFLEDAVEIDVDALCDGAEVYIGGIMEHIEEAGIHSGDSACALPPVTLGRSDIEKVRKATEAIAHGIGVVGLLNVQYALKDDVLYVLEANPRASRTVPFVSKATAVPLAKACARIMLGATIAQLRAEGLLAVTGDGAHAARNAPIAVKEAVLPFHRFRRADGAAIDSLLGPEMKSTGEVMGIDRDFGSAFAKSQTAAYGSLPAQGTVFVSVANRDKRSLVFPVKRLADLGFRVLATEGTAEMLRRNGIPCDDVRKHFEPAQPGRPTMSAVDAIRAGEVNMVINTPYGNSGPRIDGYEIRSAAVAGNIPCITTVQGASAAVQGIEAGIRGDIGVRSLQELHRVIGGVER

SEQ ID NO: 62324 - protein, 180 aa, Mycobacterium bovis
MPKPTKGPRLGGSSSHQKAILANLATSLFEHGRITTTEPKARALRPYAEKLITHAKKGALHNRREVLKKLRDKDVVHTLFAEIGPFFADRDGGYTRIIKIEARKGDNAPMAVIELVREKTVTSEANRARRVAAAQAKAKKAAAMPTEESEAKPAEEGDVVGASEPDAKAPEEPPAEAPEN

SEQ ID NO: 62325 - protein, 347 aa, Mycobacterium bovis
MLISQRPTLSEDVLTDNRSQFVIEPLEPGFGYTLGNSLRRTLLSSIPGAAVTSIRIDGVLHEFTTVPGVKEDVTEIILNLKSLVVSSEEDEPVTMYLRKQGPGEVTAGDIVPPAGVTVHNPGMHIATLNDKGKLEVELVVERGRGYVPAVQNRASGAEIGRIPVDSIYSPVLKVTYKVDATRVEQRTDFDKLILDVETKNSISPRDALASAGKTLVELFGLARELNVEAEGIEIGPSPAEADHIASFALPIDDLDLTVRSYNCLKREGVHTVGELVARTESDLLDIRNFGQKSIDEVKIKLHQLGLSLKDSPPSFDPSEVAGYDVATGTWSTEGAYDEQDYAETEQL

SEQ ID NO: 62326 - protein, 540 aa, Mycobacterium bovis
MAKTIAYDEEARRGLERGLNALADAVKVTLGPKGRNVVLEKKWGAPTITNDGVSIAKEIELEDPYEKIGAELVKEVAKKTDDVAGDGTTTATVLAQALVREGLRNVAAGANPLGLKRGIEKAVEKVTETLLKGAKEVETKEQIAATAAISAGDQSIGDLIAEAMDKVGNEGVITVEESNTFGLQLELTEGMRFDKGYISGYFVTDPERQEAVLEDPYILLVSSKVSTVKDLLPLLEKVIGAGKPLLIIAEDVEGEALSTLVVNKIRGTFKSVAVKAPGFGDRRKAMLQDMAILTGGQVISEEVGLTLENADLSLLGKARKVVVTKDETTIVEGAGDTDAIAGRVAQIRQEIENSDSDYDREKLQERLAKLAGGVAVIKAGAATEVELKERKHRIEDAVRNAKAAVEEGIVAGGGVTLLQAAPTLDELKLEGDEATGANIVKVALEAPLKQIAFNSGLEPGVVAEKVRNLPAGHGLNAQTGVYEDLLAAGVADPVKVTRSALQNAASIAGLFLTTEAVVADKPEKEKASVPGGGDMGGMDF

SEQ ID NO: 62327 - protein, 126 aa, Mycobacterium bovis
MSNLHPLPEVASCVVAPLVREPLNPPAAAEMAARFKALADPVRLQLLSSVASRAGGEACVCDISAGVEVSQPTISHHLKVLRDAGLLTSRRRASWVYYAVVPEALTVLSNLLSVHADAAPALGAPA

SEQ ID NO: 62328 - protein, 493 aa, Mycobacterium bovis
MPRSVPDVLDPLGPGAPVWVAGGRVTGQAVAAVLTRFGATPTVCDDDPVMLRPHAERGLPTVSSSDAVQQITGYALVVASPGFSPATPLLAAAAAAGVPIWGDVELAWRLDAAGCYGPPRSWLVVTGTNGKTTTTSMLHAMLIAGGRRAVLCGNIGSAVLDVLDEPAELLAVELSSFQLHWAPSLRPEAGAVLNIAEDHLDWHATMAEYTAAKARVLTGGVAVAGLDDSRAAALLDGSPAQVRVGFRLGEPAAGELGVRDAHLVDRAFSDDLTLLPVASIPVPGPVGVLDALAAAALARSVGVPAGAIADAVTSFRVGRHRAEVVAVADGITYVDDSKATNPHAARASVLAYPRVVWIAGGLLKGASLHAEVAAMASRLVGAVLIGRDRAAVAEALSRHAPDVPVVQVVAGEDTGMPATVEVPVACVLDVAKDDKAGETVGAAVMTAAVAAARRMAQPGDTVLLAPAGASFDQFTGYADRGEAFATAVRAVIR

SEQ ID NO: 62329 - protein, 260 aa, Mycobacterium bovis
MPLTPADVHNVAFSKPPIGKRGYNEDEVDAFLDLVENELTRLIEENSDLRQRINELDQELAAGGGAGVTPQATQAIPAYEPEPGKPAPAAVSAGMNEEQALKAARVLSLAQDTADRLTNTAKAESDKMLADARANAEQILGEARHTADATVAEARQRADAMLADAQSRSEAQLRQAQEKADALQADAERKHSEIMGTINQQRAVLEGRLEQLRTFEREYRTRLKTYLESQLEELGQRGSAAPVDSNADAGGFDQFNRGKN

SEQ ID NO: 62330 - protein, 489 aa, Mycobacterium bovis
TDGSQTRGAEPVEGQRTGPEEASNPGSARPRTRFGAWLGRPMTSFHLIIAVAALLTTLGLIMVLSASAVRSYDDDGSAWVIFGKQVLWTLVGLIGGYVCLRMSVRFMRRIAFSGFAITIVMLVLVLVPGIGKEANGSRGWFVVAGFSMQPSELAKMAFAIWGAHLLAARRMERASLREMLIPLVPAAVVALALIVAQPDLGQTVSMGIILLGLLWYAGLPLRVFLSSLAAVVVSAAILAVSAGYRSDRVRSWLNPENDPQDSGYQARQAKFALAQGGIFGDGLGQGVAKWNYLPNAHNDFIFAIIGEELGLVGALGLLGLFGLFAYTGMRIASRSADPFLRLLTATTTLWVLGQAFINIGYVIGLLPVTGLQLPLISAGGTSTAATLSLIGIIANAARHEPEAVAALRAGRDDKVNRLLRLPLPEPYLPPRLEAFRDRKRANPQPAQTAARAEDPPHGARTACPADGPAPSTRLAPHGRSAGSSISASW

SEQ ID NO: 62331 - protein, 410 aa, Mycobacterium bovis
MKDTVSQPAGGRGATAPRPADAASPSCGSSPSADSLSVVLAGGGTAGHVEPAMAVADALVALDPRVRITALGTPRGLETRLVPQRGYHLELITAVPMPRKPGGDLARLPSRVWRAVREARDVLDDVDADVVVGFGGYVALPAYLAARGLPLPPRRRRRIPVVIHEANARAGLANRVGAHTADRVLSAVPDSGLRRAEVVGVPVRASIAALDRAVLRAEARAHFGFPDDARVLLVFGGSQGAVSLNRAVSGAAADLAAAGVCVLHAHGPQNVLELRRRAQGDPPYVAVPYLDRMELAYAAADLVICRAGAMTVAEVSAVGLPAIYVPLPIGNGEQRLNALPVVNAGGGMVVADAALTPELVARQVAGLLTDPARLAAMTAAAARVGHRDAAGQVARAALAVATGAGARTTT

SEQ ID NO: 62332 - protein, 494 aa, Mycobacterium bovis
MSTEQLPPDLRRVHMVGIGGAGMSGIARILLDRGGLVSGSDAKESRGVHALRARGALIRIGHDASSLDLLPGGATAVVTTHAAIPKTNPELVEARRRGIPVVLRPAVLAKLMAGRTTLMVTGTHGKTTTTSMLIVALQHCGLDPSFAVGGEMGEAGTNAHHGSGDCLVAEADESDGSLLQYTPHVAVITNIESDHLDFYGSVEAYVAVFDSFVERIVPGGALVVCTDDPGGAALAQRATELGIRVLRYGSVPGETMAATLVSWQQQGVGAVAHIRLASELATAQGPRVMRLSVPGRHMALNALGALLAAVQIGAPADEVLDGLAGFEGVRRRFELVGTCGVGKASVRVFDDYAHHPTEISATLAAARMVLEQGDGGRCMVVFQPHLYSRTKAFAAEFGRALNAADEVFVLDVYGAREQPLAGVSGASVAEHVTVPMRYVPDFSAVAQQVAAAASPGDVIVTMGAGDVTLLGPEILTALRVRANRSAPGRPGVLG

SEQ ID NO: 62333 - protein, 314 aa, Mycobacterium bovis
MTEHNEDPQIERVADDAADEEAVTEPLATESKDEPAEHPEFEGPRRRARRERAERRAAQARATAIEQARRAAKRRARGQIVSEQNPAKPAARGVVRGLKALLATVVLAVVGIGLGLALYFTPAMSAREIVIIGIGAVSREEVLDAARVRPATPLLQIDTQQVADRVATIRRVASARVQRQYPSALRITIVERVPVVVKDFSDGPHLFDRDGVDFATDPPPPALPYFDVDNPGPSDPTTKAALQVLTALHPEVASQVGRIAAPSVASITLTLADGRVVIWGTTDRCEEKAEKLAALLTQPGRTYDVSSPDLPTVK

SEQ ID NO: 62334 - protein, 379 aa, Mycobacterium bovis
MTPPHNYLAVIKVVGIGGGGVNAVNRMIEQGLKGVEFIAINTDAQALLMSDADVKLDVGRDSTRGLGAGADPEVGRKAAEDAKDEIEELLRGADMVFVTAGEGGGTGTGGAPVVASIARKLGALTVGVVTRPFSFEGKRRSNQAENGIAALRESCDTLIVIPNDRLLQMGDAAVSLMDAFRSADEVLLNGVQGITDLITTPGLINVDFADVKGIMSGAGTALMGIGSARGEGRSLKAAEIAINSPLLEASMEGAQGVLMSIAGGSDLGLFEINEAASLVQDAAHPDANIIFGTVIDDSLGDEVRVTVIAAGFDVSGPGRKPVMGETGGAHRIESAKAGKLTSTLFEPVDAVSVPLHTNGATLSIGGDDDDVDVPPFMRR

SEQ ID NO: 62335 - protein, 264 aa, Mycobacterium bovis
MDGMTAMAADLSAYPDRESELTHALAAMRSRLAAAAEAAGRNVGEIELLPITKFFPATDVAILFRLGCRSVGESREQEASAKMAELNRLLAAAELGHSGGVHWHMVGRIQRNKAGSLARWAHTAHSVDSSRLVTALDRAVVAALAEHRRGERLRVYVQVSLDGDGSRGGVDSTTPGAVDRICAQVQESEGLELVGLMGIPPLDWDPDEAFDRLQSEHNRVRAMFPHAIGLSAGMSNDLEVAVKHGSTCVRVGTALLGPRRLRSP

SEQ ID NO: 62336 - protein, 241 aa, Mycobacterium bovis
MNSHCSHTFITDNRSPRARRGHAMSTLHKVKAYFGMAPMEDYDDEYYDDRAPSRGYARPRFDDDYGRYDGRDYDDARSDSRGDLRGEPADYPPPGYRGGYADEPRFRPREFDRAEMTRPRFGSWLRNSTRGALAMDPRRMAMMFEDGHPLSKITTLRPKDYSEARTIGERFRDGSPVIMDLVSMDNADAKRLVDFAAGLAFALRGSFDKVATKVFLLSPADVDVSPEERRRIAETGFYAYQ

SEQ ID NO: 62337 - protein, 459 aa, Mycobacterium bovis
METYDIAIIGTGSGNSILDERYASKRAAICEQGTFGGTCLNVGCIPTKMFVYAAEVAKTIRGASRYGIDAHIDRVRWDDVVSRVFGRIDPIALSGEDYRRCAPNIDVYRTHTRFGPVQADGRYLLRTDAGEEFTAEQVVIAAGSRPVIPPAILASGVDYHTSDTVMRIAELPEHIVIVGSGFIAAEFAHVFSALGVRVTLVIRGSCLLRHCDDTICERFTRIASTKWELRTHRNVVDGQQRGSGVALRLDDGCTINADLLLVATGRVSNADLLDAEQAGVDVEDGRVIVDEYQRTSARGVFALGDVSSPYLLKHVANHEARVVQHNLLCDWEDTQSMIVTDHRYVPAAVFTDPQIAAVGLTENQAVAKGLDISVKIQDYGDVAYGWAMEDTSGIVKLITERGSGRLLGAHIMGYQASSLIQPLIQAMSFGLTAAEMARGQYWIHPALPEVVENALLGLR

SEQ ID NO: 62338 - protein, 519 aa, Mycobacterium bovis
MKPYYVTTAIAYPNAAPHVGHAYEYIATDAIARFKRLDGYDVRFLTGTDEHGLKVAQAAAAAGVPTAALARRNSDVFQRMQEALNISFDRFIRTTDADHHEASKELWRRMSAAGDIYLDNYSGWYSVRDERFFVESETQLVDGTRLTVETGTPVTWTEEQTYFFRLSAYTDKLLAHYHANPDFIAPETRRNEVISFVSGGLDDLSISRTSFDWGVQVPEHPDHVMYVWVDALTNYLTGAGFPDTDSELFRRYWPADLHMIGKDIIRFHAVYWPAFLMSAGIELPRRIFAHGFLHNRGEKMSKSVGNIVDPVALAEALGVDQVRYFLLREVPFGQDGSYSDEAIVTRINTDLANELGNLAQRSLSMVAKNLDGRVPNPGEFADADAALLATADGLLERVRGHFDAQAMHLALEAIWLMLGDANKYFSVQQPWVLRKSESEADQARFRTTLYVTCEVVRIAALLIQPVMPESAGKILDLLGQAPNQRSFAAVGVRLTPGTALPPPTGVFPRYQPPQPPEGK

SEQ ID NO: 62339 - protein, 264 aa, Mycobacterium bovis
MVDAHTHLDACGARDADTVRSLVERAAAAGVTAVVTVADDLESARWVTRAAEWDRRVYAAVALHPTRADALTDAARAELERLVAHPRVVAVGETGIDMYWPGRLDGCAEPHVQREAFAWHIDLAKRTGKPLMIHNRQADRDVLDVLRAEGAPDTVILHCFSSDAAMARTCVDAGWLLSLSGTVSFRNARELREAVPLMPVEQLLVETDAPYLTPHPHRGLANEPYCLPYTVRALAELVNRRPEEVALITTSNARRAYGLGWMRQ

SEQ ID NO: 62340 - protein, 317 aa, Mycobacterium bovis
MCCTSGCALTIRLLGRTEIRRLAKELDFRPRKSLGQNFVHDANTVRRVVAASGVSRSDLVLEVGPGLGSLTLALLDRGATVTAVEIDPLLASRLQQTVAEHSHSEVHRLTVVNRDVLALRREDLAAAPTAVVANLPYNVAVPALLHLLVEFPSIRVVTVMVQAEVAERLAAEPGSKEYGVPSVKLRFFGRVRRCGMVSPTVFWPIPRVYSGLVRIDRYETSPWPTDDAFRRRVFELVDIAFAQRRKTSRNAFVQWAGSGSESANRLLAASIDPARRGETLSIDDFVRLLRRSGGSDEATSTGRDARAPDISGHASAS

SEQ ID NO: 62341 - protein, 505 aa, Mycobacterium bovis
MTAAATNLAEIGSAISTANGAAALPTVEVVAAAADEVSTQIAALFGAHARSYQTLSTQAAAFHSRFVQALTTAAASYASVEAANASPLQVALDVINAPAQTLLGRPLIGNGADGSTPGQAGGPGGLLYGNGGNGAAGGPNQAGGAGGNAGLIGNGGAGGAGGVGAVGGNGGTGGLLFGNGGAGGQGGLGLAGINGGSGGQGGHGGNAILFGQGGAGGPGGTGAMGVAGTNPTPIGTAAPGSDGVNQIGNGGNTDLTGGAGGDGNAGSTTVNGGNGGTGGAARNSSGGTGNSFGGAGGAGGDGANGGDGGAGGEALTEGGATAVSGAGGKGGNAEASGGAGGNGGKGGFAQATTSVTGGNGGNGGNGHDSNAPGGAGGSGGVGGDGGRGGLLAGNGGTGGAGGNGGTGGAGAPGGAGGAGGKADIANSLGDNATVTGGNGGTGGDGGSALGTGGAGGAGGLGGHGGAGGLLIGNGGAGGAGGLGGAGGAGGAGGEGGAGGAGGEAI

SEQ ID NO: 62342 - protein, 484 aa, Mycobacterium bovis
MLIGAGIMSATLGVLLRRLEPNWSITLIERLDAVAAESSGPWNNAGTGHSALCEMNYTPEMPDGSIDITKAVRVNEQFQVTRQFWAYAAENGILTDVRSFLNPVPHVSFVHGSRGVEYLRRRQKALAGNPLFAGTEFIESPDEFARRLPFMAAKRAFSEPVALNWAADGTDVDFGALAKQLIGYCVQNGTTALFGHEVRNLSRQSDGSWTVTMCNRRTGEKRKLNTKFVFVGAGGDTLPVLQKSGIKEVKGFAGFPIGGRFLRAGNPALTASHRAKVYGFPAPGAPPLGALHLDLRFVNGKSWLVFGPYAGWSPKFLKHGQISDLPRSIRPDNLLSVLGVGLTERRLLNYLISQLRLSEPERVSALREFAPSAIDSDWELTIAGQRVQVIRRDERNGGVLEFGTTVIGDADGSIAGLLGGSPGASTAVAIMLDVLQKCFANRYQSWLPTLKEMVPSLGVQLSNEPALFDEVWSWSTKALKLGAA

SEQ ID NO: 62343 - protein, 174 aa, Mycobacterium bovis
AAGAAVAAVAAVALAGTAPAAVTAVTAGAASKASATHRAGACGGVGAGTAGPAVAAGAAGTTFAASTGHAAMAQQLAGTPGATVAGGAAVTAGAAAATGTTQAGHRAVEAVTAATAIAAVAAGSAGAAAPEQQGGLTPGAAVAAGPAGPAGAATVDTGTARAASATVPAGAGAH

SEQ ID NO: 62344 - protein, 337 aa, Mycobacterium bovis
MTDNRDLARGQAAWAMDQIMTGNARPAQIAAFAVAMTMKAPTADEVGELAGVMLSHAHPLPADTVPDDAVDVVGTGGDGVNTVNLSTMAAIVVAAAGVPVVKHGNRAASSLSGGADTLEALGVRIDLGPDLVARSLAEVGIGFCFAPRFHPSYRHAAAVRREIGVPTVFNLLGPLTNPARPRAGLIGCAFADLAEVMAGVFAARRSSVLVVHGDDGLDELTTTTTSTIWRVAAGSVDKLTFDPAGFGFARAQLDQLAGGDAQANAAAVRAVLGGARGPVRDAVVLNAAGAIVAHAGLSSRAEWLPAWEEGLRRASAAIDTGAAEQLLARWVRFGRQI

SEQ ID NO: 62345 - protein, 652 aa, Mycobacterium bovis
MCGLLAFVAAPAGAAGPEGADAASAIARASHLMRHRGPDESGTWHAVDGASGGVVFGFNRLSIIDIAHSHQPLRWGPPEAPDRYVLVFNGEIYNYLELRDELRTQHGAVFATDGDGEAILAGYHHWGTEVLQRLRGMFAFALWDTVTRELFCARDPFGIKPLFIATGAGGTAVASEKKCLLDLVELVGFDTEIDHRALQHYTVLQYVPEPETLHRGVRRLESGCFARIRADQLAPVITRYFVPRFAASPITNDNDQARYDEITAVLEDSVAKHMRADVTVGAFLSGGIDSTAIAALAIRHNPRLITFTTGFEREGFSEIDVAVASAEAIGARHIAKVVSADEFVAALPEIVWYLDEPVADPALVPLFFVAREARKHVKVVLSGEGADELFGGYTIYREPLSLRPFDYLPKPLRRSMGKVSKPLPEGMRGKSLLHRGSLTLEERYYGNARSFSGAQLREVLPGFRPDWTHTDVTAPVYSESAGWDPVARMQHMDLFTWLRGDILVKADKITMANSLELRVPFLDPEVFAVASRLPAGAKITRTTTKYALRRALEPIVPAHVLHRPKLGFPVPIRHWLRAGELLEWAYATVGSSQAGHLVDIAAVYRMLDEHRCGSSDHSRRLWTMLIFMLWHAIFEEHSVVPQISEPQYPVQL

SEQ ID NO: 62346 - protein, 328 aa, Mycobacterium bovis
MLGALAVTVSGCSWSEALGIGWPEGITPEAHLNRELWIGAVIASLSVGVIVWGLIFWSAVFHRKKNTDTELPRQFGYNMPLELVLTVIPFLIISVLFYFTVVVQEKMLQIAKDPEVVIDITSFQWNWKFGYQRVNFKDGTLTYDGADPERKRAMVSKPEGKDKYGEELVGPVRGLNTEDRTYLNFDKVETLGTSTEIPVLVLPSGKRIEFQMASADVIHAFWVPEFLFKRDVMPNPVANNSVNVFQIEEITKTGAFVGHCAEMCGTYHSMMNFEVRVVTPNDFKAYLQQRIDGKTNAEALRAINQPPLAVTTHPFDTRRGELAPQPVG

SEQ ID NO: 62347 - protein, 299 aa, Mycobacterium bovis
MSGPNPPGREPDEPESEPVSDTGDERASGNHLPPVAGGGDKLPSDQTGETDAYSRAYSAPESEHVTGGPYVPADLRLYDYDDYEESSDLDDELAAPRWPWVVGVAAIIAAVALVVSVSLLVTRPHTSKLATGDTTSSAPPVQDEITTTKPAPPPPPPAPPPTTEIPTATETQTVTVTPPPPPPPATTTAPPPATTTTAAAPPPTTTTPTGPRQVTYSVTGTKAPGDIISVTYVDAAGRRRTQHNVYIPWSMTVTPISQSDVGSVEASSLFRVSKLNCSITTSDGTVLSSNSNDGPQTSC

SEQ ID NO: 62348 - protein, 429 aa, Mycobacterium bovis
MSRADDDAVGVPPTCGGRSDEEERRIVPGPNPQDGAKDGAKATAVPREPDEAALAAMSNQELLALGGKLDGVRIAYKEPRWPVEGTKAEKRAERSVAVWLLLGGVFGLALLLIFLFWPWEFKAADGESDFIYSLTTPLYGLTFGLSILSIAIGAVLYQKRFIPEEISIQERHDGASREIDRKTVVANLTDAFEGSTIRRRKLIGLSFGVGMGAFGLGTLVAFAGGLIKNPWKPVVPTAEGKKAVLWTSGWTPRYQGETIYLARATGTEDGPPFIKMRPEDIDAGGMETVFPWRESDGDGTTVESHHKLQEIAMGIRNPVMLIRIKPSDLGRVVKRKGQESFNFGEFFAFTKVCSHLGCPSSLYEQQSYRILCPCHQSQFDALHFAKPIFGPAARALAQLPITIDTDGYLVANGDFVEPVGPAFWERTTT

SEQ ID NO: 62349 - protein, 317 aa, Mycobacterium bovis
MLATAKRLGYAGPDPVARSLRTRKAGAVGLVMAEPLTYFFSDPAARDFVAGVAQSCEELGQGLQLVSVGSSRSLADGTAAVLGAGVDGFVVYSVGDDDPYLQVVLQRRLPVVVVDQPKDLSGVSRVGIDDRAAMRELAGYVLGLGHRELGLLTMRLGRDRRQDLVDAERLRSPTFDVQRERIVGVWEAMTAAGVDPDSLTVVESYEHLPTSGGTAAKVALQANPRLTALMCTADILALSAMDYLRAHGIYVPGQMTVTGFDGVPEALSRGLTTVAQPSLHKGHRAGELLLKPPRSGLPVIEVLDTELVRGRTAGPPA

SEQ ID NO: 62350 - protein, 181 aa, Mycobacterium bovis
MKVAAQCSKLGYTVAPMEQRAELVVGRALVVVVDDRTAHGDEDHSGPLVTELLTEAGFVVDGVVAVSADEVEIRNALNTAVIGGVDLVVSVGGTGVTPRDVTPEATRDILDREILGIAEAIRASGLSAGIVDAGLSRGLAGVSGSTLVVNLAGSRYAVRDGMATLNPLAAQIIGQLSSLEI

SEQ ID NO: 62351 - protein, 306 aa, Mycobacterium bovis
MSRPEVLTPFTAIVPAAGLGTRFLPATKTVPKELLPVVDTPGIELVAAEAAAAGAERLVIVTSEGKDGVVAHFVEDLVLEGTLEARGKIAMLAKVRRAPALIKVESVVQAEPLGLGHAIGCVEPTLSPDEDAVAVLLPDDLVLPTGVLETMSKVRASRGGTVLCAIEVAREEISAYGVFDVEPVPDGDYTDDPNVLKVRGMVEKPKAETAPSRYAAAGRYVLDRAIFDALRRIDRGAGGEVQLTDAIALLIAEGHPVHVVVHQGSRHDLGNPGGYLKAAVDFALDRDDYGPDLRRWLVARLGLTEQ

SEQ ID NO: 62352 - protein, 364 aa, Mycobacterium bovis
MLAIGAVTIAVVSAGIGGAAASLVGFNRAPAGPSGGPVAASAAPSIPAANMPPGSVEQVAAKVVPSVVMLETDLGRQSEEGSGIILSAEGLILTNNHVIAAAAKPPLGSPPPKTTVTFSDGRTAPFTVVGADPTSDIAVVRVQGVSGLTPISLGSSSDLRVGQPVLAIGSPLGLEGTVTTGIVSALNRPVSTTGEAGNQNTVLDAIQTDAAINPGNSGGALVNMNAQLVGVNSAIATLGADSADAQSGSIGLGFAIPVDQAKRIADELISTGKASHASLGVQVTNDKDTPGAKIVEVVAGGAAANAGVPKGVVVTKVDDRPINSADALVAAVRSKAPGATVALTFQDPSGGSRTVQVTLGKAEQ

SEQ ID NO: 62353 - protein, 223 aa, Mycobacterium bovis
MLIARLFVGAVPALARDGRGCVIVEDMAIASKSALRDQLLAARRRVADDVRAAEARMLRGHLERMVTSDSTVCAYVPVGGEPGSIEMLDVLLRRAGRVLLPVARTAGGDLPLPLRWGEYRAGGLARARWGLLEPPEPWLPEAALAQASLVLVPALAVDRQGVRLGRGRGFYDRSLRCRDPHARLVAVVRTVELVDVLPSEPHDVPMTHALTPERGLIALPCGE

SEQ ID NO: 62354 - protein, 248 aa, Mycobacterium bovis
MNRQPIVQLSNLSWTFREGETRRQVLDHITFDFEPGEFVALLGQSGSGKSTLLNLISGIEKPTTGDVTINGFAITQKTERDRTLFRRDQIGIVFQFFNLIPTLTVLENITLPQELAGVSQRKAAVVARDLLEKVGMADRERTFPDKLSGGEQQRVAISRALAHNPMLVLADEPTGNLDSDTGDKVLDVLLDLTRQAGKTLIMATHSPSMTQHADRVVNLQGGRLIPALNRENQTDQPASTILLPTSYE

SEQ ID NO: 62355 - protein, 115 aa, Mycobacterium bovis
MPVTQEEIIAGIAEIIEEVTGIEPSEITPEKSFVDDLDIDSLSMVEIAVQTEDKYGVKIPDEDLAGLRTVGDVVAYIQKLEEENPEAAQALRAKIESENPDAVANVQARLEAESK

SEQ ID NO: 62356 - protein, 416 aa, Mycobacterium bovis
MSQPSTANGGFPSVVVTAVTATTSISPDIESTWKGLLAGESGIHALEDEFVTKWDLAVKIGGHLKDPVDSHMGRLDMRRMSYVQRMGKLLGGQLWESAGSPEVDPDRFAVVVGTGLGGAERIVESYDLMNAGGPRKVSPLAVQMIMPNGAAAVIGLQLGARAGVMTPVSACSSGSEAIAHAWRQIVMGDADVAVCGGVEGPIEALPIAAFSMMRAMSTRNDEPERASRPFDKDRDGFVFGEAGALMLIETEEHAKARGAKPLARLLGAGITSDAFHMVAPAADGVRAGRAMTRSLELAGLSPADIDHVNAHGTATPIGDAAEANAIRVAGCDQAAVYAPKSALGHSIGAVGALESVLTVLTLRDGVIPPTLNYETPDPEIDLDVVAGEPRYGDYRYAVNNSFGFGGHNVALAFGRY

SEQ ID NO: 62357 - protein, 247 aa, Mycobacterium bovis
MTATATEGAKPPFVSRSVLVTGGNRGIGLAIAQRLAADGHKVAVTHRGSGAPKGLFGVECDVTDSDAVDRAFTAVEEHQGPVEVLVSNAGLSADAFLMRMTEEKFEKVINANLTGAFRVAQRASRSMQRNKFGRMIFIGSVSGSWGIGNQANYAASKAGVIGMARSIARELSKANVTANVVAPGYIDTDMTRALDERIQQGALQFIPAKRVGTPAEVAGVVSFLASEDASYISGAVIPVDGGMGMGH

SEQ ID NO: 62358 - protein, 63 aa, Mycobacterium bovis
MRVIVDRDRCEGNAVCLGIAPDIFDLDDEDYAVVKTDPIPVDQEDLAEQAIAECPRAALSRGE

SEQ ID NO: 62359 - protein, 400 aa, Mycobacterium bovis
MSGGGSRRTSVRVAAALLAGLMVGSAVLTYLSYTAAFTSTDTVTVSSPRAGLVMEKGAKVKYRGIQVGKVTDISYSGNQARLKLAIDSGEMGFIPSNATVRIAGNTIFGAKSVEFIPPKTPSPKPLSPNAHVAASQVQLEVNTLFQSLIDLLHKIDPLETNATLSALSEGLRGHGDDLGALLSGLNTLTRQANPKLPALQEDFRKAAVVANVYADAAGDLNTVFDNLPTINKTIVDQKDNLNDTLLATIGLSNNAYETLAPAEQNFIDAINRLRAPLKVTSDYSPVFGCLFKGIARGVKEFAPLIGVRKAGLFTSSSFVLGAPSYTYPESLPIVNASGGPNCRGLPDIPTKQTGGSFYRAPFLVTDNALIPYQPFTELQVDAPSTLQFLFNGAFAERDDF

SEQ ID NO: 62360 - protein, 307 aa, Mycobacterium bovis
  MISC_FEATURE (252)..(252): X=any amino acid
  MISC_FEATURE (265)..(265): X=any amino acid
MGGDLSEGTVKGDEVACPFHDWRWGGDGRCKLVPYARRTPRMARTRSWTTDVRSGLLFVWHDHEGNPPDPAVRIPEIPEAASDEWTDWRWNRILIEGSNCRDIIDNVTDMAHFFYIHFGLPTYFKNVFEGHIASQYLHNVGRPDVDDLGTSYGEAHLDSEASYFGPSFMINWLHNRYGNYKSESILINCHYPVTQNSFVLQWGVIVEKPKGMSEEMTDKLSRVFTEGVSKGFLQDVEIWKHKTRIDQPAAGXRGRRRVSAAPLVXTVLCRRSRHKTRDGGALRDRGRHQARQRVLECEVEKNLKSRE

SEQ ID NO: 62361 - protein, 121 aa, Mycobacterium bovis
MELRDWLRVDVKAGKPLFDQLRTQVIDGVRAGALPPGTRLPTVRDLAGQLGVAANTVARAYRELESAAIVETRGRFGTFISRFDPTDAAMAAAAKEYVGVARALGLTKSDAMRYLTHVPDD

SEQ ID NO: 62362 - protein, 198 aa, Mycobacterium bovis
MSVPRVGVLALQGDTREHLAALRECGAEPMTVRRRDELDAVDALVIPGGESTTMSHLLLDLDLLGPLRARLADGLPAYGSCAGMILLASEILDAGAAGRQALPLRAMNMTVRRNAFGSQVDSFEGDIEFAGLDDPVRAVFIRAPWVERVGDGVQVLARAAGHIVAVRQGAVLATAFHPEMTGDRRIHQLFVDIVTSAA

SEQ ID NO: 62363 - protein, 697 aa, Mycobacterium bovis
METDPMSAPAQPAPGVDGGDPSQARIRVPAGTTAATAVGEAGLPRRGTPDAIVVVRDADGNLRDLSWVPDVDTDITPVAANTDDGRSVIRHSTAHVLAQAVQELFPQAKLGIGPPITDGFYYDFDVPEPFTPEDLAALEKRMRQIVKEGQLFDRRVYESTEQARAELANEPYKLELVDDKSGDAEIMEVGGDELTAYDNLNPRTRERVWGDLCRGPHIPTTKHIPAFKLTRSSAAYWRGDQKNASLQRIYGTAWESQEALDRHLEFIEEAQRRDHRKLGVELDLFSFPDEIGSGLAVFHPKGGIVRRELEDYSRRKHTEAGYQFVNSPHITKAQLFHTSGHLDWYADGMFPPMHIDAEYNADGSLRKPGQDYYLKPMNCPMHCLIFRARGRSYRELPLRLFEFGTVYRYEKSGVVHGLTRVRGLTMDDAHIFCTRDQMRDELRSLLRFVLDLLADYGLTDFYLELSTKDPEKFVGAEEVWEEATTVLAEVGAESGLELVPDPGGAAFYGPKISVQVKDALGRTWQMSTIQLDFNFPERFGLEYTAADGTRHRPVMIHRALFGSIERFFGILTEHYAGAFPAWLAPVQVVGIPVADEHVAYLEEVATQLKSHGVRAEVDASDDRMAKKIVHHTNHKVPFMVLAGDRDVAAGAVSFRFGDRTQINGVARDDAVAAIVAWIADRENAVPTAELVKVAGRE

SEQ ID NO: 62364 - protein, 306 aa, Mycobacterium bovis
MGTRGGTMDPAGNPATGTARVKRGMAEMLKGGVIMDVVTPEQARIAEGAGAVAVMALERVPADIRAQGGVSRMSDPDMIEGIIAAVTIPVMAKVRIGHFVEAQILQTLGVDYIDESEVLTPADYAHHIDKWNFTVPFVCGATNLGEALRRISEGAAMIRSKGEAGTGDVSNATTHMRAIGGEIRRLTSMSEDELFVAAKELQAPYELVAEVARAGKLPVTLFTAGGIATPADAAMMMQLGAEGVFVGSGIFKSGAPEHRAAAIVKATTFFDDPDVLAKVSRGLGEAMVGINVDEIAVGHRLAQRGW

SEQ ID NO: 62365 - protein, 252 aa, Mycobacterium bovis
MLIGSHVSPTDPLAAAEAEGADVVQIFLGNPQSWKAPKPRDDAAALKAATLPIYVHAPYLINLASANNRVRIPSRKILQETCAAAADIGAAAVIVHGGHVADDNDIDKGFQRWRKALDRLETEVPVYLENTAGGDHAMARRFDTIARLWDVIGDTGIGFCLDTCHTWAAGEALTDAVDRIKAITGRIDLVHCNDSRDEAGSGRDRHANLGSGQIDPDLLVAAVKAAGAPVICETADQGRKDDIAFLRERTGS

SEQ ID NO: 62366 - protein, 240 aa, Mycobacterium bovis
MPAMTARSVVLSVLLGAHPAWATASELIQLTADFGIKETTLRVALTRMVGAGDLVRSADGYRLSDRLLARQRRQDEAMRPRTRAWHGNWHMLIVTSIGTDARTRAALRTCMHHKRFGELREGVWMRPDNLDLDLESDVAARVRMLTARDEAPADLAGQLWDLSGWTEAGHRLLGDMAAATDMPGRFVVAAAMVRHLLTDPMLPAELLPADWPGAGLRAAYHDFATAMAKRRDATQLLEVT

SEQ ID NO: 62367 - protein, 444 aa, Mycobacterium bovis
  MISC_FEATURE (416)..(416): X=any amino acid
VGAGSRFPLVDPLPSVGARPDRLRGQPRRRTRAGGRPGSARCVPEAAAAAAGRHDTGPRRQSRRRLVAVDGADHRVQRAVIWPLVYLKSLTLKGFKSFAAPTTLRFEPGITAVVGPNGSGKSNVVDALAWVMGEQGAKTLRGGKMEDVIFAGTSSRAPLGRAEVTVSIDNSDNALPIEYTEVSITRRMFRDGASEYEINGSSCRLMDVQELLSDSGIGREMHVIVGQGKLEEILQSRPEDRRAFIEEAAGVLKHRKRKEKALRKLDTMAANLARLTDLTTELRRQLKPLGRQAEAAQRAAAIQADLRDARLRLAADDLVSRRAEREAVFQAEAAMRREHDEAAARLAVASEELAAHESAVAELSTRAESIQHTWFGLSALAERVDATVRIASERAHHLDIEPVAVSDTDPRSPESXKPEAQQVAVAEQQLLAEPDAARARLDAA

SEQ ID NO: 62368 - protein, 289 aa, Mycobacterium bovis
MPELPEVEVVRRGLQAHVTGRTITEVRVHHPRAVRRHDAGPADLTARLRGARINGTDRRGKYLWLTLNTAGVHRPTDTALVVHLGMSGQMLLGAVPCAAHVRISALLDDGTVLSFADQRTFGGWLLADLVTVDGSVVPVPVAHLARDPLDPRFDCDAVVKVLRRKHSELKRQLLDQRVVSGIGNIYADEALWRAKVNGAHVAATLRCRRLGAVLHAAADVMREALAKGGTSFDSLYVNVNGESGYFERSLDAYGREGENCRRCGAVIRRERFMNRSSFYCPRCQPRPRK

SEQ ID NO: 62369 - protein, 394 aa, Mycobacterium bovis
MPAASASDRVEELVRRRGGELVELSHAIHAEPELAFAEHRSCAKAQALVAERGFEITTAAGGLDTAFRADYGSGPLVVGVCAEYDALPGIGHACGHNIIAASAVGTALALAEVADDLGLTVALLGTPAEESGGGKALMLQAGTFDDVAVAVMVHPGPTDIAGARSLALSEVTVRYRGKESHAAVAPHLGVNAADAVTVAQVAIGVLRQQLAPGQMVHGIVTDGGQAVNVIPGQARLQYAMRAVESDSLRELQTRMFACFAAGALAAGCEYEIDEAAPAYAELKPDPWLADVCREEMQRLGREPLLPALEAELPLGSTDMGNVTQVLPGIHPVIGLDAGAATVHQRAFTVASAGASADRAVVDGAIMLARTVVRLAQTPDERDRVLAAQQRRAAR

SEQ ID NO: 62370 - protein, 534 aa, Mycobacterium bovis
MTPENWIAHDPDPQTAAELAACGPDELKARFSRPLAFGTAGLRGHLRGGPDAMNLAVVLRATWAVARVLTDRGLAGSPVIVGRDARHGSPAFAAAAAEVLAAAGFSVLLLPDPAPTPVVAFAVRHTGAAAGIQITASHNPATDNGYKVYVDGGLQLLAPTDRQIEAAMATAPPADQIARKTVNPSENRASDLIDRYIQRAAGVRRCAGSVRVALTPLHGVGGAMAVETLRRAGFTEVHTVATQFAPNPDFPTVTLPNPEEPGATDALLTLATDVDADVAIALDPDADRCAVGIPTVSGWRMLSGDETGWLLGDYILSQTDDRASPPETRVVASTVVSSRMLAAIAAHHAAVHVETLTGFKWLARADANLPGTLVYAYEEAIGHCVDPTAVRDKDGISAAVLVCDLVAALKGQGRSVTDALDELARCYGVHEVAALSRPVGGAVETTDLMRRLREDPPRRLAGFPATVTDIGDTLILTGGDDNMLVRVAVRPSGTEPKLKCYLEIRCAVTGDLPAARQLVRARIDELSASVRRWW

SEQ ID NO: 62371 - protein, 207 aa, Mycobacterium bovis
MQVHVVDHPLAAARLTTLRDERTDNAGFRAALRELTLLLIYEATRDAPCEPVPIRTPLAETVGSRLTKPPLLVPVLRAGLGMVDEAHAALPEAHVGFVGVARDEQTHQPVPYLDSLPDDLTDVPVMVLDPMVATGGSMTHTLGLLISRGAADITVLCVVAAPEGIAALQKAAPNVRLFTAAIDEGLNEVAYIVPGLGDAGDRQFGPR

SEQ ID NO: 62372 - protein, 509 aa, Mycobacterium bovis
MLVVDFGAQYAQLIARRVREARVFSEVIPHTASIEEIRARQPVALVLSGGPASVYADGAPKLDPALLDLGVPVLGICYGFQAMAQALGGIVAHTGTREYGRTELKVLGGKLHSDLPEVQPVWMSHGDAVTAAPDGFDVVASSAGAPVAAFEAFDRRLAGVQYHPEVMHTPHGQQVLSRFLHDFAGLGAQWTPANIANALIEQVRTQIGDGHAICGLSGGVDSAVAAALVQRAIGDRLTCVFVDHGLLRAGERAQVQRDFVAATGANLVTVDAAETFLEALSGVSAPEGKRKIIGRQFIRAFEGAVRDVLDGKTAEFLVQGTLYPDVVESGGGSGTANIKSHHNVGGLPDDLKFTLVEPLRLLFKDEVRAVGRELGLPEEIVARQPFPGPGLGIRIVGEVTAKRLDTLRHADSIVREELTAAGLDNQIWQCPVVLLADVRSVGVQGDGRTYGHPIVLRPVSSEDAMTADWTRVPYEVLERISTRITNEVAEVNRVVLDITSKPPATIEWE

SEQ ID NO: 62373 - protein, 524 aa, Mycobacterium bovis
MDTDNAMPARFSAQIQNEDEVTSDQGNNGGPNGGGRLAPRPVFRPPVDPASRQAFGRPSGVQGSFVAERVRPQKYQDQSDFTPNDQLADPVLQEAFGRPFAGAESLQRHPIDAGALAAEKDGAGPDEPDDPWRDPAAAAALGTPALAAPAPHGALAGSGKLGVRDVLFGGKVSYLALGILVAIALVIGGIGGVIGRKTAEVVDAFTTSKVTLSTTGNAQEPAGRFTKVAAAVADSVVTIESVSDQEGMQGSGVIVDGRGYIVTNNHVISEAANNPSQFKTTVVLNDGKEVPANLVGRDPKTDLAVLKVDNVDNLTVARLGDSSKVRVGDEVLAVGAPLGLRSTVTQGIVSALHRPVPLSGEGSDTDTVIDAIQTDASINHGNSGGPLIDMDAQVIGINTAGKSLSDSASGLGFAIPVNEMKLVANSLIKDGKIVHPTLGINTRSVSNAIASGAQVANVKAGSPAQKGGILENDVIVKVGNRAVADSDEFVVAVRQLAIGQDAPIEVVREGRHVTLTVKPDPDST

SEQ ID NO: 62374 - protein, 381 aa, Mycobacterium bovis
MAAIAPLVFASAVGGAAPVFPGRTAPVHAVITPVAAVAASGIDLSGPVVIAMKRPPTSFRVAVATIPAPPPPMIVNSPGALGIPAMALSAYRNAELKMAAAAPGCGVSWNLLAGIGRIESMHANGGATDARGTAIQPIYGPTLDGTLPGNEIIIQSSVGNRVTYARAMGPMQFLPGTWARYATDGDDDGVADPQNLFDSTLAAARYLCSGGLNLRDPAQVMAALLRYNNSMPYAQNVLGWAAGYATGVFPVDLPPITGPPPPLGDAHLENPEGLGPGLPINVNGLTADGPMAHLPLIDLTPRQAALNPPPMFPWMAPDPSAPMPGCTLICIGSHGPPVGAPPFPPTAPPPPFLPAAPPPPDPLAGPPGDAGLAPPAPAPAG

SEQ ID NO: 62375 - protein, 339 aa, Mycobacterium bovis
MRAVVIDGAGSVRVNTQPDPALPGPDGVVVAVTAAGICGSDLHFYEGEYPFTEPVALGHEAVGTIVEAGPQVRTVGVGDLVMVSSVAGCGVCPGCEPMIQSCASSGPMIFGAGVLGGAQADLLAVPAADFQVLKIPEGITTEQALLLTDNLATGWAAAQRADISFGSAVAVIGLGAVGLCALRSAFIHGAATVFAVDRVKGRLQRAATWGATPIPSPAAETILAATRGRGADSVIDAVGTDASMSDALNAVRPGGTVSVVGVHDLQPFPLPALTCLLRSITLRMTMAPVQRTWPELIPLLQSGRLDVDGIFTTTLPLDEAAKGYATARARSGEELKVLL

SEQ ID NO: 62376 - protein, 1316 aa, Mycobacterium bovis
MLDVNFFDELRIGLATAEDIRQWSYGEVKKPETINYRTLKPEKDGLFCEKIFGPTRDWECYCGKYKRVRFKGIICERCGVEVTRAKVRRERMGHIELAAPVTHIWYFKGVPSRLGYLLDLAPKDLEKIIYFAAYVITSVDEEMRHNELSTLEAEMAVERKAVEDQRDGELEARAQKLEADLAELEAEGAKADARRKVRDGGEREMRQIRDRAQRELDRLEDIWSTFTKLAPKQLIVDENLYRELVDRYGEYFTGAMGAESIQKLIENFDIDAEAESLRDVIRNGKGQKKLRALKRLKVVAAFQQSGNSPMGMVLDAVPVIPPELRPMVQLDGGRFATSDLNDLYRRVINRNNRLKRLIDLGAPEIIVNNEKRMLQESVDALFDNGRRGRPVTGPGNRPLKSLSDLLKGKQGRFRQNLLGKRVDYSGRSVIVVGPQLKLHQCGLPKLMALELFKPFVMKRLVDLNHAQNIKSAKRMVERQRPQVWDVLEEVIAEHPVLLNRAPTLHRLGIQAFEPMLVEGKAIQLHPLVCEAFNADFDGDQMAVHLPLSAEAQAEARILMLSSNNILSPASGRPLAMPRLDMVTGLYYLTTEVPGDTGEYQPASGDHPETGVYSSPAEAIMAADRGVLSVRAKIKVRLTQLRPPVEIEAELFGHSGWQPGDAWMAETTLGRVMFNELLPLGYPFVNKQMHKKVQAAIINDLAERYPMIVVAQTVDKLKDAGFYWATRSGVTVSMADVLVPPRKKEILDHYEERADKVEKQFQRGALNHDERNEALVEIWKEATDEVGQALREHYPDDNPIITIVDSGATGNFTQTRTLAGMKGLVTNPKGEFIPRPVKSSFREGLTVLEYFINTHGARKGLADTALRTADSGYLTRRLVDVSQDVIVREHDCQTERGIVVELAERAPDGTLIRDPYIETSAYARTLGTDAVDEAGNVIVERGQDLGDPEIDALLAAGITQVKVRSVLTCATSTGVCATCYGRSMATGKLVDIGEAVGIVAAQSIGEPGTQLTMRTFHQGGVGEDITGGLPRVQELFEARVPRGKAPIADVTGRVRLEDGERFYKITIVPDDGGEEVVYDKISKRQRLRVFKHEDGSERVLSDGDHVEVGQQLMEGSADPHEVLRVQGPREVQIHLVREVQEVYRAQGVSIHDKHIEVIVRQMLRRVTIIDSGSTEFLPGSLIDRAEFEAENRRVVAEGGEPAAGRPVLMGITKASLATDSWLSAASFQETTRVLTDAAINCRSDKLNGLKENVIIGKLIPAGTGINRYRNIAVQPTEEARAAAYTIPSYEDQYYSPDFGAATGAAVPLDDYGYSDYR

SEQ ID NO: 62377 - protein, 1096 aa, Mycobacterium bovis
MGGLEEVLYELSPIEDFSGSMSLSFSDPRFDDVKAPVDECKDKDMTYAAPLFVTAEFINNNTGEIKSQTVFMGDFPMMTEKGTFIINGTERVVVSQLVRSPGVYFDETIDKSTDKTLHSVKVIPSRGAWLEFDVDKRDTVGVRIDRKRRQPVTVLLKALGWTSEQIVERFGFSEIMRSTLEKDNTVGTDEALLDIYRKLRPGEPPTKESAQTLLENLFFKEKRYDLARVGRYKVNKKLGLHVGEPITSSTLTEEDVVATIEYLVRLHEGQTTMTVPGGVEVPVETDDIDHFGNRRLRTVGELIQNQIRVGMSRMERVVRERMTTQDVEAITPQTLINIRPVVAAIKEFFGTSQLSQFMDQNNPLSGLTHKRRLSALGPGGLSRERAGLEVRDVHPSHYGRMCPIETPEGPNIGLIGSLSVYARVNPFGFIETPYRKVVDGVVSDEIVYLTADEEDRHVVAQANSPIDADGRFVEPRVLVRRKAGEVEYVPSSEVDYMDVSPRQMVSVATAMIPFLEHDDANRALMGANMQRQAVPLVRSEAPLVGTGMELRAAIDAGDVVVAEESGVIEEVSADYITVMHDNGTRRTYRMRKFARSNHGTCANQCPIVDAGDRVEAGQVIADGPCTDDGEMALGKNLLVAIMPWEGHNYEDAIILSNRLVEEDVLTSIHIEEHEIDARDTKLGAEEITRDIPNISDEVLADLDERGIVRIGAEVRDGDILVGKVTPKGETELTPEERLLRAIFGEKAREVRDTSLKVPHGESGKVIGIRVFSREDEDELPAGVNELVRVYVAQKRKISDGDKLAGRHGNKGVIGKILPVEDMPFLADGTPVDIILNTHGVPRRMNIGQILETHLGWCAHSGWKVDAAKGVPDWAARLPDELLEAQPNAIVSTPVFDGAQEAELQGLLSCTLPNRDGDVLVDADGKAMLFDGRSGEPFPYPVTVGYMYIMKLHHLVDDKIHARSTGPYSMITQQPLGGKAQFGGQRFGEMECWAMQAYGAAYTLQELLTIKSDDTVGRVKVYEAIVKGENIPEPGIPESFKVLLKELQSLCLNVEVLSSDGAAIELREGEDEDLERAAANLGINLSRNESASVEDLA

SEQ ID NO: 62378 - protein, 130 aa, Mycobacterium bovis
MAKLSTDELLDAFKEMTLLELSDFVKKFEETFEVTAAAPVAVAAAGAAPAGAAVEAAEEQSEFDVILEAAGDKKIGVIKVVREIVSGLGLKEAKDLVDGAPKPLLEKVAKEAADEAKAKLEAAGATVTVK

SEQ ID NO: 62379 - protein, 787 aa, Mycobacterium bovis
MPQPRTHLPIPSAARTGLITYDAKDPDSTYPPIEQLRPPAGAPNVLLILLDDVGFGASSAFGGPCRTSTAELLAGNGLRYNRFHTTALCSPTRQALLTGRNHHSAGMGGITEIATGAPGYSSVLPNTMSPIARTLKLNGYNTAQFGKCHEVPVWQTSPVGPFDAWPSGGGGFEYFYGFIGGEANQWYPSLYEGTTPVEVNRTPEEGYHFMADMTDKALGWIGQQKALAPDRPFFVYFAPGATHAPHHVPREWADKYRGRFDVGWDALREETFARQKELGVIPADCQLTARHAEIPAWDDMPEDLKPVLCRQMEVYAGFLEYTDHHVGRLVDGLQRLGVLDDTLVFYIIGDNGASAEGTINGTYNEMLNFNGLADIETPRFMTDRLDKFGGPESYNHYSVGWAHAMDTPYQWTKQVASHWGGTRNGTIVHWPNGIAAKGEMRWQFHHVIDVAPTILEAAGLPEPLFVNGVQQHPIEGVSMAYSFDDAQAPDRHETQYFEMFGNRGIYHKGWTAVTKHKTPWILVGEQTVAFDDDVWELYDTTKDWSQAKDLAKEMPEKLHELQRLWLIEATRYNVLPLDDDTASRINPDLAGRPVLIRGNTQVLFSNMGRLSENCVLNLKNKSHTVTAEVEVPETGAEGVIVAQGASIGGWSLYANDGKLKYCYNLGGIKHFYAESADPLPAGAHQVRMEFAYAGGGLGKGGEVTLYVDGQQVGEGHVEATLAIVFSADDGCDVGMDSGSPVSPDYAPGSNAFNGRIKGVQLAIAEAAAAAGHLVDPEHAIRIALARQ

SEQ ID NO: 62380 - protein, 178 aa, Mycobacterium bovis
MARADKATAVADIAAQFKESTATLITEYRGLTVANLAELRRSLTGSATYAVAKNTLIKRAASEAGIEGLDELFVGPTAIAFVTGEPVDAAKAIKTFAKEHKALVIKGGYMDGHPLTVAEVERIADLESREVLLAKLAGAMKGNLAKAAGLFNAPASQLARLAAALQEKKACPGPDSAE

SEQ ID NO: 62381 - protein, 266 aa, Mycobacterium bovis
MTILEIKDLHVSVENPAEADHEIPILRGVDLTVKSGETHALMGPNGSGKSTLSYAIAGHPKYHVTSGTITLDGADVLAMSIDERARAGLFLAMQYPVEVPGVSMSNFLRSAATAIRGEPPKLRHWVKEVKAAMAALDIDPAFAERSVNEGFSGGEKKRHEILQLELLKPKIAILDETDSGLDVDALRVVSEGVNRYAESQHGGILLITHYTRILRYIHPEYVHVFVGGRIVESGGSELADELDQNGYVRFSPASGRYPHQPAPTGA

SEQ ID NO: 62382 - protein, 328 aa, Mycobacterium bovis
MHAIEVTETGGPGVLRHVDQPQPQPGHGELLIKAEAIGVNFIDTYFRSGQYPRELPFVIGSEVCGTVEAVGPGVTAADTAISVGDRVVSASANGAYAEFCTAPASLTAKVPDDVTSEVAASALLKGLTAHYLLKSVYPVKRGDTVLVHAGAGGVGLILTQWATHLGVRVITTVSTAEKAKLSKDAGADVVLDYPEDAWQFAGRVRELTGGTGVQAVYDGVGATTFDASLASLAVRGTLALFGAASGPVPPVDPQRLNAAGSVYLTRPSLFHFTRTGEEFSWRAAELFDAIGSEAITVAVGGRYPLADALRAHQDLEARKTVGSVVLLP

SEQ ID NO: 62383 - protein, 162 aa, Mycobacterium bovis
MTLRLEQIYQDVILDHYKHPQHRGLREPFGAQVYHVNPICGDEVTLRVALSEDGTRVTDVSYDGQGCSISQAATSVLTEQVIGQRVPRALNIVDAFTEMVSSRGTVPGDEDVLGDGVAFAGVAKYPARVKCALLGWMAFKDALAQASEAFEEVTDERNQRTG

SEQ ID NO: 62384 - protein, 261 aa, Mycobacterium bovis
MTQTNRPAFPAGTFSPDPRPNAVPLMLAAQFSLELKLLLRNGEQLLLTMFIPITLLVGLTLLPMGSFGHNRAATFVPVIMALAVISTAFTGQAIAVAFDRRYGALKRLGATPLPVWGIIAGKSLAVVAVVFLQAIILGAIGFALGWRPALTALTLGAGIIALGTAGFAALGLLLGGTLRAEIVLAVANLMWFVFAGFGALTLESNVIPTAFKWVARVTPSGALTEALSQAMTVSVDWFGIVVLAVWGALAALAALRWFRFT

SEQ ID NO: 62385 - protein, 96 aa, Mycobacterium bovis
MRPYEIMVILDPTLDERTVAPSLETFLNVVRKDGGKVEKVDIWGKRRLAYEIAKHAEGIYVVIDVKAAPATVSELDRQLSLNESVLRTKVMRTDKH

SEQ ID NO: 62386 - protein, 904 aa, Mycobacterium bovis
MQTHEIRKRFLDHFVKAGHTEVPSASVILDDPNLLFVNAGMVQFVPFFLGQRTPPYPTATSIQKCIRTPDIDEVGITTRHNTFFQMAGNFSFGDYFKRGAIELAWALLTNSLAAGGYGLDPERIWTTVYFDDDEAVRLWQEVAGLPAERIQRRGMADNYWSMGIPGPCGPSSEIYYDRGPEFGPAGGPIVSEDRYLEVWNLVFMQNERGEGTTKEDYQILGPLPRNNIHTGMGVERIALVLQDVHNAYETDLLRPVIDTVARVAARAYDVGNHEDDVRYRIIADHSRTAAILIGDGVSPGNDGRGYVLRRLLRRVIRSAKLLGIDAAIVGDLMATVRNAMGPSYPELVADFERISRIAVAEETAFNRTLASGSRLFEEVASSTKKSGATVLSGSDAFTLHDTYGFPIELTLEMAAETGLQVDEIGFRELMAEQRRRAKADAAARKHAHADLSAYRELVDAGATEFTGFDELRSQARILGIFVDGKRVPVVAHGVAGGAGEGQRVELVLDRTPLYAESGGQIADEGTISGTGSSEAARAAVTDVQKIAKTLWVHRVNVESGEFVEGDTVIAAVDPGWRRGATQGHSGTHMVHAALRQVLGPNAVQAGSLNRPGYLRFDFNWQGPLTDDQRTQVEEVTNEAVQADFEVRTFTEQLDKAKAMGAIALFGESYPDEVRVVEMGGPFSLELCGGTHVSNTAQIGPVTILGESSIGSGVRRVEAYVGLDSFRHLAKERALMAGLASSLKVPSEEVPARVANLVERLRAAEKELERVRMASARAAATNAAAGAQRIGNVRLVAQRMSGGMTAADLRSLIGDIRGKLGSEPAVVALIAEGESQTVPYAVAANPAAQDLGIRANDLVKQLAVAVEGRGGGKADLAQGSGKNPTGIDAALDAVRSEIAVIARVG

SEQ ID NO: 62387 - protein, 170 aa, Mycobacterium bovis
MVPAQHRPPDRPGDPAHDPGRGRRLGIDVGAARIGVACSDPDAILATPVETVRRDRSGKHLRRLAALAAELEAVEVIVGLPRTLADRIGRSAQDAIELAEALARRVSPTPVRLADERLTTVSAQRSLRQAGVRASEQRAVIDQAAAVAILQSWLDERLAAMAGTQEGSDA

SEQ ID NO: 62388 - protein, 268 aa, Mycobacterium bovis
SEGPKKAGVLGSPIAHSRSPQLHLAAYRALGLHDWTYERIECGAAELPVVVGGFGPEWVGVSVTMPGKFAALRFADERTARADLVGSANTLVRTPHGWRADNTDIDGVAGALGAAAGHALVLGSGGTAPAAVVGLAELGVTDITVVARNSDKAARLVDLGTRVGVATRFCAFDSGGLADAVAAAEVLVSTIPAEVAAGYAGTLAAIPVLLDAIYDPWPTPLAAAVGSAGGRVISGLQMLLHQAFAQVEQFTGLPAPREAMTCALAALD

SEQ ID NO: 62389 - protein, 139 aa, Mycobacterium bovis
MLAAAVLAWMGVLCVCDVRQRRLPNWLTLPGAGVILLFAGLAGRGVPALAGAAALAGVYLLVHLALPAAMGAGDVKLAIGLGGLTGCFGVEVWFLAALAAPLLTAVCGVMVTPWGVRTLPHGPSMCVASLGAVGLALLG

SEQ ID NO: 62390 - protein, 452 aa, Mycobacterium bovis
MPEAVSDGLFDVPGVPMTSGHDLGASAGAPLAVRMRPASLDEVVGQDHLLAPGSPLRRLVEGSGVASVILYGPPGSGKTTLAALISQATGRRFEALSALSAGVKEVRAVIENSRKALLHGEQTVLFIDEVHRFSKTQQDALLSAVEHRVVLLVAATTENPSFSVVAPLLSRSLILQLRPLTAEDTRAVVQRAIDDPRGLGRAVAVAPEAVDLLVQLAAGDARRALTALEVAAEAAQAAGELVSVQTIERSVDKAAVRYDRDGDQHYDVVSAFIKSVRGSDVDAALHYLARMLVAGEDPRFIARRLMILASEDIGMADPSALQVAVAAAQTVALIGMPEAQLTLAHATIHLATAPKSNAVTTALAAAMNDIKAGKAGLVPAHLRDGHYSGAAALGNAQGYKYSHDDPDGVVAQQYPPDELVDVDYYRPTGRGGEREIAGRLDRLRAIIRKKRG

SEQ ID NO: 62391 - protein, 217 aa, Mycobacterium bovis
MARKGILGTKLGMTQVFDESNRVVPVTVVKAGPNVVTRIRTPERDGYSAVQLAYGEISPRKVNKPLTGQYTAAGVNPRRYLAELRLDDSDAATEYQVGQELTAEIFADGSYVDVTGTSKGKGFAGTMKRHGFRGQGASHGAQAVHRRPGSIGGCATPARVFKGTRMAGRMGNDRVTVLNLLVHKVDAENGVLLIKGAVPGRTGGLVMVRSAIKRGEK

SEQ ID NO: 62392 - protein, 101 aa, Mycobacterium bovis
MAGQKIRIRLKAYDHEAIDASARKIVETVVRTGASVVGPVPLPTEKNVYCVIRSPHKYKDSREHFEMRTHKRLIDIIDPTPKTVDALMRIDLPASVDVNIQ

SEQ ID NO: 62393 - protein, 136 aa, Mycobacterium bovis
MMAEAKTGAKAAPRVAKAAKAAPKKAAPNDAEAIGAANAANVKGPKHTPRTPKPRGRRKTRIGYVVSDKMQKTIVVELEDRMRHPLYGKIIRTTKKVKAHDEDSVAGIGDRVSLMETRPLSATKRWRLVEILEKAK

SEQ ID NO: 62394 - protein, 77 aa, Mycobacterium bovis
MAVGVSPGELRELTDEELAERLRESKEELFNLRFQMATGQLNNNRRLRTVRQEIARIYTVLRERELGLATGPDGKES

SEQ ID NO: 62395 - protein, 138 aa, Mycobacterium bovis
MWISRKVKHRKQHHPRQRGIASGGTTVNFGDYGIQALEHAYVTNRQIESARIAINRHIKRGGKVWINIFPDRPLTKKPAETRMGSGKGSPEWWVANVKPGRVLFELSYPNEGVARAALTRAIHKLPIKARIITREEQF

SEQ ID NO: 62396 - protein, 274 aa, Mycobacterium bovis
MGQKINPHGFRLGITTDWKSRWYADKQYAEYVKEDVAIRRLLSSGLERAGIADVEIERTRDRVRVDIHTARPGIVIGRRGTEADRIRADLEKLTGKQVQLNILEVKNPESQAQLVAQGVAEQLSNRVAFRRAMRKAIQSAMRQPNVKGIRVQCSGRLGGAEMSRSEFYREGRVPLHTLRADIDYGLYEAKTTFGRIGVKVWIYKGDIVGGKRELAAAAPAGADRPRRERPSGTRPRHSGASGTTATGTDAGRAAGGEEAAPDAAAPVEAQSTES

SEQ ID NO: 62397 - protein, 197 aa, Mycobacterium bovis
MTAATKATEYPSAVAKARFVRVSPRKARRVIDLVRGRSVSDALDILRWAPQAASGPVAKVIASAAANAQNNGGLDPATLVVATVYADQGPTAKRIRPRAQGRAFRIRRRTSHITVVVESRPAKDQRSAKSSRARRTEASKAASKVGATAPAKKAAAKAPAKKAPASSGVKKTPAKKAPAKKAPAKASETSAAKGGSD

SEQ ID NO: 62398 - protein, 93 aa, Mycobacterium bovis
MPRSLKKGPFVDEHLLKKVDVQNEKNTKQVIKTWSRRSTIIPDFIGHTFAVHDGRKHVPVFVTESMVGHKLGEFAPTRTFKGHIKDDRKSKRR

SEQ ID NO: 62399 - protein, 280 aa, Mycobacterium bovis
MAIRKYKPTTPGRRGASVSDFAEITRSTPEKSLVRPLHGRGGRNAHGRITTRHKGGGHKRAYRMIDFRRNDKDGVNAKVAHIEYDPNRTARIALLHYLDGEKRYIIAPNGLSQGDVVESGANADIKPGNNLPLRNIPAGTLIHAVELRPGGGAKLARSAGSSIQLLGKEASYASLRMPSGEIRRVDVRCRATVGEVGNAEQANINWGKAGRMRWKGKRPSVRGVVMNPVDHPHGGGEGKTSGGRHPVSPWGKPEGRTRNANKSSNKFIVRRRRTGKKHSR

SEQ ID NO: 62400 - protein, 100 aa, Mycobacterium bovis
MATLADPRDIILAPVISEKSYGLLDDNVYTFLVRPDSNKTQIKIAVEKIFAVKVASVNTANRQGKRKRTRTGYGKRKSTKRAIVTLAPGSRPIDLFGAPA

SEQ ID NO: 62401 - protein, 223 aa, Mycobacterium bovis
MAAQEQKTLKIDVKTPAGKVDGAIELPAELFDVPANIALMHQVVTAQRAAARQGTHSTKTRGEVSGGGRKPYRQKGTGRARQGSTRAPQFTGGGVVHGPKPRDYSQRTPKKMIAAALRGALSDRARNGRIHAITELVEGQNPSTKSARAFLASLTERKQVLVVIGRSDEAGAKSVRNLPGVHILAPDQLNTYDVLRADDVVFSVEALNAYIAANTTTSEEVSA

SEQ ID NO: 62402 - protein, 373 aa, Mycobacterium bovis
MTRSGDEAQLMTGVTGDLAGTELGLTPSLTKNAGVPTTDQPQKGKDFTSDQEVRWCPGCGDYVILNTIRNFLPELGLRRENIVFISGIGCSSRFPYYLETYGFHSIHGRAPAIATGLALAREDLSVWVVTGDGDALSIGGNHLIHALRRNINVTILLFNNRIYGLTKGQYSPTSEVGKVTKSTPMGSLDHPFNPVSLALGAEATFVGRALDSDRNGLTEVLRAAAQHRGAALVEILQDCPIFNDGSFDALRKEGAEERVIKVRHGEPIVFGANGEYCVVKSGFGLEVAKTADVAIDEIIVHDAQVDDPAYAFALSRLSDQNLDHTVLGIFRHISRPTYDDAARSQVVAARNAAPSGTAALQSLLHGRDTWTVD

SEQ ID NO: 62403 - protein, 418 aa, Mycobacterium bovis
MSGTVVAVPPRVARALDLLNFSLADVRDGLGPYLSIYLLLIHDWDQASIGFVMAVGGIAAIVAQTPIGALVDRTTAKRALVVAGAVLVTAAAVAMPLFAGLYSISVLQAVTGIASSVFAPALAAITLGAVGPQFFARRIGRNEAFNHAGNASAAGATGALAYFFGPVVVFWVLAGMALISVLATLRIPPDAVDHDLARGMDHAPGEPHPQPSRFTVLAHNRELVIFGAAVVAFHFANAAMLPLVGELLALHNRDEGTALMSSCIVAAQVVMVPVAYVVGTRADAWGRKPIFLVGFAVLTARGFLYTLSDNSYWLVGVQLLDGIGAGIFGALFPLVVQDVTHGTGHFNISLGAVTTATGIGAALSNLVAGWIVVVAGYDAAFMSLGALAGAGFLLYLVAMPETVDSDVRVRSRPTLGGK

SEQ ID NO: 62404 - protein, 426 aa, Mycobacterium bovis
MARIGDGGDLLKCSFCGKSQKQVKKLIAGPGVYICDECIDLCNEIIEEELADADDVKLDELPKPAEIREFLEGYVIGQDTAKRTLAVAVYNHYKRIQAGEKGRDSRCEPVELTKSNILMLGPTGCGKTYLAQTLAKMLNVPFAIADATALTEAGYVGEDVENILLKLIQAADYDVKRAETGIIYIDEVDKIARKSENPSITRDVSGEGVQQALLKILEGTQASVPPQGGRKHPHQEFIQIDTTNVLFIVAGAFAGLEKIIYERVGKRGLGFGAEVRSKAEIDTTDHFADVMPEDLIKFGLIPEFIGRLPVVASVTNLDKESLVKILSEPKNALVKQYIRLFEMDGVELEFTDDALEAIADQAIHRGTGARGLRAIMEEVLLPVMYDIPSRDDVAKVVVTKETVQDNVLPTIVPRKPSRSERRDKSA

SEQ ID NO: 62405 - protein, 491 aa, Mycobacterium bovis
MTAPLDRAPVTDLPANNKGRDRTHWLYLAVIFAVIAGVIVGLTAPSTGKSLTVLGTVFVNLIKMMIAPVIFCTIVLGIGSVRKAAAVGKVGGLALAYFLTMSSVALGIGLIVGNLLSPGRDLHLRPGAVGSGAALAGQAAESHGIAGFIQQIIPRSLPSALTEGNVLQVLLVALLVGFAVQGLGPAGESILRAVENLQKLVFKVLVMVLWLAPIGAFGAIANIVATTGFNAVTNLLLLMAGFYLTCVVFVFGVLGVLLRIVSGLSIFRLLRYLAREYLLIFATSSSEVVLPRLITKMKHLGVQSSTVGVVVPTGYSFNLDGTAIYLTMASLFIADAMGHRLTWGEQIALLAFMIIASKGAAGVSGAGLATLAGGLQAHRPELLDGVGLIVGIDRFMSEARSLTNFSGNAVATILVASWTKTIDLSKADEVLRGRDPFDESTMVDPHDEEPPAATPHGGGVPTNPALCDFEQVSLGGLVGRPAGPQRADVDG

SEQ ID NO: 62406 - protein, 915 aa, Mycobacterium bovis
MLDALTALDGRVRSAHSTVDRVDAVRVRDLLATHLETAGVLAASVHAPEASEEPESRLMLETQETRNADVERPHYMPLFVAPQPIPEPLADDEDVDDGPDYVADDSDADDEGQLDRPANRRRRRGRRGRGRGRGEQGGSDGDPVDQQSEPRAQQFTSADAAETDDGDDRDSEDTEAGDNGEDENGSLEAGNRRRRRRRRRKSASGDDNDAALEGPLPDDPPNTVVHERVPRAGDKAGNSQDGGSGSTEIKGIDGSTRLEAKRQRRRDGRDAGRRRPPVLSEAEFLARREAVERVMVVRDRVRTEPPLPGTRYTQIAVLEDGIVVEHFVTSAASASLVGNIYLGIVQNVLPSMEAAFVDIGRGRNGVLYAGEVNWDAAGLGGADRKIEQALKPGDYVVVQVSKDPVGHKGARLTTQVSLAGRFLVYVPGASSTGISRKLPDTERQRLKEILREVVPSDAGVIIRTASEGVKEDDIRADVARLRERWEQIEAKAQETKEKAAGAAVALYEEPDVLVKVIRDLFNEDFVGLIVSGDEAWNTINEYVNSVAPELVSKLTKYESADGPDGQSAPDVFTVHRIDEQLAKAMDRKVWLPSGGTLVIDRTEAMTVIDVNTGKFTGAGGNLEQTVTKNNLEAAEEIVRQLRLRDIGGIVVIDFIDMVLESNRDLVLRRLTESLARDRTRHQVSEVTSLGLVQLTRKRLGTGLIEAFSTSCPNCSGRGILLHADPVDSAAATGRKSEPGARRGKRSKKSRSEESSDRSMVAKVPVHAPGEHPMFKAMAAGLSSLAGRGDEESGEPAAELAEQAGDQPPTDLDDTAQADFEDTEDTDEDEDELDADEDLEDLDDEDLDEDLDVEDSDSDDEDSDEDAADADVDEEDAAGLDGSPGEVDVPGVTELAPTRPRRRVAGRPAGPPIRLD

SEQ ID NO: 62407 - protein, 876 aa, Mycobacterium bovis
MLPKSWDPAAMESAIYQKWLDAGYFTADPTSTKPAYSIVLPPPNVTGSLHMGHALEHTMMDALTRRKRMQGYEVLWQPGTDHAGIATQSVVEQQLAVDGKTKEDLGRELFVDKVWDWKRESGGAIGGQMRRLGDGVDWSRDRFTMDEGLSRAVRTIFKRLYDAGLIYRAERLVNWSPVLQTAISDLEVNYRDVEGELVSFRYGSLDDSQPHIVVATTRVETMLGDTAIAVHPDDERYRHLVGTSLAHPFVDRELAIVADEHVDPEFGTGAVKVTPAHDPNDFEIGVRHQLPMPSILDTKGRIVDTGTRFDGMDRFEARVAVRQALAAQGRVVEEKRPYLHSVGHSERSGEPIEPRLSLQWWVRVESLAKAAGDAVRNGDTVIHPASMEPRWFSWVDDMHDWCISRQLWWGHRIPIWYGPDGEQVCVGPDETPPQGWEQDPDVLDTWFSSALWPFSTLGWPDKTAELEKFYPTSVLVTGYDILFFWVARMMMFGTFVGDDAAITLDGRRGPQVPFTDVFLHGLIRDESGRKMSKSKGNVIDPLDWVEMFGADALRFTLARGASPGGDLAVSEDAVRASRNFGTKLFNATRYALLNGAAPAPLPSPNELTDADRWILGRLEEVRAEVDSAFDGYEFSRACESLYHFAWDEFCDWYLELAKTQLAQGLTHTTAVLAAGLDTLLRLLHPVIPFLTEALWLALTGRESLVSADWPEPSGISVDLVAAQRINDMQKLVTEVRRFRSDQGLADRQKVPARMHGVRDSDLSNQVAAVTSLAWLTEPGPDFEPSVSLEVRLGPEMNRTVVVELDTSGTIDVAAERRRLEKELAGAQKELASTAAKLANADFLAKAPDAVIAKIRDRQRVAQQETERITTRLAALQ

SEQ ID NO: 62408 - protein, 234 aa, Mycobacterium bovis
MSRAALDKDPRDVASMFDGVARKYDLTNTVLSLGQDRYWRRATRSALRIGPGQKVLDLAAGTAVSTVELTKSGAWCVAADFSVGMLAAGAARKVPKVAGDATRLPFGDDVFDAVTISFGLRNVANQQAALREMARVTRPGGRLLVCEFSTPTNALFATAYKEYLMRALPRVARAVSSNPEAYEYLAESIRAWPDQAVLAHQISRAGWSGVRWRNLTGGIVALHAGYKPGKQTPQ

SEQ ID NO: 62409 - protein, 211 aa, Mycobacterium bovis
MANPFVKAWKYLMALFSSKIDEHADPKVQIQQAIEEAQRTHQALTQQAAQVIGNQRQLEMRLNRQLADIEKLQVNVRQALTLADQATAAGDAAKATEYNNAAEAFAAQLVTAEQSVEDLKTLHDQALSAAAQAKKAVERNAMVLQQKIAERTQLLSQLEQAKMQEQVSASLRSMSELAAPGNTPSLDEVRDKIERRYANAIGSAEIAEISV

SEQ ID NO: 62410 - protein, 306 aa, Mycobacterium bovis
MHEHVFIMTTEIAQNYPEAWGDEDKRVAGAIARLGELKARGVDTIVDLTVIGLGRYIPRIARVAAATELNIVVATGLYTYNDVPFYFHYLGPGAQLDGPEIMTDMFVRDIEHGIADTGIKAGILKCATDEPGLTPGVERVLRAVAQAHKRTGAPISTHTHAGLRRGLDQQRIFAEEGVELSRVVIGHCGDSTDVGYLEELIAAGSYLGMDRFGVDVISPFQDRVNIVARMCERGHADKMVLSHDACCYFDALPEELVPVAMPNWHYLHIHNDVIPALKQHGVTDEQLHTMLVDNPRRIFERQGGYQ

SEQ ID NO: 62411 - protein, 259 aa, Mycobacterium bovis
MFLGWLALSWEDGLNALVAEGIEAIVFRTVGDQASLWESVLPEELRRLPEELARVDALLDDSAFFCPFVPFFDPRMGRPSIPMETYLRLMFLKFRYRLGYESLCREVTDSITWRRFCRIPLEGSVPHPTTLMKLTTRCGEDAVAGLNEALLAKAASEKLLRTNKVRADTTVVEGDVGYPTDTGLLAKAVGSMARTVARIKAADAGSAPLGGSSGPRDRLQAAVTRRAATRSGAGLRAPDHRGASRDRRAGADRGCRGGT

SEQ ID NO: 62412 - protein, 309 aa, Mycobacterium bovis
MREPLATMAGYHLGWWNADRSTAAGSSGKYFRAALVYAAAAACGGDVGDATPVSAAVELVHNFTLLHDDVMDGDATRRGRPTVWSVWGVGGAILLGDALHATAVRILTGLTDECVAVRAIRRLQMSCLDLCIGQFEDCLLEGQPEVTVDDYLRMAAGKTAALTGCCCALGALVANADDATIAALERFGHELGLAFQCVDDLIGIWGDPGVTGKPVGNDLARRKATLPVVAALNSRSEAATELAALYQAPAAMTASDVERATALVKVAGGGHVAQRCADERIQAAIAALPDAVRSPDLIALSQLICRREC

SEQ ID NO: 62413 - protein, 370 aa, Mycobacterium bovis
MVDLGAIEHNVRVLREHAGHAQLMAVVKADGYGHGATRVAQTALGAGAAELGVATVDEALALRADGITAPVLAWLHPPGIDFGPALLADVQVAVSSLRQLDELLHAVRRTGRTATVTVKVDTGLNRNGVGPAQFPAMLTALRQAMAEDAVRLRGLMSHMVYADKPDDSINDVQAQRFTAFLAQAREQGVRFEVAHLSNSSATMARPDLTFDLVRPGIAVYGLSPVPALGDMGLVPAMTVKCAVALVKSIRAGEGVSYGHTWIAPRDTNLALLPIGYADGVFRSLGGRLEVLINGRRCPGVGRICMDQFMVDLGPGPLDVAEGDEAILFGPGIRGEPTAQDWADLVGTIHYEVVTSPRGRITRTYREAENR

SEQ ID NO: 62414 - protein, 344 aa, Mycobacterium bovis
MTTVLGIETSCDETGVGIARLDPDGTVTLLADEVASSVDEHVRFGGVVPEIASRAHLEALGPAMRRALAAAGLKQPDIVAATIGPGLAGALLVGVAAAKAYSAAWGVPFYAVNHLGGHLAADVYEHGPLPECVALLVSGGHTHLLHVRSLGEPIIELGSTVDDAAGEAYDKVARLLGLGYPGGKALDDLARTGDRDAIVFPRGMSGPADDRYAFSFSGLKTAVARYVESHAADPGFRTADIAAGFQEAVADVLTMKAVRAATALGVSTLLIAGGVAANSRLRELATQRCGEAGRTLRIPSPRLCTDNGAMIAAFAAQLVAAGAPPSPLDVPSDPGLPVMQGQVR

SEQ ID NO: 62415 - protein, 195 aa, Mycobacterium bovis
MLVGKLLGWRAVRRDLGSMSVAETNPPFTPDRRPGHPGIHPREKKVSAVPTYAPKAGDTTRSWYVIDATDVVLGRLAVAAANLLRGKHKPTFAPNVDGGDFVIVINADKVAISGDKLQHKMVYRHSGYPGGLHKRTIGELMQRHPDRVVEKAILGMLPKNRLSRQIQRKLRVYAGPEHPHSAQQPVPYELKQVAQ

SEQ ID NO: 62416 - protein, 151 aa, Mycobacterium bovis
MTETTPAPQTPAAPAGPAQSFVLERPIQTVGRRKEAVVRVRLVPGTGKFDLNGRSLEDYFPNKVHQQLIKAPLVTVDRVESFDIFAHLGGGGPSGQAGALRLGIARALILVSPEDRPALKKAGFLTRDPRATERKKYGLKKARKAPQYSKR

SEQ ID NO: 62417 - protein, 448 aa, Mycobacterium bovis
MGRLFGTDGVRGVANRELTAELALALGAAAARRLSRSGAPGRRVAVLGRDPRASGEMLEAAVIAGLTSEGVDALRVGVLPTPAVAYLTGAYDADFGVMISASHNPMPDNGIKIFGPGGHKLDDDTEDQIEDLVLGVSRGPGLRPAGAGIGRVIDAEDATERYLRHVAKAATARLDDLAVVVDCAHGAASSAAPRAYRAAGARVIAINAEPNGRNINDGCGSTHLDPLRAAVLAHRADLGLAHDGDADRCLAVDANGDLVDGDAIMVVLALAMKEAGELACNTLVATVMSNLGLHLAMRSAGVTVRTTAVGDRYVLEELRAGDYSLGGEQSGHIVMPALGSTGDGIVTGLRLMTRMVQTGSSLSDLASAMRTLPQVLINVEVVDKATAAAAPSVRTAVEQAAAELGDTGRILLRPSGTEPMIRVMVEAADEGVAQRLAATVADAVSTAR

SEQ ID NO: 62418 - protein, 607 aa, Mycobacterium bovis
MDALRRMEYRGYDSSGIALVDGGTLTVRRRAGRLANLEEAVAEMPSTALSGTTGLGHTRWATHGRPTDRNAHPHRDAAGKIAVVHNGIIENFAVLRRELETAGVEFASDTDTEVAAHLVARAYRHGETADDFVGSVLAVLRRLEGHFTLVFANADDPGTLVAARRSTPLVLGIGDNEMFVGSDVAAFIEHTREAVELGQDQAVVITADGYRISDFDGNDGLQAGRDFRPFHIDWDLAAAEKGGYEYFMLKEIAEQPAAVADTLLGHFVGGRIVLDEQRLSDQELREIDKVFVVACGTAYHSGLLAKYAIEHWTRLPVEVELASEFRYRDPVLDRSTLVVAISQSGETADTLEAVRHAKEQKAKVLAICNTNGSQIPRECDAVLYTRAGPEIGVASTKTFLAQIAANYLLGLALAQARGTKYPDEVEREYHELEAMPDLVARVIAATGPVAELAHRFAQSSTVLFLGRHVGYPVALEGALKLKELAYMHAEGFAAGELKHGPIALIEDGLPVIVVMPSPKGSATLHAKLLSNIREIQTRGAVTIVIAEEGDETVRPYADHLIEIPAVSTLLQPLLSTIPLQVFAASVARARGYDVDKPRNLAKSVTVE

SEQ ID NO: 62419 - protein, 273 aa, Mycobacterium bovis
MNLRAAGPGWLFCPADRPERFAKAAAAADVVILDLEDGVAEAQKPAARNALRDTPLDPERTVVRINAGGTADQARDLEALAGTAYTTVMLPKAESAAQVIELAPRDVIALVETARGAVCAAEIAAADPTVGMMWGAEDLIATLGGSSSRRADGAYRDVARHVRSTILLAASAFGRLALDAVHLDILDVEGLQEEARDAAAVGFDVTVCIHPSQIPVVRKAYRPSHEKLAWARRVLAASRSERGAFAFEGQMVDSPVLTHAETMLRRAGEATSE

SEQ ID NO: 62420 - protein, 654 aa, Mycobacterium bovis
MFDTVLVANRGEIAVRVIRTLRRLGIRSVAVYSDPDVDARHVLEADAAVRLGPAPARESYLDIGKVLDAAARTGAQAIHPGYGFLAENADFAAACERARVVFLGPPARAIEVMGDKIAAKNAVAAFDVPVVPGVARAGLTDDALVTAAAEVGYPVLIKPSAGGGGKGMRLVQDPARLPEALVSARREAMSSFGDDTLFLERFVLRPRHIEVQVLADAHGNVVHLGERECSLQRRHQKVIEEAPSPLLDPQTRERIGVAACNTARCVDYVGAGTVEFIVSAQRPDEFFFMEMNTRLQVEHPVTEAITGLDLVEWQLRVGAGEKLGFAQNDIELRGHAIEARVYAEDPAREFLPTGGRVLAVFEPAGPGVRVDSSLLGGTVVGSDYDPLLTKVIAHGADREEALDRLDQALARTAVLGVQTNVEFLRFLLADERVRVGDLDTAVLDERSADFTARPAPDDVLAAGGLYRQWALARRAQGDLWAAPSGWRGGGHMAPVRTAMRTPLRSETVSVWGPPESAQVQVGDGEIDCASVQVTREQMSVTISGLRRDYRWAEADRHLWIADERGTWHLREAEEHKIHRAVGARPAEVVSPMPGSVIAVQVESGSQISAGDVVVVVEAMKMEHSLEAPVSGRVQVLVSVGDQVKVEQVLARIKD

SEQ ID NO: 62421 - protein, 529 aa, Mycobacterium bovis
MTTPSIAIAPSFADEHRRLVAELNNKLAAAALGGNERARKRHVSRGKLLPRERVDRLLDPGSPFLELAPLAAGGMYSDESPGAGIITGIGRVSGRQCVIVANDATVKGGTYYPMTVKKHLRAQEVALQNMLPCIYLVDSGGAFLPRQDEVFPDREHFGRIFYNQATMSAKGIPQVAAVLGSCTAGGAYVPAMSDEAVIVREQGTIFLGGPPLVKAATGEIVSAEELGGGDLHSRTSGVTDHLADDDEDALRIVRAIADTFGPCEPAQWDVRRSVEPKYPQAELYDVVPPDPRVPYDVHEVVVRIVDGSEFSEFKAKYGKTLVTAFARVHGHPVGIVANNGVLLSESALKGAHFIELCDKRKIPLLFLQNIAGFMVGRDYEAGGIAKHGAKMVTAVACARVPKLTVVIGGSYGAGNYSMCGRAYSPRFLWMWPNARISVMGGEQAASVLATVRGEQLSAAGTPWSPDEEEAFKAPIRAQYEDQGNPYYSTARLWDDGIIDPADTRTVVGLALSLCAHAPLDQVGYGVFRM

SEQ ID NO: 62422 - protein, 547 aa, Mycobacterium bovis
MAAAEVVDPNRLSYDRGPSAPSLLESTIGANLAATAARYGHREALVDMVARRRFNYSELLTDVHRLATGLVRAGIGPGDRVGIWAPNRWEWVLVQYATAEIGAILVTINPAYRVREVEYALRQSGVAMVIAVASFKDADYAAMLAEVGPRCPDLADVILLESDRWDALAGAEPDLPALQQTAARLDGSDPVNIQYTSGTTAYPKGVTLSHRNILNNGYLVGELLGYTAQDRICIPVPFYHCFGMVMGNLAATSHGAAMVIPAPGFDPAATLRAVQDERCTSLYGVPTMFIAELGLPDFTDYELGSLRTGIMAGAACPVEVMRKVISRMHMPGVSICYGMTETSPVSTQTRADDSVDRRVGTVGRVGPHLEIKVVDPATGETVPRGVVGEFCTRGYSVMAGYWNDPQKTAEVIDADGWMHTGDLAEMDPSGYVRIAGRIKDLVVRGGENISPREIEELLHTHPDIVDGHVIGVPDAKYGEELMAVVKLRNDAPELTIERLREYCMGRIARFKIPRYLWIVDEFPMTVTGKVRKVEMRQQALEYLRGQQ

SEQ ID NO: 62423 - protein, 319 aa, Mycobacterium bovis
MSYVIATPEMMATAAFDLARIGSQVSAASAVAAMPTTEVVAAGADEVSAGIAALFSAHAQEYQALSAQAAAFHDQFVHTLTAAARWYTATEIANAAAMRVVLGAVNAPTQTLLGRPLIGDGAHGTAPGQPGGAGGLLFGNGGNGAAGAVGQVGGAGGAAGLFGIGGAGGAGGAGAPGGTGGTGGWLAGGGGVGGMGGAGGGAGGAGGNAGLFGNGGAGGAGGAGGGAGGAGGNAGWFGHGGAGGVGGVGAAGANGATPGQDGAAGVAGSDDGAGGDGLAGSDGGDGGAGGVGGNGGRGGWLLGNGGAGGVGGVGGAGGA

SEQ ID NO: 62424 - protein, 348 aa, Mycobacterium bovis
MTQIADRPARPDETLAVAVSDITQSLTMVQAINRALYDAMAADERVLVFGEDVAVEGGVFRVTEGLADTFGADRCFDTPLAESAIIGIAVGLALRGFVPVPEIQFDGFSYPAFDQVVSHLAKYRTRTRGEVDMPVTVRIPSFGGIGAAEHHSDSTESYWVHTAGLKVVVPSTPGDAYWLLRHAIACPDPVMYLEPKRRYHSRGMVDTSRPEPPIGHAMVRRSGTDVTVVTYGNLVSTALSSADTAEQQHDWSLEVIDLRSLAPLDFDTIAASIQRTGRCVVMHEGPRSLGYGAGLAARIQEEMFYQLEAPVLRACGFDTPYPPARLEKLWLPGPDRLLDCVERVLRQP

SEQ ID NO: 62425 - protein, 357 aa, Mycobacterium bovis
MLMSVDLEPVQLVGPDGTPTAERRYHRDLPEETLRWLYEMMVVTRELDTEFVNLQRQGELALYTPCRGQEAAQVGAAACLRKTDWLFPQYRELGVYLVRGIPPGHVGVAWRGTWHGGLQFTTKCCAPMSVPIGTQTLHAVGAAMAAQRLDEDSVTVAFLGDGATSEGDVHEALNFAAVFTTPCVFYVQNNQWAISMPVSRQTAAPSIAHKAIGYGMPGIRVDGNDVLACYAVMAEAAARARAGDGPTLIEAVTYRLGPHTTADDPTRYRSQEEVDRWATLDPIPRYRTYLQDQGLWSQRLEEQVTARAKHVRSELRDAVFDAPDFDVDEVFTTVYAEITPGLQAQREQLRAELARTD

SEQ ID NO: 62426 - protein, 415 aa, Mycobacterium bovis
SPQVFGDQTDVPESGDWWDVVWQCASVLLTYPNSRQLGTAEELLAHIDGPAADLLGRTVSELRRADPLTAATRYVDTFDLRGRATLYLTYWTAGDTRNRGREMLAFAQTYRSTDVAPPRGETPDFLPVVLEFAATVDPEAGRRLLSGYRVPIAALCNALTEAALPYAHTVAAVCRTGDMMGELFWTVVPYVTMTIVAVGSWWRYRYDKFGWTTRSSQLYESRLLRIASPMFHFGILVVIVGHGIGLVIPQSWTQAAGLSEGAYHVQAVVLGSIAGITTLAGVTLLIYRRRTRGPVFMATTVNDKVMYLVLVAAIVAGLGATALGSGVVGEAYNYRETVSVWFRSVWVLQPRGDLMAEAPLYYQIHVLIGLALFALWPFTRLVHAFSAPIGYLFRPYIIYRSREELVLTRPRRRGW

SEQ ID NO: 62427 - protein, 941 aa, Mycobacterium bovis
MSDHSTFADRHIGLDSQAVATMLAVIGVDSLDDLAVKAVPAGILDTLTDTGAAPGLDSLPPAASEAEALAELRALADANTVAVSMIGQGYYDTHTPPVLLRNIIENPAWYTAYTPYQPEISQGRLEALLNFQTLVTDLTGLEIANASMLDEGTAAAEAMTLMHRAARGPVKRVVVDADVFTQTAAVLATRAKPLGIEIVTADLRAGLPDGEFFGAIAQLPGASGRITDWSALVQQAHDRGALVAVGADLLALTLIAPPGEIGADVAFGTTQRFGVPMGFGGPHAGYLAVHAKHARQLPGRLVGVSVDSDGTPAYRLALQTREQHIRRDKATSNICTAQVLLAVLAAMYASYHGAGGLTAIARRVHAHAEAIAGALGDALVHDKYFDTVLARVPGRADEVLARAKANGINLWRVDADHVSVACDEATTDTHVAVVLDAFGVAAAAPAHADIATRTSEFLTHPAFTQYRTETSMMRYLRALADKDIALDRSMIPLGSCTMKLNAAAEMESITWPEFGRQHPFAPASDTAGLRQLVADLQSWLVLITGYDAVSLQPNAGSQGEYAGLLAIHEYHASRGEPHRDICLIPSSAHGTNAASAALAGMRVVVVDCHDNGDVDLDDLRAKVGEHAERLSALMITYPSTHGVYEHDIAEICAAVHDAGGQVYVDGANLNALVGLARPGKFGGDVSHLNLHKTFCIPHGGGGPGVGPVAVRAHLAPFLPGHPFAPELPKGYPVSSAPYGSASILPITWAYIRMMGAEGLRAASLTAITSANYIARRLDEYYPVLYTGENGMVAHECILDLRGITKLTGITVDDVAKRLADYGFHAPTMSFPVAGTLMVEPTESESLAEVDAFCEAMIGIRAEIDKVGAGEWPVDDNPLRGAPHTAQCLLASDWDHPYTREQAAYPLGTAFRPKVWPAVRRIDGAYGDRNLVCSCPPVEAFA

SEQ ID NO: 62428 - protein, 344 aa, Mycobacterium bovis
MVLGFWDIAVPIVGAPMAGGPSTPALAAAVSNAGGLGFVAGGYLSADRLADDIAAARAATTGPIGANLFVPQPSVADWAQLEYYADELEEVAEYYHTEVGQPVYGDDDDWVRKLEVVADVRPEVVSFTFGAPPPDVVQRLSALGLLVSITVTSVYEAGVAIAAGADSLVVQGPAAGGHRGTFAPDMEPGTESLHQLLDRIGSAHDVPLVAAGGLGTAEDVAAVLRRGAIAAQVGTALLLADEAGTNAAHRAALKNPEFDATLVTRAFSGRYARGLANNFTRLLDHVAPLGYPEVHQMTKPIRAAAVQADDPHGTNLWAGSAHRKTRPGPAADIIASLTPDVCSA

SEQ ID NO: 62429 - protein, 438 aa, Mycobacterium bovis
MPRRSPADPAAALAPRRTTLPGGLRVVTEFLPAVHSASVGVWVGVGSRDEGATVAGAAHFLEHLLFKSTPTRSAVDIAQAMDAVGGELNAFTAKEHTCYYAHVLGSDLPLAVDLVADVVLNGRCAADDVEVERDVVLEEIAMRDDDPEDALADMFLAALFGDHPVGRPVIGSAQSVSVMTRAQLQSFHLRRYTPERMVVAAAGNVDHDGLVALVREHFGSRLVRGRRPVAPRKGTGRVNGSPRLTLVSRDAEQTHVSLGIRTPGRGWEHRWALSVLHTALGGGLSSRLFQEVRETRGLAYSVYSALDLFADSGALSVYAACLPERFADVMRVTADVLESVARDGITEAECGIAKGSLRGGLVLGLEDSSSRMSRLGRSELNYGKHRSIEHTLRQIEQVTVEEVNAVARHLLSRRYGAAVLGPHGSKRSLPQQLRAMVG

SEQ ID NO: 62430 - protein, 459 aa, Mycobacterium bovis
MAKFEIPEGWMVQAFRFTLDPTAEQARALARHFGARRKAYNWTVATLKADIDAWQATGIQTAKPSLRVLRKRWNTVKNDVCVNIETGVVWWPECSKEAYADGIDGAVDAYWNWQNSRSGKRDGKRMGFPRFKKKGRDPDRVTFTTGAMRVEPDRRHLTLPVIGTVRTHENTRRVERLIAKGRSRVLAITVRRNGTRIDASVRVLVQRPQQPKVTDPGSRVGVDVGVRRLATVATADGAVLERVPNPRPLDAALNELRHVCRARSRCTKGSRRYRERTTEISRLHRRVNDVRTHHLHCLTTHLAKTHGRIVVEGLDAAGMLRQQGLSGARARRRGLSDAALGTPRRHLSYKTGWYGSQLVVADRWFPSSKTCHVCGHVQEIGWAEHWQCDSCSASHQRDDCAAINLARYEDTSSVVGPVGAAVKRGADRKTRPGRAGGREARKGSSRKAAEQPRDGVQVA

SEQ ID NO: 62431 - protein, 752 aa, Mycobacterium bovis
MSAAEIDEGVFETTATIDNGSFGTRTIRFETGRLALQAAGAVVAYLDDDNMLLSATTASKNPKEHFDFFPLTVDVEERMYAAGRIPGSFFRREGRPSTDAILTCRLIDRPLRPSFVDGLRNEIQIVVTILSLDPGDLYDVLAINAASASTQLGGLPFSGPIGGVRVALIDGTWVGFPTVDQIERAVFDMVVAGRIVEGDVAIMMVEAEATENVVELVEGGAQAPTESVVAAGLEAAKPFIAALCTAQQELADAAGKSGKPTVDFPVFPDYGEDVYYSVSSVATDELAAALTIGGKAERDQRIDEIKTQVVQRLADTYEGREKEVGAALRALTKKLVRQRILTDHFRIDGRGITDIRALSAEVAVVPRAHGSALFERGETQILGVTTLDMIKMAQQIDSLGPETSKRYMHHYNFPPFSTGETGRVGSPKRREIGHGALAERALVPVLPSVEEFPYAIRQVSEALGSNGSTSMGSVCASTLALLNAGVPLKAPVAGIAMGLVSDDIQVEGAVDGVVERRFVTLTDILGAEDAFGDMDFKVAGTKDFVTALQLDTKLDGIPSQVLAGALEQAKDARLTILEVMAEAIDRPDEMSPYAPRVTTIKVPVDKIGEVIGPKGKVINAITEETGAQISIEDDGTVFVGATDGPSAQAAIDKINAIANPQLPTVGERFLGTVVKTTDFGAFVSLLPGRDGLVHISKLGKGKRIAKVEDVVNVGDKLRVEIADIDKRGKISLILVADEDSTAAATDAATVTS

SEQ ID NO: 62432 - protein, 298 aa, Mycobacterium bovis
MSATGPGIVVIDKPAGMTSHDVVGRCRRIFATRRVGHAGTLDPMATGVLVIGIERATKILGLLTAAPKSYAATIRLGQTTSTEDAEGQVLQSVPAKHLTIEAIDAAMERLRGEIRQVPSSVSAIKVGGRRAYRLARQGRSVQLEARPIRIDRFELLAARRRDQLIDIDVEIDCSSGTYIRALARDLGDALGVGGHVTALRRTRVGRFELDQARSLDDLAERPALSLSLDEACLLMFARRDLTAAEASAAANGRSLPAVGIDGVYAACDADGRVIALLRDEGSRTRSVAVLRPATMHPG

SEQ ID NO: 62433 - protein, 89 aa, Mycobacterium bovis
MALTAEQKKEILRSYGLHETDTGSPEAQIALLTKRIADLTEHLKVHKHDHHSRRGLLLLVGRRRRLIKYISQIDVERYRSLIERLGLRR

SEQ ID NO: 62434 - protein, 307 aa, Mycobacterium bovis
MLTIGVFDGVHRGHAELIAHAVKAGRARGVPAVLMTFDPHPMEVVYPGSHPAQLTTLTRRAELVQDLGIEVFLVMPFTTDFMKLTPDRFIHELLVEHLHVVEVVVGENFTFGKKAAGNVDTLRRAGERFGFAVESMSLVSEHHSNETVTFSSTYIRSCVDAGDMVAAMEALGRPHRVEGVVVRGEGRGAELGFPTANVAPPMYSAIPADGVYAAWFTVLGHGPVTGTVVPGERYQAAVSVGTNPTFSGRTRTVEAFVLDTTADLYGQHVALDFVGRIRGQKKFESVRQLVAAMGADTERARDLLSTG

SEQ ID NO: 62435 - protein, 245 aa, Mycobacterium bovis
MRVGVLGAKGKVGATMVRAVAAADDLTLSAELDAGDPLSLLTDGNTEVVIDFTHPDVVMGNLEFLIDNGIHAVVGTTGFTAERFQQVESWLVAKPNTSVLIAPNFAIGAVLSMHFAKQAARFFDSAEVIELHHPHKAEAPSGTAARTAKLIAEARKGLPPNPDATSTSLPGARGADVDGIPVHAVRLAGLVAHQEVLFGTEGEILTIRHDSLDRTSFVPGVLLAVRRIAERPGLTVGLEPLLDLH

SEQ ID NO: 62436 - protein, 919 aa, Mycobacterium bovis
VKGAREHNLRSVDLDLPRDALIVFTGLSGSGKSSLAFDTIFAEGQRRYVESLSAYARQFLGQMDKPDVDFIEGLSPAVSIDQKSTNRNPRSTVGTITEVYDYLRLLYARAGTPHCPTCGERVARQTPQQIVDQVLAMPEGTRFLVLAPVVRTRKGEFADLFDKLNAQGYSRVRVDGVVHPLTDPPKLKKQEKHDIEVVVDRLTVKAAAKRRLTDSVETALNLADGIVVLEFVDHELGAPHREQRFSEKLACPNGHALAVDDLEPRSFSFNSPYGACPECSGLGIRKEVDPELVVPDPDRTLAQGAVAPWSNGHTAEYFTRMMAGLGEALGFDVDTPWRKLPAKARKAILEGADEQVHVRYRNRYGRTRSYYADFEGVLAFLQRKMSQTESEQMKERYEGFMRDVPCPVCAGTRLKPEILAVTLAGESKGEHGAKSIAEVCELSIADCADFLNALTLGPREQAIAGQVLKEIRSRLGFLLDVGLEYLSLSRAAATLSGGEAQRIRLATQIGSGLVGVLYVSTSRPSGCTSATTVVLSKPSPRLRDLGNTLIVVEHDEDTIEHADWIVDIGPGAGEHGGRIVHSGPYDELLRNKDSITGAYLSGRESIEIPAIRRSVDPRRQLTVVGAREHNLRGIDVSFPLGVLTSVTGVSGSGKSTLVNDILAAVLANRLNGARQVPGRHTRVTGLDYLDKLVRVDQSPIGRTPRSNPATYTGVFDKIRTLFAATTEAKVRGYQPGRFSFNVKGGRCEACTGDGTIKIEMNFLPDVYVPCEVCQGARYNRETLEVHYKGKTVSEVLDMSIEEAAEFFEPIAGVHRYLRTLVDVGLGYVRLGQPAPTLSGGEAQRVKLASELQKRSTGRTVYILDEPTTGLHFDDIRKLLNVINGLVDKGNTVIVIEHNLDVIKTSDWIIDLGPEGGAGG

SEQ ID NO: 62437 - protein, 655 aa, Mycobacterium bovis
  MISC_FEATURE (220)..(220): X=any amino acid
  MISC_FEATURE (644)..(644): X=any amino acid
MRLPYSWLREVVAVGASGWDVTPGELEQTLLRIGHEVEEVIPLGPVDGPVTVGRVADIEELTGYKKPIRACAVDIGDRQYREIICGATNFAVGDLVVVALPGATLPGGFTISARKAYGRNSDGMICSAAELNLGADHSGILVLPPGAAEPGADGAGVLGLDDVVFHLAITPDRGYCMSVRGLARELACAYDLDFVDPASNSRVPPLPIEGPVWPLTVQPXTGVRRFALRPVIGIDPAAVSPWWLQRRLLLCGIRRTCPAVDVTNYVMLELGHPMHAHDRNRISGTLGVRFARSGETAVTLDGIERKLDTADVLIVDDAATAAIGGVMGAASTEVRADSTDVLLEAAIWDPAAVSRTQRRLHLPSEAARRYERTVDPAISVAALDRCARLLADIAGGEVSPTLTDWRGDPPCDDWSPPPIRMGVDVPDRIAGVAYPQGTTARRLAQIGAVVTHDGDTLTVTPPSWRPDLRQPADLVEEVLRLEGLEVIPSVLPPAPAGRGLTAGQQRRRTIGRSLALSGYVEILPTPFLPAGVFDLWGLEADDSRRMTTRVLNPLEADRPQLATTLLPALLEALVRNVSRGLVDVALFAIAQVVQPTEQTRGVRLIPVDRRPTDDEIAMLDASLTRQPQHVAAVLAGLREPRRPXGPGPPVDAADA

SEQ ID NO: 62438 - protein, 64 aa, Mycobacterium bovis
MPKAKTHSGASKRFRRTGTGKIVRQKANRRHLLEHKPSTRTRRLDGRTVVAANDTKRVTSLLNG

SEQ ID NO: 62439 - protein, 129 aa, Mycobacterium bovis
MARVKRAVNAHKKRRSILKASRGYRGQRSRLYRKAKEQQLHSLNYAYRDRRARKGEFRKLWIARINAAARLNDITYNRLIQGLKAAGVEVDRKNLADIAISDPAAFTALVDVARAALPEDVNAPSGEAA

SEQ ID NO: 62440 - protein, 904 aa, Mycobacterium bovis
MVTTASAPSEDRAKPTLMLLDGNSLAFRAFYALPAENFKTRGGLTTNAVYGFTAMLINLLRDEAPTHIAAAFDVSRQTFRLQRYPEYKANRSSTPDEFAGQIDITKEVLGALGITVLSEPGFEADDLIATLATQAENEGYRVLVVTGDRDALQLVSDDVTVLYPRKGVSELTRFTPEAVVEKYGLTPRQYPDFAALRGDPSDNLPGIPGVGEKTAAKWIAEYGSLRSLVDNVDAVRGKVGDALRANLASVVRNRELTDLVRDVPLAQTPDTLRLQPWDRDHIHRLFDDLEFRVLRDRLFDTLAAAGGPEVDEGFDVRGGALAPGTVRQWLAEHAGDGRRAGLTVVGTHLPHGGDATAMAVAAADGEGAYLDTATLTPDDDAALAAWLADPAKPKALHEAKAAVHDLAGRGWTLEGVTSDTALAAYLVRPGQRSFTLDDLSLRYLRRELRAETPQQQQLSLLDDDDTDAETIQTTILRARAVIDLADALDAELARIDSTALLGEMELPVQRVLAKMESAGIAVDLPMLTELQSQFGDQIRDAAEAAYGVIGKQINLGSPKQLQVVLFDELGMPKTKRTKTGYTTDADALQSLFDKTGHPFLQHLLAHRDVTRLKVTVDGLLQAVAADGRIHTTFNQTIAATGRLSSTEPNLQNIPIRTDAGRRIRDAFVVGDGYAELMTADYSQIEMRIMAHLSGDEGLIEAFNTGEDLHSFVASRAFGVPIDEVTGELRRRVKAMSYGLAYGLSAYGLSQQLKISTEEANEQMDAYFARFGGVRDYLRAVVERARKDGYTSTVLGRRRYLPELDSSNRQVREAAERAALNAPIQGSAADIIKVAMIQVDKALNEAQLASRMLLQVHDELLFEIAPGERERVEALVRDKMGGAYPLDVPLEVSVGYGRSWDAAAH

SEQ ID NO: 62441 - protein, 535 aa, Mycobacterium bovis
MPSVHLGREFGDFSALSSRSAQSGPSLSSVYPSSSLVRYQSVPTTQPCPEQPNNMPSPTVTSPQVAVNDIGSSEDFLAAIDKTIKYFNDGDIVEGTIVKVDRDEVLLDIGYKTEGVIPARELSIKHDVDPNEVVSVGDEVEALVLTKEDKEGRLILSKKRAQYERAWGTIEALKEKDEAVKGTVIEVVKGGLILDIGLRGFLPASLVEMRRVRDLQPYIGKEIEAKIIELDKNRNNVVLSRRAWLEQTQSEVRSEFLNNLQKGTIRKGVVSSIVNFGAFVDLGGVDGLVHVSELSWKHIDHPSEVVQVGDEVTVEVLDVDMDRERVSLSLKATQEDPWRHFARTHAIGQIVPGKVTKLVPFGAFVRVEEGIEGLVHISELAERHVEVPDQVVAVGDDAMVKVIDIDLERRRISLSLKQANEDYTEEFDPAKYGMADSYDEQGNYIFPEGFDAETNEWLEGFEKQRAEWEARYAEAERRHKMHTAQMEKFAAAETAGRGADDQSSASSAPSEKTAGGSLASDAQLAALREKLAGSA

SEQ ID NO: 62442 - protein, 629 aa, Mycobacterium bovis
MLSLSGCGGFHAGAPSTAGPCEIVPNGTPAPKTPPATVPSSRNLATNPEIATGYRRDMTVVRTAHYAAATANPLATQVACRVLRDGGTAADAVVAAQAVLGLVEPQSSGIGGGGYLVYFDARTGSVQAYDGREVAPAAATENYLRWVSDVDRSAPRPNARASGRSIGVPGILRMLEMVHNEHGRTPWRDLFGPAVTLADGGFDISARMGAAISDAAPQLRDDPEARKYFLNPDGSPKPAGTRLTNPAYSKTLSAIASAGANAFYSGDIAHDIVAAASDTSNGRTPGLLTIEDLAGYLAKRRQPLCTTYRGREICGMPSSGGVAVAATLGILEHFPMSDYAPSKVDLNGGRPTVMGVHLIAEAERLAYADRDQYIADVDFVQLPGGSLTTLVDPGYLAARAALISPQHSMGSARPGDFGAPTAVAPPVPEHGTSHLSVVDSYGNAATLTTTVESSFGSYHLVDGFILNNQLSDFSAEPHATDGSPVANRVEPGKRPRSSMAPTLVFDHSSAGRGALYAVLGSPGGSMIIQFVVKTLVAMLDWGLNPQQAVSLVDFGAANSPHTNLGGENPEINTSDDGDHDPLVQGLRALGHRVNLAEQSSGLSAITRSEAGWAGGADPRREGAVMGDDA

SEQ ID NO: 62443 - protein, 556 aa, Mycobacterium bovis
PKAADGRRPSPDGGLGGFVPFPADRAASYRAAGYWSGRTLDTVLSDAARRWPDRLAVADAGDRPGHGGLSYAELDQRADRAAAALHGLGITPGDRVLLQLPNGCQFAVALFALLRAGAIPVMCLARSPRRRIGPLRRRQRGHRAGGRRCGQRVRLSADGARTCCRSPHPAPCHRRWRSGTVRVVGAAVRPRPAPVRRHRRPIPGSPALLLVSGGTTGMPKLIPRTHDDYVFNATASAALCRLSADDVYLVVLAAGHNFPLACPGLLGAMTVGATAVFAPDPSPEAAFAAIERHGVTVTALVPALAKLWAQSCEWEPVTPKSLRLLQVGGSKLEPEDARRVRTALTPGLQQVFGMAEGLLNFTRIGTHPKWWSTPRGGHLCPADELRIVNADGEPVGPGEEGELLVRGPYTLNGYFAAERDNERCFDPDGFYRSGDLVRRRDDGNLVVTGRVKDVICRAGETIAASDLEEQLLSHPAIFSAAAVGLPDQYLGEKICAAVVFAGAPITLAELNGYLDRRGVAAHTRPDQLVAMPALPTTPIGKIDKRAIVRQLGIATG

SEQ ID NO: 62444 - protein, 509 aa, Mycobacterium bovis
MTVAAGAAKAAGAELLDYDEVVARFQPVLGLEVHVELSTATKMFCGCTTTFGGEPNTQVCPVCLGLPGSLPVLNRAAVESAIRIGLALNCEIVPWCRFARKNYFYPDMPKNYQISQYDEPIAINGYLDAPLEDGTTWRVEIERAHMEEDTGKLTHIGSETGRIHGATGSLIDYNRAGVPLIEIVTKPIVGAGARAPQIARSYVTALRDLLRALDVSDVRMDQGSMRCDANVSLKPAGTTEFGTRTETKNVNSLKSVEVAVRYEMQRQGAILASGGRITQETRHFHEAGYTSAGRTKETAEDYRYFPEPDLEPVAPSRELVERLRQTIPELPWLSRRRIQQEWGVSDEVMRDLVNAGAVELVAATVEHGASSEAARAWWGNFLAQKANEAGIGLDELAITPAQVAAVVALVDEGKLSNSLARQVVEGVLAGEGEPEQVMTARGLALVRDDSLTQAAVDEALAANPDVADKIRGGKVAAAGAIVGAVMKATRGQADAARVRELVLEACGQG

SEQ ID NO: 62445 - protein, 333 aa, Mycobacterium bovis
MFYDDDADLSIIQGRKVGVIGYGSQGHAHSLSLRDSGVQVRVGLKQGSRSRPKVEEQGLDVDTPAEVAKWADVVMVLAPDTAQAEIFAGDIEPNLKPGDALFFGHGLNVHFGLIKPPADVAVAMVAPKGPGHLVRRQFVDGKGVPCLVAVEQDPRGDGLALALSYAKAIGGTRAGVIKTTFKDETETDLFGEQTVLCGGTEELVKAGFEVMVEAGYPAELAYFEVLHELKLIVDLMYEGGLARMYYSVSDTAEFGGYLSGPRVIDAGTKERMRDILREIQDGSFVHKLVADVEGGNKQLEELRRQNAEHPIEVVGKKLRDLMSWVDRPITETA

SEQ ID NO: 62446 - protein, 168 aa, Mycobacterium bovis
MSPKTHTLSVLVEDKPGVLARVAALFSRRGFNIESLAVGATECKDRSRMTIVVSAEDTPLEQITKQLNKLINVIKIVEQDDEHSVSRELALIKVQADAGSRSQVIEAVNLFRANVIDVSPESLTVEATGNRGKLEALLRVLEPFGIREIAQSGMVSLSRGPRGIGTAK

SEQ ID NO: 62447 - protein, 120 aa, Mycobacterium bovis
MYPRRFGSRRRPSGHPLGFAVVSQISRDEVAHLARLARLALTETELDSFAGQLDAILTHVSQIQAVDVTGVQATDNPLKDVNVTRPDETVPCLTQRQVLDQAPDAVDGRFAVPQILGDEQ

SEQ ID NO: 62448 - protein, 618 aa, Mycobacterium bovis
MSAPTKPHSPTFKPEPHSAANEPKHPAARPKHVALQQLTGAQAVIRSLEELGVDVIFGIPGGAVLPVYDPLFDSKKLRHVLVRHEQGAGHAASGYAHVTGRVGVCMATSGPGATNLVTPLADAQMDSIPVVAITGQVGRGLIGTDAFQEADISGITMPITKHNFLVRSGDDIPRVLAEAFHIAASGRPGAVLVDIPKDVLQGQCTFSWPPRMELPGYKPNTKPHSRQVREAAKLIAAARKPVLYVGGGVIRGEATEQLRELAELTGIPVVTTLMARGAFPDSHRQNLGMPGMHGTVAAVAALQRSDLLIALGTRFDDRVTGKLDSFAPEAKVIHADIDPAEIGKNRHADVPIVGDVKAVITELIAMLRHHHIPGTIEMADWWAYLNGVRKTYPLSYGPQSDGSLSPEYVIEKLGEIAGPDAVFVAGVGQHQMWAAQFIRYEKPRSWLNSGGLGTMGFAIPAAMGAKIALPGTEVWAIDGDGCFQMTNQELATCAVEGIPVKVALINNGNLGMVRQWQSLFYAERYSQTDLATHSHRIPDFVKLAEALGCVGLRCEREEDVVDVINQARAINDCPVVIDFIVGADAQVWPMVAAGTSNDEIQAARGIRPLFDDITEGHA

SEQ ID NO: 62449 - protein, 477 aa, Mycobacterium bovis
VRVRFCPSPTGTPHVGLVRTALFNWAYARHTGGTFVFRIEDTDAQRDSEESYLALLDALRWLGLDWDEGPEVGGPYGPYRQSQRAEIYRDVLARLLAAGEAYHAFSTPEEVEARHVAAGRNPKLGYDNFDRHLTDAQRAAYLAEGRQPVVRLRMPDDDLAWNDLVRGPVTFAAGSVPDFALTRASGDPLYTLVNPCDDALMKITHVLRGEDLLPSTPRQLALHQALIRIGVAERIPKFAHLPTVLGEGTKKLSKRDPQSNLFAHRDRGFIPEGLLNYLALLGWSIADDHDLFGLDEMVAAFDVADVNSSPARFDQKKADALNAEHIRMLDVGDFTVRLRDHLDTHGHHIALDEAAFAAAAELVQTRIVVLGDAWELLKFFNDDQYVIDPKAAAKELGPDGAAVLDAALAALTSVTDWTAPLIEAALKDALIEGLALKPRKAFSPIRVAATGTTVSPPLFESLELLGRDRSMQRLRAA

SEQ ID NO: 62450 - protein, 265 aa, Mycobacterium bovis
MRIGRIASPDGVAFASIDGELGEPSEMTAREIAEHPFGTPTFTGRSWPLADVRLLAPILASKVVCVGKNYADHIAEMGGRPPADPVIFLKPNTAIIGPNTPIRLPANASPVHFEGELAIVIGRACKDVPAAQAVDNILGYTIGNDVSARDQQQSDGQWTRAKGHDTFCPVGPWIVTDLAPFDPADLELRTVVNGDVKQHARTSLMIHDIGAIVEWISAIMTLLPGDLILTGTPAGVGPIEDGDTVSITIEGIGTLTNPVVRKGKP

SEQ ID NO: 62451 - protein, 290 aa, Mycobacterium bovis
MSDRKPVRGRHQARKRAVDLLFEAEVRGISAAEVVDTRAALAEAKPDIARLHPYTAAVARGVSEHAAHIDDLITAHLRGWTLDRLPAVDRAILRVSVWELLHAADVPEPVVVDEAVQLAKELSTDDSPGFVNGVLGQVMLVTPAAACGRSSGAWGGVMTRLELRVVVAAVLAATVVLGAVVCAAYGLTIVASAMSIYALGVGAWLYHAIERLILARRISTVRTAAKPLQPLLPVMAAIMGLTQAVVRSLGDVTDLPARRRELSQLPVLRWVDNSGNRANRRIADSDDLAD

SEQ ID NO: 62452 - protein, 412 aa, Mycobacterium bovis
MAAGGAWEDGQVLRWITAGESHGRALVAVVEGMVAGVHVTSADIADQLARRRLGYGRGARMTFERDAVTVLSGIRHGSTLGGPIAIEIGNTEWPKWETVMAADPVDPAELADVARNAPLTRPRPGHADYAGMLKYGFDDARPVLERASARETAARVAAGTVARAFLRQALGVEVLSHVISIGASAPYEGPPPRAEDLPAIDASPVRAYDKAAEADMIAQIEAAKKDGDTLGGVVEAVALGLPVGLGSFTSGDHRLDSQLAAAVMGIQAIKGVEIGDGFQTARRRGSRAHDEMYPGPDGVVRSTNRAGGLEGGMTNGQPLRVRAAMKPISTVPRALATVDLATGDEAVAIHQRSDVCAVPAAGVVVETMVALVLARAALEKFGGDSLAETQRNIAAYQRSVADREAPAARVSG

SEQ ID NO: 62453 - protein, 130 aa, Mycobacterium bovis
MGIVGVGIDLVSIPDFAEQVDQPGTVFAETFTPGERRDASDKSSSAARHLAARWAAKEAVIKAWSGSRFAQRPVLPEDIHRDIEVVTDMWGRPRVRLTGAIAEYLADVTIHVSLTHEGDTAAAVAILEAP

SEQ ID NO: 62454 - protein, 530 aa, Mycobacterium bovis
MYVAATKASTATDEPVKRTATKSPAASASGAKTGAKRTAAKSASGSPPAKRATKPAARSVKPASAPQDTTTSTIPKRKTRAAAKSAAAKAPSARGHATKPRAPKDAQHEAATDPEDALDSVEELDAEPDLDVEPGEDLDLDAADLNLDDLEDDVAPDADDDLDSGDDEDHEDLEAEAAVAPGQTADDDEEIAEPTEKDKASGDFVWDEDESEALRQARKDAELTASADSVRAYLKQIGKVALLNAEEEVELAKRIEAGLYATQLMTELSERGEKLPAAQRRDMMWICRDGDRAKNHLLEANLRLVVSLAKRYTGRGMAFLDLIQEGNLGLIRAVEKFDYTKGYKFSTYATWWIRQAITRAMADQARTIRIPVHMVEVINKLGRIQRELLQDLGREPTPEELAKEMDITPEKVLEIQQYAREPISLDQTIGDEGDSQLGDFIEDSEAVVAVDAVSFTLLQDQLQSVLDTLSEREAGVVRLRFGLTDGQPRTLDEIGQVYGVTRERIRQIESKTMSKLRHPSRSQVLRDYLD

SEQ ID NO: 62455 - protein, 393 aa, Mycobacterium bovis
MVDFGALPPEINSARMYAGPGSASLVAAAKMWDSVASDLFSAASAFQSVVWGLTVGSWIGSSAGLMAAAASPYVAWMSVTAGQAQLTAAQVRVAAAAYETAYRLTVPPPVIAENRTELMTLTATNLLGQNTPAIEANQAAYSQMWGQDAEAMYGYAATAATATEALLPFEDAPLITNPGGLLEQAVAVEEAIDTAAANQLMNNVPQALQQLAQPAQGVVPSSKLGGLWTAVSPHLSPLSNVSSIANNHMSMMGTGVSMTNTLHSMLKGLAPAAAQAVETAAENGVWAMSSLGSQLGSSLGSSGLGAGVAANLGRAASVGSLSVPPAWAAANQAVTPAARALPLTSLTSAAQTAPGHMLGGLPLGHSVNAGSGINNALRVPARAYAIPRTPAAG

SEQ ID NO: 62456 - protein, 357 aa, Mycobacterium bovis
MRVRAGVRSSPLLLHAGTPPTAAAAESGMRTLVTGSSGHLGEALVRTLRARGADVVSLDSRPSRYTNIVGCVSDRALLRDVMAGVEVVFHAAAHHKPQLAFLPRQAFLDTNIIGTQTVLDAAVAANVRAFVMTSSTTVFGDALTPPADQPAAWIDESVTPIPKNIYGVTKASSEDLCQLAHRNDGLACVVLRVARFFVEGDDMPDLYDGRSQDNIKANEYACRRVALEDAVDAHLNAAQRAPQLGFGRYLVSATTPFTRDDLTQLRTDAASVFARRVPLAAAVWTQRGWRFPDRLDRVYVNSRARRDLNWRPRFDLNAVAARLARGQSVHTPLSQLVGSKAYAHSSYHRGVFAPARP

SEQ ID NO: 62457 - protein, 428 aa, Mycobacterium bovis
MSVVGTPKSAEQIQQEWDTNPRWKDVTRTYSAEDVVALQGSVVEEHTLARRGAEVLWEQLHDLEWVNALGALTGNMAVQQVRAGLKAIYLSGWQVAGDANLSGHTYPDQSLYPANSVPQVVRRINNALQRADQIAKIEGDTSVENWLAPIVADGEAGFGGALNVYELQKALIAAGVAGSHWEDQLASEKKCGHLGGKVLIPTQQHIRTLTSARLAADVADVPTVVIARTDAEAATLITSDVDERDQPFITGERTREGFYRTKNGIEPCIARAKAYAPFADLIWMETGTPDLEAARQFSEAVKAEYPDQMLAYNCSPSFNWKKHLDDATIAKFQKELAAMGFKFQFITLAGFHALNYSMFDLAYGYAQNQMSAYVELQEREFAAEERGYTATKHQREVGAGYFDRIATTVDPNSSTTALTGSTEEGQFH

SEQ ID NO: 62458 - protein, 118 aa, Mycobacterium bovis
MMRRGEIWQVDLDPARGSEANNQRPAVVVSNDRANATATRLGRGVITVVPVTSNIAKVYPFQVLLSATTTGLQVDCKAQAEQIRSIATERLLRPIGRVSAAELAQLDEALKLHLDLWS

SEQ ID NO: 62459 - protein, 457 aa, Mycobacterium bovis
MPIATINPATGETVKTFTAATDDEVDAAIARAHRRFADYRQTSFAQRARWANATADLLEAEADQAAAMMTLEMGKTLAAAKAEALKCAKGFRYYAENAEALLADEPADAAKVGASAAYGRYQPLGVILAVMPWNFPLWQAVRFAAPALMAGNVGLLKHASNVPQCALYLADVIARGGFPDGCFQTLLVSSGAVEAILRDPRVAAATLTGSEPAGQSVGAIAGNEIKPTVLELGGSDPFIVMPSADLDAAVSTAVTGRVQNNGQSCIAAKRFIVHADIYDDFVDKFVARMAALRVGDPTDPDTDVGPLATEQGRNEVAKQVEDAAAAGAVIRCGGKRLDRPGWFYPPTVITDISKDMALYTEEVFGPVASVFRAANIDEAVEIANATTFGLGSNAWTRDETEQRRFIDDIVAGQVFINGMTVSYPELPFGGVKRSGYGRELSAHQIREFCNIKTVWIA

SEQ ID NO: 62460 - protein, 269 aa, Mycobacterium bovis [sequence omitted]

SEQ ID NO: 62461 - protein, 628 aa, Mycobacterium bovis
MPFRNVAIVAHVDHGKTTLVDAMLRQSGALRERGELQERVMDTGDLEREKGITILAKNTAVHRHHPDGTVTVINVIDTPGHADFGGEVERGLSMVDGVLLLVDASEGPLPQTRFVLRKALAAHLPVILVVNKTDRPDARIAEVVDASHDLLLDVASDLDDEAAAAAEHALGLPTLYASGRAGVASTTAPPDGQVPDGTNLDPLFEVLEKHVPPPKGEPDAPLQALVTNLDASTFLGRLALIRIYNGRIRKGQQVAWIRQVDGQQTVTTAKITELLATEGVERKPTDAAVAGDIVAVAGLPEIMIGDTLAASANPVALPRITVDEPAISVTIGTNTSPLAGKVGGHKLTARMVRSRLDAELVGNVSIRVVDIGAPDAWEVQGRGELALAVLVEQMRREGFELTVGKPQVVTKTIDGTLHEPFESMTVDCPEEYIGAVTQLMAARKGRMVEMANHTTGWVRMDFVVPSRGLIGWRTDFLTETRGSGVGHAVFDGYRPWAGEIRARHTGSLVSDRAGAITPFALLQLADRGQFFVEPGQQTYEGMVVGINPRPEDLDINVTREKKLTNMRSSTADVIETLAKPLQLDLERAMELCAPDECVEVTPEIVRIRKVELAAAARARSRARTKARG

SEQ ID NO: 62462 - protein, 362 aa, Mycobacterium bovis
MSASLPVFPWDTLADAKALAGAHPDGIVDLSVGTPVDPVAPLIQEALAAASAAPGYPATAGTARLRESVVAALARRYGITRLTEAAVLPVIGTKELIAWLPTLLGLGGADLVVVPELAYPTYDVGARLAGTRVLRADALTQLGPQSPALLYLNSPSNPTGRVLGVDHLRKVVEWARGRGVLVVSDECYLGLGWDAEPVSVLHPSVCDGDHTGLLAVHSLSKSSSLAGYRAGFVVGDLEIVAELLAVRKHAGMMVPAPVQAAMVAALDDDAHERQQRERYAQRRAALLPALGSAGFAVDYSDAGLYLWATRGEPCRDSVAWLAQRGILVAPGDFYGPGGAQHVRVALTATDERVAAAVGRLTC

SEQ ID NO: 62463 - protein, 1232 aa, Mycobacterium bovis
MTVTPHVGGPLEELLERSGRFFTPGEFSADLRTVTRRGGREGDVFYRDRWSHDKVVRSTHGVNCTGSCSWKIYVKDGIITWETQQTDYPSVGPDRPEYEPRGCPRGASFSWYSYSPTRVRYPYARGVLVEMYREAKTRLGDPVLAWADIQADPERRRRYQQARGKGGLVRVSWAEASEMVAAAHVHTIKTYGPDRVAGFSPIPAMSMVSHAAGSRFVELIGGVMTSFYDWYADLPVASPQVFGDQTDVPESGDWWDASYLVMWGSNVPITRTPDAHWMAEARYRGAKVVVVSPDYADNTKFADEWVRCAAGTDTALAMAMGHVILSECYVRNQVPFFVDYVRRYTDLPFLIKLEKRGDLLVPGKFLTAADIGEESENAAFKPALLDELTNTVVVPQGSLGFRFGEDGVGKWNLDLGSVVPALSVEMDKAVNGDRSAELVTLPSFDTIDGHGETVSRGLPVRRAGKHLVCTVFDLMLAHYGVARAGLPGEWPTGYHDRTQQNTPAWQESITGVPAAQAIRFAKEFARNATESGGRSMIIMGGGICHWFHSDVMYRSVLALLMLTGSMGRNGGGWAHYVGQEKVRPLTGWQTMAMATDWSRPPRQVPGASYWYAHTDQWRYDGYGADKLASPVGRGRFAGKHTMDLLTSATAMGWSPFYPQFDRSSLDVADEARAAGRDVGDYVAEQLAQHKLKLSITDPDNPVNWPRVLTVWRANLIGSSGKGGEYFLRHLLGTDSNVQSDPPTDGVHPRDVVWDSDIPEGKLDLIMSIDFRMTSTTLVSDVVLPAATWYEKSDLSSTDMHPYVHSFSPAIDPPWETRSDFGAFAAIARAFSALAKRHLGTRTDVVLTALQHDTPDEMAYPDGTERDWLATGEVPVPGRTMSKLTVVERDYTAIYDKWLTLGPLIDQFGMTTKGYTVHPFREVSELAANFGVMNSGVAVGRPAITTAKRMADVILALSGTCNGRLAVEGFLELEKRTGQRLAHLAEGSEERRITYADTQARPVPVITSPEWSGSESGGRRYAPFTINIEHLKPFHTLTGRMHFYLAHDWVEELGEQLPVYRPPLDMARLFNQPELGPTDDGLGLTVRYLTPHSKWSFHSTYQDNLYMLSLSRGGPTMWMSPGDAAKINVRDNDWVEAVNANGIYVCRAIVSHRMPEGVVFVYHVQERTVDTPRTETNGKRGGNHNALTRVRIKPSHLAGGYGQHAFAFNYLGPTGNQRDEVTVVRRRSQEVRY

SEQ ID NO: 62464 - protein, 558 aa, Mycobacterium bovis
MKVMAQMAMVMNLDKCIGCHTCSVTCKQAWTNRSGTEYVWFNNVETRPGVGYPRTYEDQERWRGGWVRDKKGRLRLRDGGRIHKLLRIFANPKLPTIGDYYEPWTYDYENLTSAPAGDTFPTAAPRSLISGNPMKVSWGSNWDDNLAGSPEIVPNDPVLKKVNQVNQEVKLKLEETFMFYLPRICEHCLNPSCVASCPSGAMYKRTEDGIVLVDQDRCRGWRMCVSGCPYKKVYFNHKTGKAEKCTLCYPRIEVGLPTVCSETCVGRLRYLGLVLYDVDQVLQAASVESDTDLYEAQRRILLDPHDPRVIAGARAEGIADEWIEAAQRSPVYALINTYRVALPLHPEYRTMPMVWYIPPLSPVVDAVSRDGHDGEDLGNLFGALDALRIPIAYLAELFTAGDTEVVAGVLRRLAAMRCYMRDINLGRETQPHIPESVGMTEEQIYQMYRLLAVAKYEERYVIPTSYAGELPAAAMTDDMGCSLSVDGGPGMYESGPFGQGSPTPVPIAVESFHALQHAGSAATGGAGRSRVNLLNWDPNGAAAGLFPEPQPSKDVVQR

SEQ ID NO: 62465 - protein, 335 aa, Mycobacterium bovis
MRTPATVVAGVDLGDAVFAAAVRAGVARVEQLMDTELRQADEVMSDSLLHLFNAGGKRFRPLFTVLSAQIGPQPDAAAVTVAGAVIEMIHLATLYHDDVMDEAQVRRGAPSANAQWGNNVAILAGDYLLATASRLVARLGPEAVRIIADTFAQLVTGQMRETRGTSENVDSIEQYLKVVQEKTGSLIGAAGRLGGMFSGATDEQVERLSRLGGVVGTAFQIADDIIDIDSESDESGKLPGTDVREGVHTLPMLYALRESGPDCARLRALLNGPVDDDAEVREALTLLRASPGMARAKDVLAQYAAQARHELALLPDVPGRRALAALVDYTVSRHG

SEQ ID NO: 62466 - protein, 475 aa, Mycobacterium bovis
PARLGFAGAVLITAGGLGAGSVRQHDPLLESIHMSWLRFGHGLVLSSILLWTGVGVMLLAWLGLGRRVLAGEATEFTMRATTVIWLAPLLLSVPVFSRDTYSYLAQGALLRDGLDPYAVGPVGNPNALLDDVSPIWTITTAPYGPAFILVAKFVTVIVGNNVVAGTMLLRLCMLPGLALLVWATPRLASHLGTHGPTALWICVLNPLVLIHLMGGVHNEMLMVGLMTAGIALTVQGRNVAGIILITVAIAVKATAGIALPFLVWVWLRHLRERRGYRPVQAFLAAAAISLLIFVAVFAVLSAVAGVGLGWLTALAGSVKIINWLTVPTGAANVIHALGRGLFTVDFYTLLRITRLIGIVIIAVSLPLLWWRFRSDDRAALTGVAWSMLIVVLFVPAALPWYYSWPLAVAAPLAQSRRAIAAIAGLSTWVMVIFKPDGSHGMYSWLHFWIATACALTAWYVLYRSPDPARSAGCNP

SEQ ID NO: 62467 - protein, 645 aa, Mycobacterium bovis
KRPGKTQKARQAQEATKSRPATRSDVAPAGRSTRARRTRQVVDVGTRGASFVFRHRTGNAVILVLMLVAATQLFFLQVSHAAGLRAQAAGQLKVTDVQPAARGSIVDRNNDRLAFTIEARALTFQPKRIRRQLEEARKKTSAAPDPQQRLRDIAQEVAGKLNNKPDAAAVLKKLQSDETFVYLARAVDPAVASAICAKYPEVGAERQDLRQYPGGSLAANVVGGIDWDGHGLLGLEDSLDAVLAGTDGSVTYDRGSDGVVIPGSYRNRHKAVHGSTVVLTLDNDIQFYVQQQVQQAKNLSGAHNVSAVVLDAKTGEVLAMANDNTFDPSQDIGRQGDKQLGNPAVSSPFEPGSVNKIVAASAVIEHGLSSPDEVLQVPGSIQMGGVTVHDAWEHGVMPYTTTGVFGKSSNVGTLMLSQRVGPERYYDMLRKFGLGQRTGVGLPGESAGLVPPIDQWSGSTFANLPIGQGLSMTLLQMTGMYQAIANDGVRVPPRIIKATVAPDGSRTEEPRPDDIRVVSAQTAQTVRQMLRAVVQRDPMGYQQGTGPTAGVPGYQMAGKTGTAQQINPGCGCYFDDVYWITFAGIATADNPRYVIGIMLDNPARNSDGAPGHSAAPLFHNIAGWLMQRENVPLSPDPGPPLVLQA

SEQ ID NO: 62468 - protein, 328 aa, Mycobacterium bovis
MAQRCFELLTPALTRYYPDGSQAVLLDATIGAGGHAERFLEGLPGLRLIGLDRDPTALDVARSRLVRFADRLTLVHTRYDCLGAALAESGYAAVGSVDGILFDLGVSSMQLDRAERGFAYATDAPLDMRMDPTTPLTAADIVNTYDEAALADILRRYGEERFARRIAAGIVRRRAKTPFTSTAELVALLYQAIPAPARRVGGHPAKRTFQALRIAVNDELESLRTAVPAALDALAIGGRIAVLAYQSLEDRIVKRVFAEAVASATPAGLPVELPGHEPRFRSLTHGAERASVAEIERNPRSTPVRLRALQRVEHRAQSQQWATEKGDS

SEQ ID NO: 62469 - protein, 143 aa, Mycobacterium bovis
MFLGTYTPKLDDKGRLTLPAKFRDALAGGLMVTKSQDHSLAVYPRAAFEQLARRASKAPRSNPEARAFLRNLAAGTDEQHPDSQGRITLSADHRRYASLSKDCVVIGAVDYLEIWDAQAWQNYQQIHEENFSAASDEALGDIF

SEQ ID NO: 62470 - protein, 552 aa, Mycobacterium bovis
MSDNAKHHRDGHLVASGLQDRAARTPQHEGFLGPDRPWHLSFSLLLAGSFVLFSWWAFDYAGSGANKVILVLATVVGMFMAFNVGGNDVANSFGTSVGAGTLTMKQALLVAAIFEVSGAVIAGGDVTETIRSGIVDLSGVSVDPRDFMNIMLSALSAAALWLLFANRMGYPVSTTHSIIGGIVGAAIALGMVSGQGGAALRMVQWDQIGQIVVSWVLSPVLGGLVSYLLYGVIKRHILLYNEQAERRLTEIKKERIAHRERHKAAFDRLTEIQQIAYTGALARDAVAANRKDFDPDELESDYYRELHEIDAKTSSVDAFRALQNWVPLVAAAGSMIIVAMLLFKGFKHMHLGLTTMNNYFIIAMVGAAVWMATFIFAKTLRGESLSRSTFLMFSWMQVFTASGFAFSHGSNDIANAIGPFAAILDVLRTGAIEGNAAVPAAAMVTFGVALCAGLWFIGRRVIATVGHNLTTMHPASGFAAELSAAGVVMGATVLGLPVSSTHILIGAVLGVGIVNRSTNWGLMKPIVLAWVITLPSAAILASVGLVALRAIF

SEQ ID NO: 62471 - protein, 350 aa, Mycobacterium bovis
MLAAWAVVEGCLMAVFFVTDGGEVFISATPTTAQWVILALLAVALPLASLVGWLVSQISSGRGQAAVATMAVAFAAASDVIESGPIQLLRTAVVVGLVLLQTGCGVGSVLGWAVRMTLEHLATVGTLAVRALPIVLLTALVFFNTYVWLMAANINGERLPLAMVFLLAIAGAFVVSKTVERVRPLLRSTTVMPQGSQSLAGTPFATMGDPSPGFPLTRAERLNVVFLLAALQLVEILVVASVGAAIYLVLGMIILTPPLLREWTHYDSMTTTVLGMTFPAPDSLIRMCLFLGALTFMYISARAVDDAEYRAMFLDPLIDDLHTALLARNRYRNNVVTAPCAGVDAGHVDD

SEQ ID NO: 62472 - protein, 1106 aa, Mycobacterium bovis
  MISC_FEATURE (374)..(374): X=any amino acid
SGLSNVGADLTGVLRGPNGSTFNAGLANLGQFNVGSANLGSANLGSANLGNSNVGFGNIGNANIGGANIGDFNVGIANTGPGLTAAVNNIGIGNTGNYNIGVGNTGNYNIGFGNTGNNNIGIGLSGDNQIGFGPLNAGIANMGLFNLGDNNFGMANAGNFNQGIANTGNNNIGLFNTGNNNVGIGLTGDGLSGFSSLNSGAGNTGFFNSGTANTGLFNSGTGNTGLFNSGTGNVGIGNMGTGGFGVGLSGDSQVGIGGTNSGSFNIGLFNSGTGNVGIGNSGTGNVGIGNTGTGNTGIGNSGNYNTGLLNAGLVNTGIANPGNHNTGLFNIGTFNTGIANPGHYNTGSYNTGSYNTGMATPETTAPARSSPAAXTTACSGAADRQGLLAANYTITIERPAAFLNVDIPVNIPITGDITNVSIPAITFPRIDASGSVDIGILSGTVLAPVGPITLHGGDASAPLDTPIEIDFGPSPAINLNIGKPDGSTVINIVGGAGAGPISIPIIDLRPAPGFFNATTGPSSGFLNWGAGSASGLLNFGNNSGLYNFATSSMGNSGFQNYGSLQSGWANLGNSISGIYNTGLGAPANVSGLLNIGTNLAGWLQNGPTETTFSVGLANLGFWNLGSANIGNYNLGSANIGVYNLGSANIGDFNLGSANIGDFNLGSANIGSSNIGFGNVGPGLTAAIGNIGFGNTGNGNIGIGNTGTGNIGFGNTGNGNIGIGLTGDTMTGFGGWNSGTGNIGLFNSGTGNIGFGNSGTGNWGIGNSGDYNTGIGNTGSTNSGFFNTGLVNTGIGNSGDYNTGLFNAGNTNTGSFNPGDYNTGGFNPGNYNTGYFNPGNSNTGFANSGDVNTGAFNSGNYSNGFFWRGDYQGLGGFAYQSAVSEIPWSYDIGSNIEIPIEGDINAITQDAFTIDEFEIPIKLRVSVCVIYIPFKGCVKHVSVTIPITTEHLGPYEIDASTINPDQPIDTAFTQTLDFAGSGTVGAFPFGFGWQQSPGFFNSTTTPSSGFFNSGAGGASGFLNDAAAAVSGLGNVFTETSGFFNAGGVGNSGFQNFGNLLSGWANLGNTVSGFYNTSMLDLATQALISGFGNHGARLSGILNNGSGP

SEQ ID NO: 62473 - protein, 558 aa, Mycobacterium bovis
MAEFIYTMKKVRKAHGDKVILDDVTLSFYPGAKIGVVGPNGAGKSSVLRIMAGLDKPNNGDAFLATGATVGILQQEPPLNEDKTVRGNVEEGMGDIKIKLDRFNEVAELMATDYTDELMEEMGRLQEELDHADAWDLDAQLEQAMDALRCPPADEPVTNLSGGERRRVALCKLLLSKPDLLLLDEPTNHLDAESVQWLEQHLASYPGAILAVTHDRYFLDNVAEWILELDRGRAYPYEGNYSTYLEKKAERLAVQGRKDAKLQKRLTEELAWVRSGAKARQAKSKARLQRYEEMAAEAEKTRKLDFEEIQIPVGPRLGNVVVEVDHLDKGYDGRALIKDLSFSLPRNGIVGVIGPNGVGKTTLFKTIVGLETPDSGSVKVGETVKLSYVDQARAGIDPRKTVWEVVSDGLDYIQVGQTEVPSRAYVSAFGFKGPDQQKPAGVLSGGERNRLNLALTLKQGGNLILLDEPTNDLDVETLGSLENALLNFPGCAVVISHDRWFLDRTCTHILAWEGDDDNEAKWFWFEGNFGAYEENKVERLGVDAARPHRVTHRKLTRG

SEQ ID NO: 62474 - protein, 1623 aa, Mycobacterium bovis
MTIDPGAKQDVEAWTTFTASADIPDWISKAYIDSYRGPRDDSSEATKAAEASWLPASLLTPAMLGAHYRLGRHRAAGESCVAVYRADDPAGFGPALQVVAEHGGMLMDSVTVLLHRLGIAYAAILTPVFDVHRSPTGELLRIEPKAEGTSPHLGEAWMHVALSPAVDHKGLAEVERLLPKVLADVQRVATDATALIATLSELAGEVESNAGGRFSAPDRQDVGELLRWLGDGNFLLLGYQRCRVADGMVYGEGSSGMGVLRGRTGSRPRLTDDDKLLVLAQARVGSYLRYGAYPYAIAVREYVDGSVVEHRFVGLFSVAAMNADVLEIPTISRRVREALAMAESDPSHPGQLLLDVIQTVPRPELFTLSAQRLLTMARAVVDLGSQRQALLFLRADRLQYFVSCLVYMPRDRYTTAVRMQFEDILVREFGGTRLEFTARVSESPWALMHFMVRLPEVGVAGEGAAAPPVDVSEANRIRIQGLLTEAARTWADRLIGAAAAGSVGQADAMHYAAAFSEAYKQAVTPADAIGDIAVITELTDDSVKLVFSERDEQGVAQLTWFLGGRTASLSQLLPMLQSMGVVVLEERPFSVTRPDGLPVWIYQFKISPHPTIPLAPTVAERAATAHRFAEAVTAIWHGRVEIDRFNELVMRAGLTWQQVVLLRAYAKYLRQAGFPYSQSYIESVLNEHPATVRSLVDLFEALFVPVPSGSASNRDAQAAAAAVAADIDALVSLDTDRILRAFASLVQATLRTNYFVTRQGSARCRDVLALKLNAQLIDELPLPRPRYEIFVYSPRVEGVHLRFGPVARGGLRWSDRRDDFRTEILGLVKAQAVKNAVIVPVGAKGGFVVKRPPLPTGDPAADRDATRAEGVACYQLFISGLLDVTDNVDHATASVNPPPEVVRRDGDDAYLVVAADKGTATFSDIANDVAKSYGFWLGDAFASGGSVGYDHKAMGITARGAWEAVKRHFREIGIDTQTQDFTVVGIGDMSGDVFGNGMLLSKHIRLIAAFDHRHIFLDPNPDAAVSWAERRRMFELPRSSWGDYDRSLISEGGGVYSREQKAIPLSAQVRAVLGIDGSVDGGAAEMAPPNLIRAILRAPVDLLFNGGIGTYIKAESESDADVGDRANDPVRVNANQVRAKVIGEGGNLGVTALGRVEFDLSGGRINTDALDNSAGVDCSDHEVNIKILIDSLVSAGTVKADERTQLLESMTDEVAQLVLADNEDQNDLMGTSRANAASLLPVHAMQIKYLVAERGVNRELEALPSEKEIARRSEAGIGLTSPELATLMAHVKLGLKEEVLATELPDQDVFASRLPRYFPTALRERFTPEIRSHQLRREIVTTMLINDLVDTAGITYAFRIAEDVGVTPIDAVRTYVATDAIFGVGHIWRRIRAANLPIALSDRLTLDTRRLIDRAGRWLLNYRPQPLAVGAEINRFAAMVKALTPRMSEWLRGDDKAIVEKTAAEFASQGVPEDLAYRVSTGLYRYSLLDIIDIADIADIDAAEVADTYFALMDRLGTDGLLTAVSQLPRHDRWHSLARLAIRDDIYGALRSLCFDVLAVGEPGESSEQKIAEWEHLSASRVARARRTLDDIRASGQKDLATLSVAARQIRRMTRTSGRGISG

SEQ ID NO: 62475 - protein, 864 aa, Mycobacterium bovis
MDAVALPNLTRDQAVERAALITVDSYQIILDVTDGNGAPGERTFRSTTTVVFDALPGADTVIDISAHTVRRASLNDQDLDVSGYDEAAGIPLRGLAQRNVVVVDADCHYSNTGEGLHRFVDPVDGETYLYSQFETADAKRMFACFDQPDLKATFDVRVTAPAHWKVISNGAPLAAANGVHTFATTPRMSTYLVALIAGPYAAWTDTYIDDHGEIPLGIYCRASLAEYMDAERLFTQTKQGFGFYHKHFGLPYAFGKYDQLFVPEFNAGAMENAGAVTFLEDYVFRSKVTRASYERRAETVLHEMAHMWFGDLVTMTWWDDLWLNESFATFASVLCQSEATEFTEAWTTFATVEKSWAYRQDQLPSTHPIAADIPDLAAVEVNFDGITYAKGASVLKQLVAYVGLERFLAGLRDYFRTHAFGNASFDDLLAALEKASGRDLSNWGEQWLKTTGLNTLRPDFEVDAEGRFTRFAVTQSGAAPGAGETRVHRLAVGIYDDDGSKSSGKLVRVHREELDVSGPITNVPALVGVSRGKLILVNDDDLTYCSLRLDERSLQTALDRIADIAEPLPRTLVWSAAWEMTREAELRARDFVSLVSGGVHAETEVGVAQRLLLQAQTALGCYAEPGWARERGWPQFADRLLELAREAEPGSDHQLAYINSLCSSVLSPRHVQTLGALLEGEPAACGLAGLAVDTDLRWRIVTALATAGAIDADGPETPRIDAEVQRDPTAAGKRHAAQARAARPQFVVKDEAFTTVVEDDTLANATGRAMIAGIAAPGQGELLKPFARRYFQAIPGVWARRSSEVAQSVVIGLYPHWDISEQGITAAEEFLSDPEVPPALRRLVLEGQAAVQRSLRARNFDADG

SEQ ID NO: 62476 - protein, 138 aa, Mycobacterium bovis
MSVGFVTPVGVRWSDIDMYQHVNHATMVTILEEARVPFLKDAFGADITSTGLLIADVRVTYKGQLRLSDSPLQVTIWTKRLRAVDFTLGYEVRSVNAEPDSRPAVIAESQLAAFHIEEQRLVRLSPHHREYLQRWFRG

SEQ ID NO: 62477 - protein, 159 aa, Mycobacterium bovis
MRVYLGADHAGYELKQRIIEHLKQTGHEPIDCGALRYDADDDYPAFCIAAATRTVADPGSLGIVLGGSGNGEQIAANKVPGARCALAWSVQTAALAREHNNAQLIGIGGRMHTVAEALAIVDAFVTTPWSKAQRHQRRIDILAEYERTHEAPPVPGAPA

SEQ ID NO: 62478 - protein, 520 aa, Mycobacterium bovis
MGEPWWSRAVFYQVYPRSFADSNGDGVGDLDGLASRLDHLQQLGVDAIWINPVTVSPMADHGYDVADPRDIDPLFGGMPAFERLVAAAHRQGIKVTMDVVPNHTSSAHPWFQAALADLPGSPARDRYFFRDGRGPDGSLPPNNWESVFGGPAWTRVREPDGNPGQWYLHLFDTEQPDLNSDNPEILDDFEKTLRFWLDRGVDGFRIDVAHGMAKPPGLPDSPDLGIEVLHHRDDDPRFNHPNVHAIHRDIRTVIDEYPGAVTVGEVWVHDNARWAEYLRPDELHLGFNFRLARTEFDAAEIRDAVANSLAAAALQNATPTWTLANHDVGREVSRYGGGEIGLRRAKAMAVVMLALPGVVFLYNGQELGLPDVDLPDEVLQDPTWERSGRTERGRDGCRVPIPWSGNIPPFGFSTCPDTWLPMPPEWAALTAEKQRADAGSTLSFFRLALRLRRERNEFDGDVDWLAAPDDALIFRRHGGGLVCALNAAERPLALPAGEPILASAPLTDATLPPNAAAWLV

SEQ ID NO: 62479 - protein, 134 aa, Mycobacterium bovis
MEGMDQMPKSFYDAVGGAKTFDAIVSRFYAQVAEDEVLRRVYPEDDLAGAEERLRMFLEQYWGGPRTYSEQRGHPRLRMRHAPFRISLIERDAWLRCMHTAVASIDSETLDDEHRRELLDYLEMAAHSLVNSPF

SEQ ID NO: 62480 - protein, 793 aa, Mycobacterium bovis
MTNVAEDQLTAQAVAPSTEASAALEPALETPESPVETLKTSISASRRVRARLARRMTAQRSTTNPVLEPLVAVHREIYPKADLSILQRAYEVADQRHASQLRQSGDPYITHPLAVANILAELGMDTTTLVAALLHDTVEDTGYTLEALTEEFGEEVGHLVDGVTKLDRVVLGSAAEGETIRKMITAMARDPRVLVIKVADRLHNMRTMRFLPPEKQARKARETLEVIAPLAHRLGMASVKWELEDLSFAILHPKKYEEIVRLVAGRAPSRDTYLAKVRAEIVNTLTASKIKATVEGRPKHYWSIYQKMIVKGRDFDDIHDLVGVRILCDEIRDCYAAVGVVHSLWQPMAGRFKDYIAQPRYGVYQSLHTTVVGPEGKPLEVQIRTRDMHRTAEYGIAAHWRYKEAKGRNGVLHPHAAAEIDDMAWMRQLLDWQREAADPGEFLESLRYDLAVQEIFVFTPKGDVITLPTGSTPVDFAYAVHTEVGHRCIGARVNGRLVALERKLENGEVVEVFTSKAPNAGPSRDWQQFVVSPRAKTKIRQWFAKERREEALETGKDAMAREVRRGGLPLQRLVNGESMAAVARELHYADVSALYTAIGEGHVSAKHVVQRLLAELGGIDQAEEELAERSTPATMPRRPRSTDDVGVSVPGAPGVLTKLAKCCTPVPGDVIMGFVTRGGGVSVHRTDCTNAASLQQQAERIIEVLWAPSPSSVFLVAIQVEALDRHRLLSDVTRALADEKVNILSASVTTSGDRVAISRFTFEMGDPKHLGHLLNAVRNVEGVYDVYRVTSAA

SEQ ID NO: 62481 - protein, 611 aa, Mycobacterium bovis
MFVLRSHAAGLLREGDAGQQVTLAGWVARRRDHGGVIFIDLRDASGIAQVVFRDPQDTEVLAQAHRLRAEFCVSVAGVVEIRPEGNANPEIATGEIEVNATSLTVLGECAPLPFQLDEPAGEELRLKYRYLDLRRDDPAAAIRLRSRVNAAARAVLARHDFVEIETPTITRSTPEGARDFLVPARLHPGSFYALPQSPQLFKQLLMVAGMERYYQIARCYRDEDFRADRQPEFTQLDMEMSFVDAEDIIAISEEVLTELWALIGYRIPTPIPRIGYAEAMRRFGTDKPDLRFGLELVECTDFFSDTTFRVFQAPYVGAVVMPGGASQPRRTLDGWQDWAKQRGHRGLAYVLVAEDGTLGGPVAKNLTEAERTGLADHVGAKPGDCIFFSAGPVKSSRALLGAARVEIANRLGLIDPDAWAFVWVVDPPLFEPADEATAAGEVAVGSGAWTAVHHAFTAPKPEWEDRIESDTGSVLADAYDIVCNGHEIGGGSVRIHRRDIQERVFAVMGLDKAEVEEKFGFLLEAFMFGAPPHGGIAFGWDRTTALLAGMDSIREVIAFPKTGGGVDPLTDAPAPITAQQRKESGIDAQPKRVQRHDQIFAVTTSHPSVNK

SEQ ID NO: 62482 - protein, 423 aa, Mycobacterium bovis
MTEFSSFSAPKGVPDYVPPDSAQFVAVRDGLLAAARQAGYSHIELPIFEDTALFARGVGESTDVVSKEMYTFADRGDRSVTLRPEGTAGVVRAVIEHGLDRGALPVKLCYAGPFFRYERPQAGRYRQLQQVGVEAIGVDDPALDAEVIAIADAGFRSLGLDGFRLEITSLGDESCRPQYRELLQEFLFGLDLDEDTRRRAGINPLRVLDDKRPELRAMTASAPVLLDHLSDVAKQHFDTVLAHLDALGVPYVINPRMVRGLDYYTKTAFEFVHDGLGAQSGIGGGGRYDGLMHQLGGQDLSGIGFGLGVDRTVLALRAEGKTAGDSARCDVFGVPLGEAAKLRLAVLAGRLRAAGVRVDLAYGDRGLKGAMRAAARSGARVALVAGDRDIEAGTVAVKDLTTGEQVSVSMDSVVAEVISRLAG

SEQ ID NO: 62483 - protein, 229 aa, Mycobacterium bovis
MLTAMRGDIRAARERDPAAPTALEVIFCYPGVHAVWGHRLAHWLWQRGARLLARAAAEFTRILTGVDIHPGAVIGARVFIDHATGVVIGETAEVGDDVTIYHGVTLGGSGMVGGKRHPTVGDRVIIGAGAKVLGPIKIGEDSRIGANAVVVKPVPPSAVVVGVPGQVIGQSQPSPGGPFDWRLPDLVGASLDSLLTRVARLEALGGGPQAAGVIRPPEAGIWHGEDFSI

SEQ ID NO: 62484 - protein, 287 aa, Mycobacterium bovis
MAEHTGFWLDAWRGLRRRPKFVIAAALILLILVVAAFPSLFTAADPTYADPSQSMLAPSAAHWFGTDLQGHDIYSRTVYGARASVTVGLGATLAVFVVGGALGALAGFYGSWIDAVVSRVTDVFLGLPLLLAAIVLMQVMHHRTVWTVIAILALFGWPQVARIARGAVLEVRASDYVLAAKALGLNRFQILLRHALPNAVGPVIAVATVALGIFIVTEATLSYLGVGLPTSVVSWGGDINVAQTRLRSGSPILFYPAGALAITVLAFMMMGDALRDALDPASRAWRA

SEQ ID NO: 62485 - protein, 828 aa, Mycobacterium bovis
PERSGSVASGNAVRARMPKLTRRSRILIMIALGVIVLLLAGPRLIDAYVDWLWFGELGYRSVFTTMLATRIVVCLVAGVVVGGIVFGGLALAYRTRPVFVPDADNDPVARYRAVVLARLRLVGIGIPAAIGLLAGIVAQSYWARIQLFLHGGDFGVRDPQFGRDLGFYAFELPFYRLMLSYMLVSVFLAFVANLVAHYIFGGIRLSGRTGALSRSARVQLVSLVGVLVLLKAVAYWLDRYELLSHTRGGKPFTGAGYTDINAVLPAKLILMAIALICAAAVFSAIALRDLRIPAIGLVLLLLSSLIVGAGWPLIVEQISVKPNAAQKESEYISRSITATRQAYGLTSDVVTYRNYSGDSPATAQQVAADRATTSNIRLLDPTIVSPAFTQFQQGKNFYYFPDQLSIDRYLDRNGNLRDYVVAARELNPDRLIDNQRDWINRHTVYTHGNGFIASPANTVRGIANDPNQNGGYPEFLVNVVGANGTVVSDGPAPLDQPRIYFGPVISNTSADYAIVGRNGDDREYDYETNIDTKRYTYTGSGGVPLGGWLARSVFAAKFAERNFLFSNVIGSNSKILFNRDPAQRVEAVAPWLTTDSAVYPAIVNKRLVWIVDGYTTLDNYPYSELTSLSSATADSNEVAFNRLVPDKKVSYIRNSVKATVDAYDGTVTLYQQDEKDPVLKAWMQVFPGTVKPKSDIAPELAEHLRYPEDLFKVQRMLLAKYHVNDPVTFFSTSDFWDVPLDPNPTASSYQPPYYIVAKNIAKDDNSASYQLISAMNRFKRDYLAAYISASSDPATYGNLTVLTIPGQVNGPKLANNAITTDPAVSQDL

SEQ ID NO: 62486 - protein, 122 aa, Mycobacterium bovis
MAQSVSATRRISRLRRHTRLRKKLSGTAERPRLVVHRSARHIHVQLVNDLNGTTVAAASSIEADVRGVPGDKKARSVRVGQLIAERAKAAGIDTVVFDRGGYTYGGRIAALADAARENGLSF

SEQ ID NO: 62487 - protein, 220 aa, Mycobacterium bovis
MAEQPAGQAGTTDNRDARGDREGRRRDSGRGSRERDGEKSNYLERVVAINRVSKVVKGGRRFSFTALVIVGDGNGMVGVGYGKAKEVPAAIAKGVEEARKSFFRVPLIGGTITHPVQGEAAAGVVLLRPASPGTGVIAGGAARAVLECAGVHDILAKSLGSDNAINVVHATVAALKLLQRPEEVAARRGLPIEDVAPAGMLKARRKSEALAASVLPDRTI

SEQ ID NO: 62488 - protein, 65 aa, Mycobacterium bovis
MSQLKITQVRSTIGARWKQRESLRTLGLRRIRHSVIREDNAATRGLIAVVRHLVEVEPAQTGGKT

SEQ ID NO: 62489 - protein, 146 aa, Mycobacterium bovis
MTLKLHDLRPARGSKTARTRVGRGDGSKGKTAGRGTKGTRARKQVPVTFEGGQMPIHMRLPKLKGFRNRFRTEYEIVNVGDINRLFPQGGAVGVDDLVAKGGVRKNALVKVLGDGKLTAKVDVSAHKFSGSARAKITAAGGSATEL

SEQ ID NO: 62490 - protein, 441 aa, Mycobacterium bovis
MLSAFISSLRTVDLRRKILFTLGIVILYRVGAALPSPGVNFPNVQQCIKEASAGEAGQIYSLINLFSGGALLKLTVFAVGVMPYITASIIVQLLTVVIPRFEELRKEGQAGQSKMTQYTRYLAIALAILQATSIVALAANGGLLQGCSLDIIADQSIFTLVVIVLVMTGGAALVMWMGELITERGIGNGMSLLIFVGIAARIPAEGQSILESRGGVVFTAVCAAALIIIVGVVFVEQGQRRIPVQYAKRMVGRRMYGGTSTYLPLKVNQAGVIPVIFASSLIYIPHLITQLIRSGSGVVGNSWWDKFVGTYLSDPSNLVYIGIYFGLIIFFTYFYVSITFNPDERADEMKKFGGFIPGIRPGRPTADYLRYVLSRITLPGSIYLGVIAVLPNLFLQIGAGGTVQNLPFGGTAVLIMIGVGLDTVKQIESQLMQRNYEGFLK

SEQ ID NO: 62491 - protein, 181 aa, Mycobacterium bovis
MRVLLLGPPGAGKGTQAVKLAEKLGIPQISTGELFRRNIEEGTKLGVEAKRYLDAGDLVPSDLTNELVDDRLNNPDAANGFILDGYPRSVEQAKALHEMLERRGTDIDAVLEFRVSEEVLLERLKGRGRADDTDDVILNRMKVYRDETAPLLEYYRDQLKTVDAVGTMDEVFARALRALGK

SEQ ID NO: 62492 - protein, 165 aa, Mycobacterium bovis
VASDNRDPIAAARANWERSGWGDVSLGMVAVTSVMRAHQILLARVETALRPYDLSFSRFELLRLLAFSRIGALPITKASDRLQVHVTSVTHAIRRLEADGLVRRVPHPTDGRTTLVQITELGRSTVEDATVTLNEQVFANVGMGAEESQALVSAVETLRRNAGDF

SEQ ID NO: 62493 - protein, 122 aa, Mycobacterium bovis; identical to SEQ ID NO: 61814

SEQ ID NO: 62494 - protein, 105 aa, Mycobacterium bovis
MKVHKGDTVLVISGKDKGAKGKVLQAYPDRNRVLVEGVNRIKKHTAISTTQRGARSGGIVTQEAPIHVSNVMVVDSDGKPTRIGYRVDEETGKRVRISKRNGKDI

SEQ ID NO: 62495 - protein, 187 aa, Mycobacterium bovis
MTTAQKVQPRLKERYRSEIRDALRKQFGYGNVMQIPTVTKVVVNMGVGEAARDAKLINGAVNDLALITGQKPEVRRARKSIAQFKLREGMPVGVRVTLRGDRMWEFLDRLTSIALPRIRDFRGLSPKQFDGVGNYTFGLAEQAVFHEVDVDKIDRVRGMDINVVTSAATDDEGRALLRALGFPFKEN

SEQ ID NO: 62496 - protein, 61 aa, Mycobacterium bovis
MAKKALVNKAAGKPRFAVRAYTRCSKCGRPRAVYRKFGLCRICLREMAHAGELPGVQKSSW

SEQ ID NO: 62497 - protein, 132 aa, Mycobacterium bovis
MTMTDPIADFLTRLRNANSAYHDEVSLPHSKLKANIAQILKNEGYISDFRTEDARVGKSLVIQLKYGPSRERSIAGLRRVSKPGLRVYAKSTNLPRVLGGLGVAIISTSSGLLTDRQAARQGVGGEVLAYVW

SEQ ID NO: 62498 - protein, 179 aa, Mycobacterium bovis
MSRIGKQPIPVPAGVDVTIEGQSISVKGPKGTLGLTVAEPIKVARNDDGAIVVTRPDDERRNRSLHGLSRTLVSNLVTGVTQGYTTKMEIFGVGYRVQLKGSNLEFALGYSHPVVIEAPEGITFAVQAPTKFTVSGIDKQKVGQIAANIRRLRRPDPYKGKGVRYEGEQIRRKVGKTGK

SEQ ID NO: 62499 - protein, 431 aa, Mycobacterium bovis
MADTDDTATLRYPGGEIDLQIVHATEGADGIALGPLLAKTGHTTFDVGFANTAAAKSSITYIDGDAGILRYRGYPIDQLAEKSTFIEVCYLLIYGELPDTDQLAQFTGRIQRHTMLHEDLKRFFDGFPRNAHPMPVLSSVVNALSAYYQDALDPMDNGQVELSTIRLLAKLPTIAAYAYKKSVGQPFLYPDNSLTLVENFLRLTFGFPAEPYQADPEVVRALDMLFILHADHEQNCSTSTVRLVGSSRANLFTSISGGINALWGPLHGGANQAVLEMLEGIRDSGDDVSEFVRKVKNREAGVKLMGFGHRVYKNYDPRARIVKEQADKILAKLGGDDSLLGIAKELEEAALTDDYFIERKLYPNVDFYTGLIYRALGFPTRMFTVLFALGRLPGWIAHWREMHDEGDSKIGRPRQIYTGYAERDYVTIDAR

SEQ ID NO: 62500 - protein, 268 aa, Mycobacterium bovis
MSNYRIDTRTIVPGLAVTLADGVLSVTIDRPESLNSLTKPVLAGMADAIEGAATDPRVKVVRLGGAGRGFSSGGAISVDDVWASGPPTDTVAEANRTVRAIVALPQPVVAVVQGPTVGCGVSLALACDLVLASDNAFFMLAHTNVGLMPDGGASALVQAAIGRIRAMHMALLPDRVPAAEALSWGLVSAVYPAADFDAEVDKLISRLLAGPALAIAKTKNAINAATLTELAPTLLRELDGQALLLRTDDFAEGATAFQQRRTPMFTGR

SEQ ID NO: 62501 - protein, 342 aa, Mycobacterium bovis
MDQIGADLAEAVERHLTEYGVRVLGGLSALNSAHPESLDLEIDAHPLTITALYLPHLSATAALQAWDTAGAGSPLLVVGPRLHPSSAETLRARGLWYIDGAGNAYLRHQGGLLIDVRGRRSAVSAQPGTLGDGLHSDGPRNPFTPKRAQVVCVLLDAPQLVDAPLRAIAASAGVSVGMAKETMDTLRTTGFFEHLGSRRRLVRTDELLDLWAAAYPGGLGRANKLLVASGDIHTWSAPDGLAVAVSGEQALPDEIRNPESLMLYVDTPAPGLPADLLIHNRWHRDPHGSIVIRKLFWRNLPDEQPGLAPTALIYADLLASREPRQVEVAHLMRRQDERLARL

SEQ ID NO: 62502 - protein, 308 aa, Mycobacterium bovis
MGWYVARRVAVMVPVFLGATLLIYGMVFLLPGDPVAALAGDRPLTPAVAAQLRSHYHLDDPFLVQYLRYLGGILHGDLGRAYSGLPVSAVLAHAFPVTIRLALIALAVEAVLGIGFGVIAGLRQGGIFDSAVLVTGLVIIAIPIFVLGFLAQFLFGVQLEIAPVTVGERASVGRLLLPGIVLGAMSFAYVVRLTRSAVAANAHADYVRTATAKGLSRPRVVTVHILRNSLIPVVTFLGADLGALMGGAIVTEGIFNIHGVGGVLYQAVTRQETPTVVSIVTVLVLIYLITNLLVDLLYAALDPRIRYG

SEQ ID NO: 62503 - protein, 427 aa, Mycobacterium bovis
MAITDVDVFAHLTDADIENLAAELDAIRRDVEESRGERDARYIRRTIAAQRALEVSGRLLLAGSSRRLAWWTGALTLGVAKIIENMEIGHNVMHGQWDWMNDPEIHSSTWEWDMSGSSKHWRYTHNFVHHKYTNILGMDDDVGYGMLRVTRDQRWKRYNIFNVVWNTILAIGFEWGVALQHLEIGKIFKGRADREAAKTRLREFSAKAGRQVFKDYVAFPALTSLSPGATYRSTLTANVVANVIRNVWSNAVIFCGHFPDGAEKFTKTDMIGEPKGQWYLRQMLGSANFNAGPALRFMSGNLCHQIEHHLYPDLPSNRLHEISVRVREVCDRYDLPYTTGSFLVQYGKTWRTLAKLSLPDKYLRDNADDAPETRSERMFAGLGPGFAGADPVTGRRRGLKTAIAAVRGRRRSKRMAKSVTEPDDLAA

SEQ ID NO: 62504 - protein, 380 aa, Mycobacterium bovis
MSKKHTTLNASIIDTRRPTVAGADRHPGWHALRKIAARITTPLLPDDYLHLANPLWSARELRGRILGVRRETEDSATLFIKPGWGFSFDYQPGQYIGIGLLVDGCWRWRSYSLTSSPAASGSARMVTVTVKAMPEGFLSTHLVAGVKPGTIVRLAAPQGNFVLPDPAPPLILFLTAGSGITPVMSMLRTLVRRNQITDVVHLHSAPTAADVMFGAELAALAADHPGYRLSVRETRAQGRLDLTRIGQQVPDWRERQTWACGPEGVLNQADKVWSSAGASDRLHLERFAVSKTAPAGAGGTVTFARSGKSVAADAATSLMDAGEGAGVQLPFGCRMGICQSCVVDLVEGHVRDLRTGQRHEPGTRVQTCVSAASGDCVLDI

SEQ ID NO: 62505 - protein, 410 aa, Mycobacterium bovis
MSAAIAEPTSHDPDSGGHFGGPSGWGGRYVPEALMAVIEEVTAAYQKERVSQDFLDDLDRLQANYAGRPSPLYEATRLSQHAGSARIFLKREDLNHTGSHKINNVLGQALLARRMGKTRVIAETGAGQHGVATATACALLGLDCVIYMGGIDTARQALNVARMRLLGAEVVAVQTGSKTLKDAINEAFRDWVANADNTYYCFGTAAGPHPFPTMVRDFQRIIGMEARVQIQGQAGRLPDAVVACVGGGSNAIGIFHAFLDDPGVRLVGFEAAGDGVETGRHAATFTAGSPGAFHGSFSYLLQDEDGQTIESHSISAGLDYPGVGPEHAWLKEAGRVDYRPITDSEAMDAFGLLCRMEGIIPAIESAHAVAGALKLGVELGRGAVIVVNLSGRGDKDVETAAKWFGLLGND

SEQ ID NO: 62506 - protein, 282 aa, Mycobacterium bovis
MGDSGKGTAGMSPATVLDSILEGVRADVAAREASVSLSEIKAAAAAAPPPLDVMAALREPGIGVIAEVKRASPSAGALATIADPAKLAQAYQDGGARIVSVVTEQRRFQGSLDDLDAVRASVSIPVLRKDFVVQPYQIHEARAHGADMLLLIVAALEQSVLVSMLDRTESLGMTALVEVHTEQEADRALKAGAKVIGVNARDLMTLDVDRDCFARIAPGLPSSVIRIAESGVRGTADLLAYAGAGADAVLVGEGLVTSGDPRAAVADLVTAGTHPSCPKPAR

SEQ ID NO: 62507 - protein, 365 aa, Mycobacterium bovis
MGSARAEMTKDAGEYLVTQAATRPTNDAGQDGGNNSDILVVARQQVLQRGEGLNQDQVLAVLQLPDDRLEELLALAHEVRMRWCGPEVEVEGIISLKTGGCPEDCHFCSQSGLFASPVRSAWLDIPSLVEAAKQTAKSGATEFCIVAAVRGPDERLMAQVAAGIEAIRNEVEINIACSLGMLTAEQVDQLAARGVHRYNHNLETARSFFANVVTTHTWEERWQTLSMVRDAGMEVCCGGILGMGETLQQRAEFAAELAELGPDEVPLNFLNPRPGTPFADLEVMPVGDALKAVAAFRLALPRTMLRFAGGREITLGDLGAKRGILGGINAVIVGNYLTTLGRPAEADLELLDELQMPLKALNASL

SEQ ID NO: 62508 - protein, 444 aa, Mycobacterium bovis
MDVARMNFSHGDYDDHKVAYERVRVASDATGRAVGVLADLQGPKIRLGRFASGATHWAEGETVRITVGACEGSHDRVSTTYKRLAQDAVAGDRVLVDDGKVALVVDAVEGDDVVCTVVEGGPVSDNKGISLPGMNVTAPALSEKDIEDLTFALNLGVDMVALSFVRSPADVELVHEVMDRIGRRVPVIAKLDKPEAIDNLEAIVLAFDAVMVARGDLGVELPLEEVPLVQKRAIQMARENAKPVIVATQMLDSMIENSRPTRAEASDVANAVLDGADALMLSGETSVGKYPLAAVRTMSRIICAVEENSTAAPPLTHIPRTKRGVISYAARDIGERLDAKALVAFTQSGDTVRRLARLHTPLPLLAFTAWPEVRSQLAMTWGTETFIVPKMQSTDGMIRQVDKSLLELARYKRGDLVVIVAGAPPGTVGSTNLIHVHRIGEDDV

SEQ ID NO: 62509 - protein, 945 aa, Mycobacterium bovis
MTAIGRLIHRYAIWIVGVWALAAIIGNNFAPPLEQVITAEDQPFSPAGTATSRAVERSAAAFSQAPGDNIGYLVLERNGVLNDQDRAYYDALVVALRRDSRHVIEVVDWWGTPAIAEVARSDDHHAVTAALRFGGMVGTSQAGESITAARSIVTQLHPPDGLHVFVTGPGATIVDEFAAIDRQTQLITATTIVVLLILLLIVYRSAITATVPLLSVVVSLAVAKPIVSVLVDRDFIGISLFSLGLSVAVVVGAGTGFAMFLIGRYHERRRQHIAPAAALADAYRGVAPAIAGATFIVVTSLGAVGWLSLARIGMFATTGILCSIGVLAVGLAALTLTPALVALASRANLLKPPQHKRIQRQFRRLGTHVARWPAPILVASGVFVLIMMIALPRVPIGWDEAAATPSAAESNRGYRAADRHFAPNQLLPTQVMIETDHDIRNPAGLTAIERITAAIMAIGGVRMVQSASHPNGMVSKQAALTASAGNLGDQLDEFSDQLTSRQATFTNLEAAVRDVVSALDLVQAGIRQDGYGLGQVSLAVRLMQQAITKLQGSAGDVFDIFDPLRRFVAAIPECRANPVCSVAQEVVQWANTVTESCAKLADAAGQLARGIADVASATSGVSGLPNALDGIGGQLAQVRESAAGVQELLNNVGAAPLRELPDYLRELAAVSQSAPGVDLYAARRILTDPNMRAVLDYFVSPNGHATRLLVYGDGSEWGDDGAQRARAIVTAVAEETDEGTLRPTAVELTGVGPATRDLQDLVGSDLTLLAVITLAVIFAIAALLLRSPLAGLVVVGTIATSYICALGASVVIWKHILGDNLHWSVLPIAFVLLISVGSAYNLLFALRIREESPAGPRTSVIRAFAATGMVVTAAGIVFGTTMFALAASTSLSVAQIGVTVGMGLLLDALVIRGFVLPALMVLLGRWLWWPRRSVSNRQVPEPSPA

SEQ ID NO: 62510 - protein, 412 aa, Mycobacterium bovis
MGETTTCAIIGGGPAGMVLGLLLARAGVQVTLLEKHGDFLRDFRGDTVHPTTMRLLDELGLWERFAALPYSEVRTATLHSNGRAVTYIDFERLHQPYPYVAMVPQWDLLNLLAEAAQAEPSFTLRMKTEVTGLLREGGKVTGVRYQGAEGPGELRAELTVACDGRWSIARHEAGLKAREFPVNFDVWWFKLPREGDAEFSFLPRFSPGKGLGVIPREGYFQIAYLGPKGTDAQLRERGIEEFRRDVSELLPEATASVAALASTDEVKHLNVKVNRLRRWHIDGLLCIGDAAHAMSPVAGVGINLAVQDAVAAATILAEPLREHRVSSRHLAAVRRRRAFPTAVTQAVQRVLHRRLLGPLLQGRDPTPPAALLGLVERLPWLSAVPAYFVGVGVRPEHAPAFARRGPGNRKGP

SEQ ID NO: 62511 - protein, 1214 aa, Mycobacterium bovis
MYRKFRDDPSSVDPSWHEFLVDYSPEPTSQPAAEPTRVTSPLVAERAAAAAPQAPPKPADTAAAGNGVVAALAAKTAVPPPAEGDEVAVLRGAAAAVVKNMSASLEVPTATSVRAVPAKLLIDNRIVINNQLKRTRGGKISFTHLLGYALVQAVKKFPNMNRHYTEVDGKPTAVTPAHTNLGLAIDLQGKDGKRSLVVAGIKRCETMRFAQFVTAYEDIVRRARDGKLTTEDFAGVTISLTNPGTIGTVHSVPRLMPGQGAIIGVGAMEYPAEFQGASEERIAELGIGKLITLTSTYDHRIIQGAESGDFLRTIHELLLSDGFWDEVFRELSIPYLPVRWSTDNPDSIVDKNARVMNLIAAYRNRGHLMADTDPLRLDKARFRSHPDLEVLTHGLTLWDLDRVFKVDGFAGAQYKKLRDVLGLLRDAYCRHIGVEYAHILDPEQKEWLEQRVETKHVKPTVAQQKYILSKLNAAEAFETFLQTKYVGQKRFSLEGAESVIPMMDAAIDQCAEHGLDEVVIGMPHRGRLNVLANIVGKPYSQIFTEFEGNLNPSQAHGSGDVKYHLGATGLYLQMFGDNDIQVSLTANPSHLEAVDPVLEGLVRAKQDLLDHGSIDSDGQRAFSVVPLMLHGDAAFAGQGVVAETLNLANLPGYRVGGTIHIIVNNQIGFTTAPEYSRSSEYCTDVAKMIGAPIFHVNGDDPEACVWVARLAVDFRQRFKKDVVIDMLCYRRRGHNEGDDPSMTNPYMYDVVDTKRGARKSYTEALIGRGDISMKEAEDALRDYQGQLERVFNEVRELEKHGVQPSESVESDQMIPAGLATAVDKSLLARIGDAFLALPNGFTAHPRVQPVLEKRREMAYEGKIDWAFGELLALGSLVAEGKLVRLSGQDSRRGTFSQRHSVLIDRHTGEEFTPLQLLATNSDGSPTGGKFLVYDSPLSEYAAVGFEYGYTVGNPDAVVLWEAQFGDFVNGAQSIIDEFISSGEAKWGQLSNVVLLLPHGHEGQGPDHTSARIERFLQLWAEGSMTIAMPSTPSNYFHLLRRHALDGIQRPLIVFTPKSMLRHKAAVSEIKDFTEIKFRSVLEEPTYEDGIGDRNKVSRILLTSGKLYYELAARKAKDNRNDLAIVRLEQLAPLPRRRLRETLDRYENVKEFFWVQEEPANQGAWPRFGLELPELLPDKLAGIKRISRRAMSAPSSGSSKVHAVEQQEILDEAFG

SEQ ID NO: 62512 - protein, 712 aa, Mycobacterium bovis
  MISC_FEATURE (698)..(698): X=any amino acid
NVMNEAYIESMGKAVDRLVAEKDSITGVVVASAKKTFFAGGDVKTMIQARPEDAGDVFNTVETIKRQLRTLETLGKPVVAAINGAALGGGLEIALACHHRIAADVKGSQLGLPEVTLGLLPGGGGVTRTVRMFGIQNAFVSVLAQGTRFKPAKAKEIGLVDELVATVEELVPAAKAWIKEELKANPDGAGVQPWDKKGYKMPGGTPSSPGLAAILPSFPSNLRKQLKGAPMPAPRAILAAAVEGAQVDFDTASRIESRYFASLVTGQVAKNMMQAFFFDLQAINAGGSRPEGIGKTPIKRIGVLGAGMMGAGIAYVSAKAGYEVVLKDVSLEAAAKGKGYSEKLEAKALERGRTTQERSDALLARITPTADAADFKGVDFVIEAVFENQELKHKVFGEIEDIVEPNAILGSNTSTLPITGLATGVKRQEDFIGIHFFSPVDKMPLVEIIKGEKTSDEALARVFDYTLAIGKTPIVVNDSRGFFTSRVIGTFVNEALAMLGEGVEPASIEQAGSQAGYPAPPLQLSDELNLELMHKIAVATRKGVEDAGGTYQPHPAEAVVEKMIELGRSGRLKGAGFYEYADGKRSGLWPGLRETFKSGSSQPPLQDMIDRMLFAEALETQKCLDEGVLTSTADANIGSIMGIGFPPWTGGSAQFIVGYSGPAGTGKAAFVARTRELAAAYGDRFLPPESLAKLSASXEVFAGRIGAPDSSA

SEQ ID NO: 62513 - protein, 205 aa, Mycobacterium bovis
MPPVSEAARAAGLVDVRGVVPDAAIDLRYATANNFTGTQLYPPGARCLVHESMAEGLAAAAAVLRPHGQVLVFWDCYRPHDVQVRMFDVVPNPAWVARPGKYAHSHEAGRSVDVTFASAQRQCPSVRRSGELCLADMGTDFDDFSSRATAFATQGVSAEAQANRAHLRAAMQAGGLTVYSGEWWHFDGPGPGAGVDRPILEVPVD

SEQ ID NO: 62514 - protein, 271 aa, Mycobacterium bovis
MNSPLAPVGVFDSGVGGLTVARAIIDQLPDEDIVYVGDTGNGPYGPLTIPEIRAHALAIGDDLVGRGVKALVIACNSASSACLRDARERYQVPVVEVILPAVRRAVAATRNGRIGVIGTRATITSHAYQDAFAAARDTEITAVACPRFVDFVERGVTSGRQVLGLAQGYLEPLQRAEVDTLVLGCTHYPLLSGLIQLAMGENVTLVSSAEETAKEVVRVLTEIDLLRPHDAPPATRIFEATGDPEAFTKLAARFLGPVLGGVQPVHPSRIH

SEQ ID NO: 62515 - protein, 204 aa, Mycobacterium bovis
MALVTKLLVASRNRKKLAELRRVLDGAGLSGLTLLSLGDVSPLPETPETGVTFEDNALAKARDAFSATGLASVADDSGLEVAALGGMPGVLSARWSGRYGDDAANTALLLAQLCDVPDERRGAAFVSACALVSGSGEVVVRGEWPGTIAREPRGDGGFGYDPVFVPYGDDRTAAQLSPAEKDAVSHRGRALALLLPALRSLATG

SEQ ID NO: 62516 - protein, 377 aa, Mycobacterium bovis
MRIGPIELASPVVLAPMAGVTNVAFRALCRQLEQSKVGTVSGLYVCEMVTARALIERHPVTMHMTTFSADESPRSLQLYTVDPDTTYAAARMIAGEGLADHIDMNFGCPVPKVTKRGCGAALPFKRRLFGQIVAAAVRATEGTDIPVTVKFRIGIDDAHHTHLDAGRIAEAEGAAAVALHARTAAQRYSGTADWEQIARLKQHVRTIPVLGNGDIYDAGDALAMMSTTGCDGVVIGRGCLGRPWLFAELSAAFTGSPAPTPPTLGEVADIIRRHGTLLAAHFGEDKGMRDIRKHIAWYLHGFPAGSALRRALAMVKTLDELDCLLDRLDGTVPFPDSATGARGRQGSPARVALPDGWLTDPDDCRVPEGADAMGSGG

SEQ ID NO: 62517 - protein, 684 aa, Mycobacterium bovis
MSDGESAAPWARLSESAFPDGVDRWITVPPATWVAAQGPRDTQNVGCHATGAVSVADLIARLGPAFPDLPTHRHVAPEPEPSGRGPKVPDDADDQQDTEAIAIPAHSLEFLSELPDLRAANYPRADHARREPELPGKQLTGSARVRPLRIRRTSPAPAKPAPNSGRRPMVLAARSLAALFAALALALTGGAWQWSASKNSRLNMVSALDPHSGDIVNPSGQHGDENFLLVGMDSRAGANANIGAGDAEDAGGARSDTVMLVNIPASRERVVAVSFPRDLAITPIQCEAWNPETGKYGPIYDEKTGTMGPRLVYTETKLNSAFSFGGPKCLVKVIQKLSGLSINRFIAIDFVGFARMVEALGGVEVCSTTPLRDYELGTVLEHAGRQVIDGPTALNYVRARQVTTESNGDYGRIKRQQLFLSSLLRSMISTDTLFNLSRLNNVVNMFIGNSYVDNVKTKDLVELGRSLQHMAAGHVTFVTVPTGITDQNGDEPPRTSDMKALFTAIIDDDPLPLENDHNAQRLGNTPSTPPTTTKKAPQAGLTNEIQHQQVTTTSPKEVTVQVSNSTGQAGLATTATDQLKRNGFNVMAPDDYPSSLLATTVFFSPGNEQAAATVAAVFGQSKIERVTGIGQLVQVVLGQDFSAVRAPLPSGSTVSVQISRNSSSPPTKLPEDLTVTNAADTTCE

SEQ ID NO: 62518 - protein, 295 aa, Mycobacterium bovis
MLRQTGVVVTLDGEILQPGMPLLHADDLAAVRGDGVFETLLVRDGRACLVEAHLQRLTQSARLMDLPEPDLPRWRRAVEVATQRWVASTADEGALRLIYSRGREGGSAPTAYVMVSPVPARVIGARRDGVSAITLDRGLPADGGDAMPWLMASAKTLSYAVNMAVLRHAARQGAGDVIFVSTDGYVLEGPRSTVVIATDGDQGGGNPCLLTPPPWYPILRGTTQQALFEVARAKGYDCDYRALRVADLFDSQGIWLVSSMTLAARVHTLDGRRLPRTPIAEVFAELVDAAIVSDR

SEQ ID NO: 62519 - protein, 766 aa, Mycobacterium bovis
MSPLARTPRKTSVLDTVEHAATTPDQPQPYGELGLKDDEYRRIRQILGRRPTDTELAMYSVMWSEHCSYKSSKVHLRYFGETTSDEMRAAMLAGIGENAGVVDIGDGWAVTFKVESHNHPSYVEPYQGAATGVGGIVRDIMAMGARPVAVMDQLRFGAADAPDTRRVLDGVVRGIGGYGNSLGLPNIGGETVFDPCYAGNPLVNALCVGVLRQEDLHLAFASGAGNKIILFGARTGLDGIGGVSVLASDTFDAEGSRKKLPSVQVGDPFMEKVLIECCLELYAGGLVIGIQDLGGAGLSCATSELASAGDGGMTIQLDSVPLRAKEMTPAEVLCSESQERMCAVVSPKNVDAFLAVCRKWEVLATVIGEVTDGDRLQITWHGETVVDVPPRTVAHEGPVYQRPVARPDTQDALNADRSAKLSRPVTGDELRATLLALLGSPHLCSRAFITEQYDRYVRGNTVLAEHADGGMLRIDESTGRGIAVSTDASGRYTLLDPYAGAQLALAEAYRNVAVTGATPVAVTNCLNFGSPEDPGVMWQFTQAVRGLADGCADLGIPVTGGNVSFYNQTGSAAILPTPVVGVLGVIDDVRRRIPTGLGAEPGETLMLLGDTRDEFDGSVWAQVTADHLGGLPPVVDLAREKLLAAVLSSASRDGLVSAAHDLSEGGLAQAIVESALAGETGCRIVLPEGADPFVLLFSESAGRVLVAVPRTEESRFRGMCEARGLPAVRIGVVDQGSDAVEVQGLFAVSLAELRATSEAVLPRYFG

SEQ ID NO: 62520 - protein, 258 aa, Mycobacterium bovis
MAKRLDLTDVNIYYGSFHAVADVSLAILPRSVTALIGPSGCGKTTVLRTLNRMHEVIPGARVEGAVLLDDQDIYAPGIDPVGVRRAIGMVFQRPNPFPAMSIRNNVVAGLKLQGVRNRKVLDDTAESSLRGANLWDEVKDRLDKPGGGLSGGQQQRLCIARAIAVQPDVLLMDEPCSSLDPISTMAIEDLISELKQQYTIVIVTHNMQQAARVSDQTAFFNLEAVGKPGRLVEIASTEKIFSNPNQKATEDYISGRFG

SEQ ID NO: 62521 - protein, 321 aa, Mycobacterium bovis
MTPAAIFLVATIGADGEATVHDALSKISGLVRAIGFRDPTKHLSVVVSIGSDAWDRLFAGPRPTELHPFVELTGPRHTAPATPGDLLFHIRAETMDVCFELAGRILKSMGDAVTVVDEVHGFRFFDNRDLLGFVDGTENPSGPIAIKATTIGDEDRNFAGSCYVHVQKYVHDMASWESLSVTEQERVIGRTKLDDIELDDNAKPANSHVALNVITDDDGTERKIVRHNMPFGEVGKGEYGTYFIGYSRTPTVTEQMLRNMFLGDPAGNTDRVLDFSTAVTGGLFFSPTIDFLDHPPPLPQAATPTLAAGSLSIGSLKGSPR

SEQ ID NO: 62522 - protein, 1529 aa, Mycobacterium bovis
MGMTPKRVGLYNPAFEHDSCGVAMVVDMHGRRSRDIVDKAITALLNLEHRGAQGAEPRSGDGAGILIQVPDEFLREAVDFELPAPGSYATGIAFLPQSSKDAAAACAAVQKIAEAEGLQVLGWRSVPTDDSSLGALSRDAMPTFRQVFLAGASGMALERRCYVVRKRAEHELGTKGPGQDGPGRETVYFPSLSGQTLVYKGMLTTPQLKAFYLDLQDERLTSALGIVHSRFSTNTFPSWPLAHPFRRIAHNGEINTVTGNENWMRAREALIKTDIFGSAADVEKLFPICTPGASDTARFDEVLELLHLGGRSLAHAVLMMIPEAWERHESMDPARRAFYQYHASLMEPWDGPASMTFTDGTVVGAVLDRNGLRPSRIWVTDDGLVVMASEAGVLDLHPSTVVRRMRLQPGRMFLVDTAQGRIVSDEEIKADLAAEHPYQEWLDNGLVPLDELPEGKDVRMPHHRIVMRQLAFGYTYEELNLLVAPMARLGAEPIGSMGTDTPVAVLSQRPRMLYDYFHQLFAQVTNPPLDAIREEVVTSLQGTTGGERDLLNPDENSCHQIVLPQPILRNHELAKLVSLDPNDKVNGRPHGLRSKVIRCLYRVSEGGAGLAAALEEVRGAAAAAIADGARIIILSDRESDEEMAPIPSLLAVAGVHHHLVRERTRTQVGLVVESGDAREVHHMAALVGFGAAAINPYLVFESIEDMLDRGVIEGIDRTAALNNYIKAAGKGVLKVMSKMGISTLASYTGAQLFQAVGISEQVLDEYFTGLTCPTGGITLDDIAADVAARHRLAYLDRPDERAHRELEVGGEYQWRREGEYHLFNPETVFKLQHSTRTGQYKIFKEYTRLVDDQSERMASLRGLLKFRTGVRPPVPLDEVEPASEIVKRFSTGAMSYGSISAEAHETLAIAMNRLGARSNCGEGGEDVKRFDRDPNGDWRRSAIKQVASARFGVTSHYLTNCTDLQIKMAQGAKPGEGGQLPGHKVYPWVAEVRHSTPGVGLISPPPHHDIYSIEDLAQLIHDLKNANPSARVHVKLVSENGVGTVAAGVSKAHADVVLISGHDGGTGATPLTSMKHAGAPWELGLAETQQTLLLNGLRDRIVVQVDGQLKTGRDVMIATLLGAEEFGFATAPLVVAGCIMMRVCHLDTCPVGVATQNPLLRERFTGKPEFVENFFMFIAEEVREYLAQLGFRTVNEAVGQAGALDTTLARAHWKAHKLDLAPVLHEPESAFMNQDLYCSSRQDHGLDKALDQQLIVMSREALDSGKPVRFSTTIGNVNRTVGTMLGHELTKAYGGQGLPDGTIDITFDGSAGNSFGAFVPKGITLRVYGDANDYVGKGLSGGRIVVRPSDDAPQDYVAEDNIIGGNVILFGATSGEVYLRGVVGERFAVRNSGAHAVVEGVGDHGCEYMTGGRVVILGRTGRNFAAGMSGGVAYVYDPDGELPANLNSEMVELETLDEDDADWLHGTIQVHVDATDSAVGQRILSDWSGQQRHFVKVMPRDYKRVLQAIALAERDGVDVDKAIMAAAHG

SEQ ID NO: 62523 - protein, 488 aa, Mycobacterium bovis
MADPGGFLKYTHRKLPKRRPVPLRLRDWREVYEEFDNESLRQQATRCMDCGIPFCHNGCPLGNLIPEWNDLVRRGRWRDAIERLHATNNFPDFTGRLCPAPCEPACVLGINQDPVTIKQIELEIIDKAFDEGWVQPRPPRKLTGQTVAVVGSGPAGLAAAQQLTRAGHTVTVFEREDRIGGLLRYGIPEFKMEKRHLDRRLDQMRSEGTEFRPGVNVGVDISAEKLRADFDAVVLAGGATAWRELPIPGRELEGVHQAMEFLPWANRVQEGDDVLDEDGQPPITAKGKKVVIIGGGDTGADCLGTVHRQGAIAVHQFEIMPRPPDARAESTPWPTYPLMYRVSAAHEEGGERVFSVNTEAFVGTDGRVSALRAHEVTMLDGKFVKVEGSDFELEADLVLLAMGFVGPERAGLLTDLGVKFTEHGNVARGDDFDTSVPGVFVAGDMGRGQSLIVWAIAEGRAAAAAVDRYLMGSSALPAPVKPTAAPLQ

SEQ ID NO: 62524 - protein, 303 aa, Mycobacterium bovis
MTHMSIFLSRDNKVIVQGITGSEATVHTARMLRAGTQIVGGVNARKAGTTVTHEDKGGRLIKLPVFGSVAEAMEKTGADVSIIFVPPTFAKDAIIEAIDAEIPLLVVITEGIPVQDTAYAWAYNLEAGHKTRIIGPNCPGIISPGQSLAGITPANITGPGPIGLVSKSGTLTYQMMFELRDLGFSTAIGIGGDPVIGTTHIDAIEAFEKDPDTKLIVMIGEIGGDAEERAADFIKTNVSKPVVGYVAGFTAPEGKTMGHAGAIVSGSSGTAAAKQEALEAAGVKVGKTPSATAALAREILLSL

SEQ ID NO: 62525 - protein, 542 aa, Mycobacterium bovis
MNGRRTIGEDGLVFGLVVIVALVAAVVVGTVLGHRYRVGPPVLLILSGSLLGLIPRFGDVQIDGEVVLLLFLPAILYWESMNTSFREIRWNLRVIVMFSIGLVIATAVAVSWTARALGMESHAAAVLGAVLSPTDAAAVAGLAKRLPRRALTVLRGESLINDGTALVLFAVTVAVAEGAAGIGPAALVGRFVVSYLGGIMAGLLVGGLVTLLRRRIDAPLEEGALSLLTPFAAFLLAQSLKCSGVVAVLVSALVLTYVGPTVIRARSRLQAHAFWDIATFLINGSLWVFVGVQIPGAIDHIAGEDGGLPRATVLALAVTGVVIATRIAWVQATTVLGHTVDRVLKKPTRHVGFRQRCVTSWAGFRGAVSLAAALAVPMTTNSGAPFPDRNLIIFVVSVVILVTVLVQGTSLPTVVRWARMPEDVAHANELQLARTRSAQAALDALPTVADELGVAPDLVKHLEKEYEERAVLVMADGADSATSDLAERNDLVRRVRLGVLQHQRQAVTTLRNQNLIDDIVLRELQAAMDLEEVQLLDPADAE

SEQ ID NO: 62526 - protein, 332 aa, Mycobacterium bovis
MAAIRTPRDRWPHHHRNEVTEIIPLDGFLDGLALYDELDFAELDDLDLGDDCVFDYEAQLLAAPELDDLDDADDLAPEWLVAPTVVLTPEVTPVSRRVGQHRKQPIGAARGRLLISAMAAGAAAAAAHTAIQQSETPRTETVLTAHASALNEGSGSNPPRGVQVIAAQPAASAAVHNAEFARGVAFAEERAEREARLQRPLYVMPTKGIFTSSFGYRWGVLHAGIDLANAIGTPIYAVSDGVVIDAGPTAGYGMWVKLLHADGTVTLYGHVNTTLVSVGERVMAGDQIATMGSRGFSTGPHLHFEVLLGGTERVDPVPWLAKRGLSVGNYTG

SEQ ID NO: 62527 - protein, 771 aa, Mycobacterium bovis
MSVHATDAKPPGPSPADQLLDGLNPQQRQAVVHEGSPLLIVAGAGSGKTAVLTRRIAYLMAARGVGVGQILAITFTNKAAAEMRERVVGLVGEKARYMWVSTFHSTCVRILRNQAALIEGLNSNFSIYDADDSRRLLQMVGRDLGLDIKRYSPRLLANAISNLKNELIDPHQALAGLTEDSDDLARAVASVYDEYQRRLRAANALDFDDLIGETVAVLQAFPQIAQYYRRRFRHVLVDEYQDTNHAQYVLVRELVGRDSNDGIPPGELCVVGDADQSIYAFRGATIRNIEDFERDYPDTRTILLEQNYRSTQNILSAANSVIARNAGRREKRLWTDAGAGELIVGYVADNEHDEARFVAEEIDALAEGSEITYNDVAVFYRTNNSSRSLEEVLIRAGIPYKVVGGVRFYERKEIRDIVAYLRVLDNPGDAVSLRRILNTPRRGIGDRAEACVAVYAENTGVGFGDALVAAAQGKVPMLNTRAEKAIAGFVEMFDELRGRLDDDLGELVEAVLERTGYRRELEASTDPQELARLDNLNELVSVAHEFSTDRENAAALGPDDEDVPDTGVLADFLERVSLVADADEIPEHGAGVVTLMTLHTAKGLEFPVVFVTGWEDGMFPHMRALDNPTELSEERRLAYVGITRARQRLYVSRAIVRSSWGQPMLNPESRFLREIPQELIDWRRTAPKPSFSAPVSGAGRFGSARPSPTRSGASRRPLLVLQVGDRVTHDKYGLGRVEEVSGVGESAMSLIDFGSSGRVKLMHNHAPVTKL

SEQ ID NO: 62528 - protein, 553 aa, Mycobacterium bovis
MTSAPIPDITATPAWDALRRHHDQIGNTHLRQFFADDPGRGRELTVSVGDLYIDYSKHRVTRETLALLIDLARTAHLEERRDQMFAGVHINTSEDRAVLHTALRLPRDAELVVDGQDVVTDVHAVLDAMGAFTDRLRSGEWTGATGKRISTVVNIGIGGSDLGPVMVYQALRHYADAGISARFVSNVDPADLIATLADLDPATTLFIVASKTFSTLETLTNATAARRWLTDALGDAAVSRHFVAVSTNKRLVDDFGINTDNMFGFWDWVGGRYSVDSAIGLSLMTVIGRDAFADFLAGFHIIDRHFATAPLESNAPVLLGLIGLWYSNFFGAQSRTVLPYSNDLSRFPAYLQQLTMESNGKSTRADGSPVSADTGEIFWGEPGTNGQHAFYQLLHQGTRLVPADFIGFAQPLDDLPTAEGTGSMHDLLMSNFFAQTQVLAFGKTAEEIAADGTPAHVVAHKVMPGNRPSTSILASRLTPSVLGQLIALYEHQVFTEGVVWGIDSFDQWGVELGKTQAKALLPVITGAGSPPPQSDSSTDGLVRRYRTERGRAG

SEQ ID NO: 62529 - protein, 291 aa, Mycobacterium bovis
MTWPLPDRLSINSLSGTPAVDLSSFTDFLRRQAPELLPASISGGAPLAGGDAQLPHGTTIVALKYPGGVVMAGDRRSTQGNMISGRDVRKVYITDDYTATGIAGTAAVAVEFARLYAVELEHYEKLEGVPLTFAGKINRLAIMVRGNLAAAMQGLLALPLLAGYDIHASDPQSAGRIVSFDAAGGWNIEEEGYQAVGSGSLFAKSSMKKLYSQVTDGDSGLRVAVEALYDAADDDSATGGPDLVRGIFPTAVIIDADGAVDVPESRIAELARAIIESRSGADTFGSDGGEK

SEQ ID NO: 62530 - protein, 284 aa, Mycobacterium bovis
MLRVAVPNKGALSEPATEILAEAGYRRRTDSKDLTVIDPVNNVEFFFLRPKDIAIYVGSGELDFGITGRDLVCDSGAQVRERLALGFGSSSFRYAAPAGRNWTTADLAGMRIATAYPNLVRKDLATKGIEATVIRLDGAVEISVQLGVADAIADVVGSGRTLSQHDLVAFGEPLCDSEAVLIERAGTDGQDQTEARDQLVARVQGVVFGQQYLMLDYDCPRSALKKATAITPGLESPTIAPLADPDWVAIRALVPRRDVNGIMDELAAIGAKAILASDIRFCRF

SEQ ID NO: 62531 - protein, 1192 aa, Mycobacterium bovis
MTAADKHLYDTDLLDVLSQRVMVGDGAMGTQLQAADLTLDDFRGLEGCNEILNETRPDVLETIHRNYFEAGADAVETNTFGCNLSNLGDYDIADRIRDLSQKGTAIARRVADELGSPDRKRYVLGSMGPGTKLPTLGHTEYAVIRDAYTEAALGMLDGGADAILVETCQDLLQLKAAVLGSRRAMTRAGRHIPVFAHVTVETTGTMLLGSEIGAALTAVEPLGVDMIGLNCATGPAEMSEHLRHLSRHARIPVSVMPNAGLPVLGAKGAEYPLLPDELAEALAGFIAEFGLSLVGGCCGTTPAHIREVAAAVANIKRPERQVSYEPSVSSLYTAIPFAQDASVLVIGERTNANGSKGFREAMIAEDYQKCLDIAKDQTRDGAHLLDLCVDYVGRDGVPNMKALASRLATSWTLPIMLDSTETAVLQAGLKHLGGRCAINSVNYEDGDGPESRFAKTMALVAEHGAAVVALTIDEEGQARTAQKKVEIAERLINDITGNWGVDESSILIDTLTFTIATGQEESRRDGIETIEAIRELKKRHPDVQTTLGLSNISFGLNPAARQVLNSVFLHECQEAGLDSAIVHASKILPMNRIPEEQRNVALDLVYDRRREDYDPLQELMRLFEGVSAASSKEDRLAELAGLPLFERLAQRIVDGERNGLDADLDEAMTQKPPLQIINEHLLAGMKTVGELFGSGQMQLPFVLQSAEVMKAAVAYLEPHMERSDDDSGKGRIVLATVKGDVHDIGKNLVDIVLSNNGYEVVNIGIKQPIATILEVAEDKSADVVGMSGLLVKSTVVMKENLEEMNTRGVAEKFPVLLGGAALTRSYVENDLAEIYQGEVHYARDAFEGLKLMDTIMSAKRGEAPDENSPEAIKAREKEAERKARHQRSKRIAAQRKAAEEPVEVPERSDVAADIEVPAPPFWGSRIVKGLAVADYTGLLDERALFLGQWGLRGQRGGEGPSYEDLVETEGRPRLRYWLDRLSTDGILAHAAVVYGYFPAVSEGNDIVVLTEPKPDAPVRYRFHFPRQQRGRFLCIADFIRSRELAAERGEVDVLPFQLVTMGQPIADFANELFASNAYRDYLEVHGIGVQLTEALAEYWHRRIREELKFSGDRAMAAEDPEAKEDYFKLGYRGARFAFGYGACPDLEDRAKMMALLEPERIGVTLSEELQLHPEQSTDAFVLHHPEAKYFNV

SEQ ID NO: 62532 - protein, 577 aa, Mycobacterium bovis
MARLSRERYAQLYGPTTGDRIRLADTNLLVEVTEDRCGGPGLAGDEAVFGGGKVLRESMGQGRASRADGAPDTVITGAVIIDYWGIIKADIGIRDGRIVGIGKAGNPDIMTGVHRDLVVGPSTEIISGNRRIVTAGTVDCHVHLICPQIIVEALAAGTTTIIGGGTGPAEGTKATTVTPGEWHLARMLESLDGWPVNFALLGKGNTVNPDALWEQLRGGASGFKLHEDWGSTPAAIDTCLAVADVAGVQVALHSDTLNETGFVEDTIGAIAGRSIHAYHTEGAGGGHAPDIITVAAQPNVLPSSTNPTRPHTVNTLDEHLDMLMVCHHLNPRIPEDLAFAESRIRPSTIAAEDVLHDMGAISMIGSDSQAMGRVGEVVLRTWQTAHVMKARRGALEGDPSGSQAADNNRVRRYIAKYTICPAIAHGMDHLIGSVEVGKLADLVLWEPAFFGVRPHVVLKGGAIAWAAMGDANASIPTPQPVLPRPMFGAAAATAAATSVHFVAPQSIDARLADRLAVNRGLAPVADVRAVGKTDLPLNDALPSIEVDPDTFTVRIDGQVWQPQPAAELPMTQRYFLF

SEQ ID NO: 62533 - protein, 211 aa, Mycobacterium bovis
MTSLAVLLTLADSRLPTGAHVHSGGIEEAIAAGLVTGLATLEAFLKRRVRTHGLLTASIAAAVHRGELAVDDADRETDARTPAPAARHASRSQGRGLIRLARRVWPDSGWEELGPRPHLAVVAGRVGALSGLAPEHNALHLVYITMTGSAIAAQRLLALDPAEVTVVTFQLSELCEQIAQEATAGLADLSDPLLDTLAQRHDERVRPLFVS

SEQ ID NO: 62534 - protein, 101 aa, Mycobacterium bovis
MDITATTEFSAMNLDGKTGIGWLGYIVIGGIAGWLASKIVKGGGSGILMNVVIGVVGAFGAGLVLNALGVDVNHGGYWFTFFVALGGAVVLLWIVGMVRKT

SEQ ID NO: 62535 - protein, 224 aa, Mycobacterium bovis
MATHSHPHSHTVPARPRRVRKPGEPLRIGVGGPVGSGKTALVAALCRQLRGELSLAVLTNDIYTTEDADFLRTHAVLPDDRIAAVQTGGCPHTAIRDDITANLDAIDELMAAHDALDLILVESGGDNLTATFSSGLVDAQIFVIDVAGGDKVPRKGGPGVTYSDLLVVNKTDLAALVGADLAVMARDADAVRDGRPTVLQSLTEDPAASDVVAWVRSQLAADGV

SEQ ID NO: 62536 - protein, 405 aa, Mycobacterium bovis
MRDLAPLLQFNRPQFDTSKRRLGAALTIQDLRRIAKRRTPRAAFDYADGAAEDELSIARARQGFRDIEFHPTILRDVTTVCAGWNVLGQPTVLPFGIAPTGFTRLMHTEGEIAGARAAAAAGIPFSLSTLATCAIEDLVIAVPQGRKWFQLYMWRDRDRSMALVRRAAAAGFDTMLVTVDVPVAGARLRDVRNGMSIPPALTLRTVLDAMGHPRWWFDLLTTEPLAFASLDRWPGTVGEYLNTVFDPSLTFDDLAWIKSQWPGKLVVKGIQTLDDARAVVDRGVDGIVLSNHGGRQLDRAPVPFHLLPHVARELGKHTEILVDTGIMSGADIVAAIALGARCTLIGRAYLYGLMAGGEAGVNRAIEILQTGVIRTMRLLGVTCLEELSPRHVTQLRRLGPIGAPT

SEQ ID NO: 62537 - protein, 349 aa, Mycobacterium bovis
MDVLSAVLLALLLIGANAFFVGAEFALISARRDRLEALAEQGKATAVTVIRAGEQLPAMLTGAQLGVTVSSILLGRVGEPAVVKLLQLSFGLSGVPPALLHTLSLAVALAIVVALHVLLGEMVPKNIALAGPERTAMLLVPPYLVYVRLARPFIAFYNNCANAILRLVGVQPKDELDIAVSTAELSEMIAESLSEGLLDHEEHTRLTRALRIRTRLVADVAVPLVNIRAVQVSAVGSGPTIGGVEQALAQTGYSRFPVVDRGGRFIGYLHIKDVLTLGDNPQTVIDLAVVRPLPRVPQSLPLADALSRMRRINSHLALVTADNGSVVGMVALEDVVEDLVGTMRDGTHR

SEQ ID NO: 62538 - protein, 439 aa, Mycobacterium bovis
IAQIGVTGLAVMGSNIARNFARHGYTVAVHNRSVAKTDALLKEHSSDGKFVRSETIPEFLAALEKPRRVLIMVKAGEATDAVINELADAMEPGDIIIDGGNALYTDTMRREKAMRERGLHFVGAGISGGEEGALNGPSIMPGGPAESYQSLGPLLEEISAHVDGVPCCTHIGPDGSGHFVKMVHNGIEYSDMQLIGEAYQLMRDGLGLTAPAIADVFTEWNNGDLDSYLVEITAEVLRQTDAKTGKPLVDVIVDRAEQKGTGRWTVKSALDLGVPVTGIAEAVFARALSGSVGQRSAASGLASGKLGEQPADPATFTEDVRQALYASKIVAYAQGFNQIQAGSAEFGWDITPGDLATIWRGGCIIRAKFLNHIKEAFDASPNLASLIVAPYFRAAVESAIDSWRRVVSTAAQLGIPTPGFSSALSYYDALRTARLPAAL

SEQ ID NO: 62539 - protein, 100 aa, Mycobacterium bovis
MRLTPHEQERLLLSYAAELARRRRARGLRLNHPEAIAVIADHILEGARDGRTVAELMASGREVLGRDDVMEGVPEMLAEVQVEATFPDGTKLVTVHQPIA

SEQ ID NO: 62540 - protein, 334 aa, Mycobacterium bovis
MAGIASTVAVMGAGAWGTALAKVLADAGGEVTLWARRAEVADQINTTRYNPDYLPGALLPPSIHATADAEEALGGASTVLLGVPAQTMRANLERWAPLLPEGATLVSLAKGIELGTLMRMSQVIISVTGAEPAQVAVISGPNLASEIAECQPAATVVACSDSGRAVALQRALNSGYFRPYTNADVVGTEIGGACKNIIALACGMAVGIGLGENTAAAIITRGLAEIIRLGTALGANGATLAGLAGVGDLVATCTSPRSRNRSFGERLGRGETLQSAGKACHVVEGVTSCESVLALASSYDVEMPLTDAVHRVCHKGLSVDEAITLLLGRRTKPE

SEQ ID NO: 62541 - protein, 358 aa, Mycobacterium bovis
MFGGRSNEHAISCVSAGSILRNLDSRRFDVIAVGITPAGSWVLTDANPDALTITNRELPQVKSGSGTELALPADPRRGGQLVSLPPGAGEVLESVDVVFPVLHGPYGEDGTIQGLLELAGVPYVGAGVLASAVGMDKEFTKKLLAADGLPVGAYAVLRPPRSTLHRQECERLGLPVFVKPARGGSSIGVSRVSSWDQLPAAVARARRHDPKVIVEAAISGRELECGVLEMPDGTLEASTLGEIRVAGVRGREDSFYDFATKYLDDAAELDVPAKVDDQVAEAIRQLAIRAFAAIDCRGLARVDFFLTDDGPVINEINTMPGFTTISMYPRMWAASGVDYPTLLATMIETALARGVGLH

SEQ ID NO: 62542 - protein, 310 aa, Mycobacterium bovis
MGKGSMTAHATPNEPDYPPPPGGPPPPADIGRLLLRCHDRPGIIAAVSTFLARAGANIISLDQHSTAPEGGTFLQRAIFHLPGLTAAVDELQRDFGSTVADKFGIDYRFAEAAKPKRVAIMASTEDHCLLDLLWRNRRGELEMSVVMVIANHPDLAAHVRPFGVPFIHIPATRDTRTEAEQRQLQLLSGNVDLVVLARYMQILSPGFLEAIGCPLINIHHSFLPAFTGAAPYQRARERGVKLIGATAHYVTEVLDEGPIIEQDVVRVDHTHTVDDLVRVGADVERAVLSRAVLWHCQDRVIVHHNQTIVF

SEQ ID NO: 62543 - protein, 191 aa, Mycobacterium bovis
MYESKEVAAQVTGESDGPPRAVLIAAAALAAAVIGVILVVAANRQPPERPVVIPAVPAPQATGPGCKALLAALPQRLGEYRRAPVAEPTTAGATAWRTGPNSTPVILRCGLDRPAEFVVGSAIQVVDRVQWFQVAAQNPDEPGRSTWYTVDRPVYVALTLPSGSGPTAIQELSDVIDHTIPAVPIDPAPAR

SEQ ID NO: 62544 - protein, 333 aa, Mycobacterium bovis
MTTKDHSLATESPTLQQLGEFAVIDRLVRGRRQPATVLLGPGDDAALVSAGDGRTVVSTDMLVQDSHFRLDWSTPQDVGRKAIAQNAADIEAMGARATAFVVGFGAPAETPAAQASALVDGMWEEAGRIGAGIVGGDLVSCRQWVVSVTAIGDLDGRAPVLRSGAKAGSVLAVVGELGRSAAGYALWCNGIEDFAELRRRHLVPQPPYGHGAAAAAVGAQAMIDVSDGLLADLRHIAEASGVRIDLSAAALAADRDALTAAATALGTDPWPWVLSGGEDHALVACFVGPVPAGWRTIGRVLDGPARVLVDGEEWTGYAGWQSFGEPDNQGSLG

SEQ ID NO: 62545 - protein, 256 aa, Mycobacterium bovis
MAAPMFSIIIPTLNVAAVLPACLDSIARQTCGDFELVLVDGGSTDETLDIANIFAPNLGERLIIHRDTDQGVYDAMNRGVDLATGTWLLFLGADDSLYEADTLARVAAFIGEHEPSDLVYGDVIMRSTNFRWGGAFDLDRLLFKRNICHQAIFYRRGLFGTIGPYNLRYRVLADWDFNIRCFSNPALVTRYMHVVVASYNEFGGLSNTIVDKEFLKRLPMSTRLGIRLVIVLVRRWPKVISRAMVMRTVISWRRRR

SEQ ID NO: 62546 - protein, 473 aa, Mycobacterium bovis
MALQTGEPRTLAEKIWDDHIVVSGGGCAPDLIYIDLHLVHEVTSPQAFDGLRLAGRRVRRPELTLATEDHNVPTVDIDQPIADPVSRTQVETLRRNCAEFGIRLHSMGDIEQGIVHVVGPQLGLTQPGMTIVCGDSHTSTHGAFGALAMGIGTSEVEHVLATQTLPLRPFKTMAVNVDGRLPDGVSAKDIILALIAKIGTGGGQGHVIEYRGSAIESLSMEGRMTICNMSIEAGARAGMVAPDETTYAFLRGRPHAPTGAQWDTALVYWQRLRTDVGAVFDTEVYLDAASLSPFVTWGTNPGQGVPLAAAVPDPQLMTDDAERQAAEKALAYMDLRPGTAMREIAVDAVFVGSCTNGRIEDLRVVAEVLRGRKVADGVRMLIVPGSMRVRAQAEAEGLGEIFTDAGAQWRQAGCSMCLGMNPDQLASGERCAATSNRNFEGRQGAGGRTHLVSPAVAAATAVRGTLSSPADLN

SEQ ID NO: 62547 - protein, 214 aa, Mycobacterium bovis
MNKAELIDVLTQKLGSDRRQATAAVENVVDTIVRAVHKGDSVTITGFGVFEQRRRAARVARNPRTGETVKVKPTSVPAFRPGAQFKAVVSGAQRLPAEGPAVKRGVGASAAKKVAKKAPAKKATKAAKKAATKAPARKAATKAPAKKAATKAPAKKAVKATKSPAKKVTKAVKKTAVKASVRKAATKAPAKKAAAKRPATKAPAKKATARRGRK

SEQ ID NO: 62548 - protein, 1721 aa, Mycobacterium bovis
MLAAAAAWDGLADELAVAASWFGSVTSGLADAAWRGPAAVAMARAVAPYLGWLISATAQAEQAAAQARVAVATFEAARAATVHPAIVAANRAVLVSLVSSNLLGFNAPAIAATEAAYERMWAQDVAAMVGYHAGASAAVSALMPFTQQLKKLAGLSERLTSAAAAAAGPPSAAGFNLGLANVGANNVGNGNVGVFNVGFGNLGSYNLGFANLGSDNLGLANLGGHNIGFANTGSNNVGFGNTGSNNVGIGLTGNGQIGFGSFNSGSHNIGLFNSGSGNVGLFNSGTGNFGIGNSGTGNFGLGNTGSTNTGWFNTGDVNTGGFNPGSYNTGNFNTGNYNTGSFNAGNYNTGYFNTGDYNTGVANTGNVNTGAFIAGNYSNGVLWRGDYQGLIGADIALEIPAIPINAQLFSMPIHQVMVMPGSVMTIPGMRLPFTSIVPFVVYYGPVELPQSTLTLPTVTITVGGPTTTIDGNLTGMVGGVSIPLIKIPAAPGFGNSTTSPSSGFFNAGAGTASGFGNFGGGASGFWNLASATSGLSGFGNVGALGSGVANVGNTISGLYNTSTSNLATPAFNSGLLHHSVGTMTLNFGLANVGGNNVGGANAGIFNVGLANLGDYNIGFGNLGGDNLGFAHAGSYNIGFANTGSNNLGFANTGDNNIGFANIGSNNIGIGLTGSGQIGFGSLNSGSHNIGLFNSGDGNIGLFNSGSGNFGIGNAGTGNWGIGNSGAGNFGIGNAGSTNTGLFNSGDLNTGSLNPGSYNTGSVNTGSVNTGGFNAGNYNTGYFNTGDYNTGMANTGNINTGAFISGNHSNGLLWRGDNQGLIDLAIGVDIPEIPIVSVDVNIPIHIPITASFTDIVYSGLDLPPNTAVTVIFFGPVDIDPFTVPVIRITGPTPVVMVGGPTTAINIGATVGVDAINIPIIHIPATPGFGNSTGGLSSGFFNSGAGSASGFGNFGGAASGFMNLVSTTSGMSGFLNVGALGSGVANVGNTISGIYNVGTSDLSTPAVNSGLANIGTNIAGLLRDGAGTAAINLGLANHGNLNVGFASLGGFNFGGATIGHNNVGIGNTGIFDVGLANLGSYNIGFGNLGDDNLGFGNFGSYNIGFGNVGNDNLGFANAGGGNIGFANTGSNNVGFGNTGSNNVGIGLTGNGQIGFGSFNSGSGNIGLFNSGSNNIGFFNSGSGNFGIANSGSFNTGIGNTGNTNTGLFNSGDVNTGAFNPGSFNTGSFNTGSFNTGGFNPGNTNTGYLNIGNYNTGIANTGDVDTGAFITGNYSNGLFLSGDYQGLVGLNLVIDMPLPISLGVNIPIDIPITASAGNITLMGVTIPPTGDIVLSSIAGQRAHFGPITIPNITVVGPTTTVAIGGPNTAITITGGGAIRIPLISIPAAPGFGNSTTNPSSGFFNTGAGGASGFGNFGGANSGFWNLASATSGASGLLNVGALGSGLANVGTTVSGFYNTSTSDLATPAFNSGLANISTSIAGLLRDSTGTMVLNLGLANHGTLNVGIANLGDYNIGFANLGSANFGSANIGGNNIGGANTGIFDIGLANLGSYNIGFGNFGDDNLGFGNLGSYNVGFGNLGNDNLGFANTGSNNIGFANTGSNNIGIGLTGDGQIGFGSLNSGSGNIGLFNSGSGNIGFFNSGNGNVGIGNTGTANFGLGNTGSTNTGFFNSGDVNTGIGNTGSFNTGSFNPGDSNTGDFNPGSYNTGLGNTGDVDTGAFISGS

SEQ ID NO: 62549 - protein, 226 aa, Mycobacterium bovis
MAGQSDRKAALLDQVARVGKALANGRRLQILDLLAQGERAVEAIATATGMNLTTASANLQALKSGGLVEARREGTRQYYRIAGEDVARLFALVQVVADEHLADVAVAAADVLGSPEDAITRAELLRRREAGEVTLVDVRPHEEYQAGHIPGAINIPIAELADRLAELAGDRDIVAYCRGAYCVMAPDAVRIARDAGREVKRLDDGMLEWRLAGLPVDEGAPVGHGD

SEQ ID NO: 62550 - protein, 425 aa, Mycobacterium bovis
MAQLGHEVVGVDIDPGKVAKLAGGDIPFYEPGLRKLLTDNLAAGRLRFTTDYDMAADFADVHFLGVGTPQKIGEYGADLRHVHAVIDALVPRLVRASILVGKSTVPVGTAAELGHRAGALAPRGVDVEIAWNPEFLREGFAVHDTLNPDRIVLGVQDDSTRAEVAVRELYAPLLAAGVPFLVTDLQTAELVKVSANAFLATKISFINAISEVCEAAGADVSQLADALGYDPRIGRQCLNAGLGFGGGCLPKDIRAFMARAGELGADQALTFLREVDSINMRRRTKMVELATTACGGSLLGANIAVLGAAFKPESDDVRDSPALNVAGQLQLNGATVHVYDPKALDNAHRLFPTLNYAVSVAEACERADAVLVLTEWREFIDLEPADLANRVRARVIVDGRNCLDVTRWRRAGWRVFRLGVPRLGH

SEQ ID NO: 62551 - protein, 255 aa, Mycobacterium bovis
MAVTVGVICAIPQELAYLRGVLVDAKRQQVAQILFDSGQLDAHRVVLAAAGMGKVNTGLTATLLADRFGCRTIVFTGVAGGLDPELCIGDIVIADRVVQHDFGLLTDERLRPYQPGHIPFIEPTERLGYPVDPAVIDRVKHRLDGFTLAPLSTAAGGGGRQPRIYYGTILTGDQYLHCERTRNRLHHELGGMAVEMEGGAVAQICASFDIPWLVIRALSDLAGADSGVDFNRFVGEVAASSARVLLRLLPVLTAC

SEQ ID NO: 62552 - protein, 457 aa, Mycobacterium bovis
MTPRSRGPRRRPLDPARRAAFETLRAVSARDAYANLVLPALLAQRGIGGRDAAFATELTYGTCRARGLLDAVIGAAAERSPQAIDPVLLDLLRLGTYQLLRTRVDAHAAVSTTVEQAGIEFDSARAGFVNGVLRTIAGRDERSWVGELAPDAQNDPIGHAAFVHAHPRWIAQAFADALGAAVGELEAVLASDDERPAVHLAARPGVLTAGELARAVRGTVGRYSPFAVYLPRGDPGRLAPVRDGQALVQDEGSQLVARALTLAPVDGDTGRWLDLCAGPGGKTALLAGLGLQCAARVTAVEPSPHRADLVAQNTRGLPVELLRVDGRHTDLDPGFDRVLVDAPCTGLGALRRRPEARWRRQPADVAALAKLQRELLSAAIALTRPGGVVLYATCSPHLAETVGAVADALRRHPVHALDTRPLFEPVLAGLGEGPHVQLWPHRHGTDAMFAAALRRLT

SEQ ID NO: 62553 - protein, 160 aa, Mycobacterium bovis
MKGGAGVPDLPSLDASGVRLAIVASSWHGKICDALLDGARKVAAGCGLDDPTVVRVLGAIEIPVVAQELARNHDAVVALGVVIRGQTPHFDYVCDAVTQGLTRVSLDSSTPIANGVLTTNTEEQALDRAGLPTSAEDKGAQATVAALATALTLRELRAHS

SEQ ID NO: 62554 - protein, 425 aa, Mycobacterium bovis
MTRLDSVERAVADIAAGKAVIVIDDEDRENEGDLIFAAEKATPEMVAFMVRYTSGYLCVPLDGAICDRLGLLPMYAVNQDKHGTAYTVTVDARNGIGTGISASDRATTMRLLADPTSVADDFTRPGHVVPLRAKDGGVLRRPGHTEAAVDLARMAGLQPAGAICEIVSQKDEGSMAHTDELRVFADEHGLALITIADLIEWRRKHEKHIERVAEARIPTRHGEFRAIGYTSIYEDVEHVALVRGEIAGPNADGDDVLVRVHSECLTGDVFGSRRCDCGPQLDAALAMVAREGRGVVLYMRGHEGRGIGLMHKLQAYQLQDAGADTVDANLKLGLPADARDYGIGAQILVDLGVRSMRLLTNNPAKRVGLDGYGLHIIERVPLPVRANAENIRYLMTKRDKLGHDLAGLDDFHESVHLPGEFGGAL

SEQ ID NO: 62555 - protein, 325 aa, Mycobacterium bovis
MTTDVKDELSRLVVKSVSARRAEVTSLLRFAGGLHIVGGRVVVEAELDLGSIARRLRKEIFELYGYTAVVHVLSASGIRKSTRYVLRVANDGEALARQTGLLDMRGRPVRGLPAQVVGGSIDDAEAAWRGAFLAHGSLTEPGRSSALEVSCPGPEAALALVGAARRLGVGAKAREVRGADRVVVRDGEAIGALLTRMGAQDTRLVWEERRLRREVRATANRLANFDDANLRRSARAAVAAAARVERALEILGDTVPEHLASAGKLRVEHRQASLEELGRLADPPMTKDAVAGRIRRLLSMADRKAKVDGIPDTESVVTPDLLEDA

SEQ ID NO: 62556 - protein, 342 aa, Mycobacterium bovis
MTDGIVALGGGHGLYATLSAARRLTPYVTAVVTVADDGGSSGRLRSELDVVPPGDLRMALAALASDSPHGRLWATILQHRFGGSGVLAGHPIGNLMLAGLSEVLADPVAALDELGRILGVKGRVLPMCPVALQIEADVSGLEADPRMFRLIRGQVAIATTPGKVRRVRLLPTDPPATRQAVDAIMAADLVVLGPGSWFTSVIPHVLVPGLAAALRATSARRALVLNLVAEPGETAGFSVERHLHVLAQHAPGFTVHDIIIDAERVPSEREREQLRRTATMLQAEVHFADVARPGTPLHDPGKLAAVLDGVCARDVGASEPPVAATQEIPIDGGRPRGDDAWR

SEQ ID NO: 62557 - protein, 201 aa, Mycobacterium bovis
MFTGIVEERGEVTGREALVDAARLTIRGPMVTADAGHGDSIAVNGVCLTVVDVLPDGQFTADVMAETLNRSNLGELRPGSRVNLERAAALGSRLGGHIVQGHVDATGEIVARCPSEHWEVVRIEMPASVARYVVEKGSITVDGISLTVSGLGAEQRDWFEVSLIPTTRELTTLGSAAVGTRVNLEVDVVAKYVERLMRSAG

SEQ ID NO: 62558 - protein, 301 aa, Mycobacterium bovis
MMNHARGVENRSEGGGIDVVLVTGLSGAGRGTAAKVLEDLGWYVADNLPPQLITRMVDFGLAAGSRITQLAVVMDVRSRGFTGDLDSVRNELATRAITPRVVFMEASDDTLVRRYEQNRRSHPLQGEQTLAEGIAAERRMLAPVRATADLIIDTSTLSVGGLRDSIERAFGGDGGATTSVTVESFGFKYGLPMDADMVMDVRFLPNPHWVDELRPLTGQHPAVRDYVLHRPGAAEFLESYHRLLSLVVDGYRREGKRYMTIAIGCTGGKHRSVAIAEALMGLLRSDQQLSVRALHRDLGRE

SEQ ID NO: 62559 - protein, 339 aa, Mycobacterium bovis
MNVEQVKSIDEAMGLAIEHSYQVKGTTYPNPPVGAVIVDPNGRIVGAGGTEPAGGDHAEVVALRRAGGLATGAIVVVTMEPCNHYGKTPPCVNALIEARVGTVVYAVADPNGIAGGGAGRLSAAGLQVRSGVLAEQVAAGPLREWLHKQRTGLPHVTWKYATSIDGRSAAADGSSQWISSEAARLDLHRRRAIADAILVGTGTVLADDPALTARLADGSLAPQQPLRVVVGKRDIPPEARVLNDEARTMMIRTHEPMEVLRALSDRTDVLLEGGPTLAGAFLRAGAINRILAYVAPILLGGPVTAVDDVGVSNITNALRWQFDSVEKVGPDLLLSLVAR

SEQ ID NO: 62560 - protein, 656 aa, Mycobacterium bovis
VSGRGVLVRSDLNVPLDEDGTITDAGRIIASAPTLKALLDADAKVVVAAHLGRPKDGPDPTLSLAPVAVALGEQLGRHVQLAGDVVGADALARAEGLTGGDILLLENIRFDKRETSKNDDDRRALAKQLVELVGTGGVFVSDGFGVVHRKQASVYDIATLLPHYAGTLVADEMRVLEQLTSSTQRPYAVVLGGSKVSDKLGVIESLATKADSIVIGGGMCFTFLAAQGFSVGTSLLEDDMIEVCRGLLETYHDVLRLPVDLVVTEKFAADSPPQTVDVGAVPNGLMGLDIGPGSIKRFSTLLSNAGTIFWNGPMGVFEFPAYAAGTRGVAEAIVAATGKGAFSVVGGGDSAAAVRAMNIPEGAFSHISTGGGASLEYLEGKTLPGIEVLSREQANRRSFVSRKPLIAGNWKMNLNHYEAIALVQKIAFSLPDKYYDRVDVAVIPPFTDLRSVQTLVDGDKLRLTYGAQDLSPHDSGAYTGDVSGAFLAKLGCSYVVVGHSERRTYHNEDDALVAAKAATALKHGLTPIVCIGEHLDVREAGNHVAHNIEQLRGSLAGLLAEQIGSVVIAYEPVWAIGTGRVASAADAQEVCAAIRKELASLASPRIADTVRVLYGGSVNAKNVGDIVAQDDVDGGLVGGASLDGEHFATLAAIAAG

SEQ ID NO: 62561 - protein, 339 aa, Mycobacterium bovis
MTVRVGINGFGRIGRNFYRALLAQQEQGTADVEVVAANDITDNSTLAHLLKFDSILGRLPCDVGLEGDDTIVVGRAKIKALAVREGPAALPWGDLGVDVVVESTGLFTNAAKAKGHLDAGAKKVIISAPATDEDITIVLGVNDDKYDGSQNIISNASCTTNCLAPLAKVLDDEFGIVKGLMTTIHAYTQDQNLQDGPHKDLRRARAAALNIVPTSTGAAKAIGLVMPQLKGKLDGYALRVPIPTGSVTDLTVDLSTRASVDEINAAFKAAAEGRLKGILKYYDAPIVSSDIVTDPHSSIFDSGLTKVIDDQAKVVSWYDNEWGYSNRLVDLVTLVGKSL

SEQ ID NO: 62562 - protein, 432 aa, Mycobacterium bovis
MPAIVLIGAQWGDEGKGKATDLLGGRVQWVVRYQGGNNAGHTVVLPTGENFALHLIPSGVLTPGVTNVIGNGVVIDPGVLLNELRGLQDRGVDTAKLLISADAHLLMPYHIAIDKVTERYMGSKKIGTTGRGIGPCYQDKIARIGIRVADVLDPEQLTHKVEAACEFKNQVLVKIYNRKALDPAQVVDALLEQAEGFKHRIADTRLLLNAALEAGETVLLEGSQGTLLDVDHGTYPYVTSSNPTAGGAAVGSGIGPTRIGTVLGILKAYTTRVGSGPFPTELFDEHGEYLSKTGREFGVTTGRRRRCGWFDAVIARYAARVNGITDYFLTKLDVLSSLESVPVCVGYEIDGRRTRDMPMTQRDLCRAKPVYEELPGWWEDISGAREFDDLPAKARDYVLRLEQLAGAPVSCIGVGPGREQTIVRRDVLQDRP

SEQ ID NO: 62563 - protein, 625 aa, Mycobacterium bovis
MARAVGIDLGTTNSVVSVLEGGDPVVVANSEGSRTTPSIVAFARNGEVLVGQPAKNQAVTNVDRTVRSVKRHMGSDWSIEIDGKKYTAPEISARILMKLKRDAEAYLGEDITDAVITTPAYFNDAQRQATKDAGQIAGLNVLRIVNEPTAAALAYGLDKGEKEQRILVFDLGGGTFDVSLLEIGEGVVEVRATSGDNHLGGDDWDQRVVDWLVDKFKGTSGIDLTKDKMAMQRLREAAEKAKIELSSSQSTSINLPYITVDADKNPLFLDEQLTRAEFQRITQDLLDRTRKPFQSVIADTGISVSEIDHVVLVGGSTRMPAVTDLVKELTGGKEPNKGVNPDEVVAVGAALQAGVLKGEVKDVLLLDVTPLSLGIETKGGVMTRLIERNTTIPTKRSETFTTADDNQPSVQIQVYQGEREIAAHNKLLGSFELTGIPPAPRGIPQIEVTFDIDANGIVHVTAKDKGTGKENTIRIQEGSGLSKEDIDRMIKDAEAHAEEDRKRREEADVRNQAETLVYQTEKFVKEQREAEGGSKVPEDTLNKVDAAVAEAKAALGGSDISAIKSAMEKLGQESQALGQAIYEAAQAASQATGAAHPGGEPGGAHPGSADDVVDAEVVDDGREAK

SEQ ID NO: 62564 - protein, 460 aa, Mycobacterium bovis
MSIRPAENSTLDIRHVIGIGTPKAVDLWLDVVTELPDRARELGSLSKAELGKLGPLLDGTNAVELFESIDDKLAAEALHAMDPSLAATFLEALDSDHAANILREFKEPKREALLTLLPLERAMVLRGLLSWPEDCAAAHMVPETLTVRPNMTVSQAVASVRERASGLRSDARTTAYVYVTDADSHLLGVIAFRALVLANPEQRVRELMGDDLIVVSPLTDKELAAQTIMGHNLMAVPVVDADNRLLGIIAEDEAIDIAEEEATEDAERQGGSAPLEVPYLRASPWLLWRKRAVWLLVLFAAEAYTGSVLRAFSDEMEAVIALAFFIPLLIGTGGNTGTQIATTLVRAMATGQVRFRDVPAVLAKELSTGVLVGLTMAAAAVVRAWTLGVGPQVTLTVALTVAAIVVWSSLVAAVLPPLLKKLRIDPAIVSGPMIATIVDGTGLLIYFLVAHLTLTELHGL

SEQ ID NO: 62565 - protein, 344 aa, Mycobacterium bovis [sequence omitted]

SEQ ID NO: 62566 - protein, 795 aa, Mycobacterium bovis
MSMTAVVGVFALRRVWWLYKLVMSGQPASGRTDNLGTRIWTQISEVLGQRRLLKWSIPGLAHFFTMWGFFILLTVYIEAYGLLFEERFHIPVIGRWDALGFLQDFFATAVFLGITTFAIIRILRNPREIGRSSRFYGSHNGGAWLVLLMIFNVIWTYVLVRGSAVNNGTLPYGNGAFLSQLFGAILRPLGQPANEIIETTALLLHIGVMLAFLILVLHSKHLHIFLAPINVTFKRLPDGLGPLLPLEADGKPIDFENPSEDAVFGRGKIEDFTWKGMLDFATCTECGRCQSQCPAWNTGKPLSPKLVIMDLRDHWMAKAPYILGQKDASAGGEAGHQEHHHVPESGFGRVPGHGPEQATRPLVGTEEQGGVIDPDVLWSCVTCGACVEQCPVDIEHVDHIVDMRRYQVMMESEFPSELSVLFKNLETKGNPWGQNASDRTNWIDEVDFDVPVYGQDVDSFDGYEYLFWVGCAGAYDDKAKKTTKAVAELLAVAGVKYLVLGAGETCNGDSARRSGNEFLFQQLAQQAVETLDGLFEGVETVDRKIVVTCPHCFNTIGKEYRQLGANYTVLHHTQLLNRLVRDKRLVPVTPVSQDITYHDPCYLGRHNKVYEAPRELIGAAGASLTEMPRHADRSFCCGACGARMWMEEHIGKRINHERVDEALATDATAIATACPFCRVMVTDGVNDRQEEAGRSGVEVLDVAQVLLGSLDHDKAQLPAKGTAAKQAQERAPKAAPKAAAPVTPVEAPAEAPQAPAPAAPAAPVKGLGMAAGAKRPGAKKAGPNARSPCCARRAR

SEQ ID NO: 62567 - protein, 389 aa, Mycobacterium bovis
MTEALIPAPSQISLTRDEVRRYSRHLIIPDIGVNGQQRLKDARVLCIGAGGLGSPALLYLAAAGVGTIGIIDGDHVDESNLQRQIIHGTSDVGRPKVESAAEAVAEINPHVRVTQYREMLTHDNALEIFGDHDLIVDGTDNFTTRYLINDAAVLAGKPYVWGSIYRFNGQTSVFWPGRGPCYRCLHPAPPPPGLVPSCAEGGVLGAICATIASIQVTEVLKLLTGVGTPLVGRLLMYEALDATYHQIRIAKNPDCAICGDAPTITELVDDSVSCASTQSVDPELVISCDELRTKQQSDQNFLLVDVREPAEFDIAHIPGSILIPKGEIGSAAGLAQLPLDKEIVLYCKSGIRSAQALTTLKAAGLHNVKHLDGGIAEWTRTIDSSLLVY

SEQ ID NO: 62568 - protein, 339 aa, Mycobacterium bovis
MTEPAAWDEGKPRIITLTMNPALDITTSVDVVRPTEKMRCGAPRYDPGGGGINVARIVHVLGGCSTALFPAGGSTGSLLMALLGDAGVPFRVIPIAASTRESFTVNESRTAKQYRFVLPGPSLTVAEQEQCLDELRGAAASAAFVVASGSLPPGVAADYYQRVADICRRSSTPLILDTSGGGLQHISSGVFLLKASVRELRECVGSELLTEPEQLAAAHELIDRGRAEVVVVSLGSQGALLATRHASHRFSSIPMTAVSGVGAGDAMVAAITVGLSRGWSLIKSVRLGNAAGAAMLLTPGTAACNRDDVERFFELAAEPTEVGQDQYVWHPIVNPEASP

SEQ ID NO: 62569 - protein, 533 aa, Mycobacterium bovis
  MISC_FEATURE (33)..(33): X=any amino acid
PTTRTAVRTRLTRLVVSIVAGLLLYASFPPRNXWWAAVVALALLAWVLTHRATTPVGGLGYGLLFGLVFYVSLLPWIGELVGPGPWLALATTCALFPGIFGLFAVVVRLLPGWPIWFAVGWAAQEWLKSILPFGGFPWGSVAFGQAEGPLLPLVQLGGVALLSTGVALVGCGLTAIALEIEKWWRTGGQGDAPPAVVLPAACICLVLFAAIVVWPQVRHAGSGSGGEPTVTVAVVQGNVPRLGLDFNAQRRAVLDNHVEETLRLAADVHAGLAQQPQFVIWPENSSDIDPFVNPDAGQRISAAAEAIGAPILIGTLMDVPGRPRENPEWTNTAIVWNPGTGPADRHDKAIVQPFGEYLPMPWLFRHLSGYADRAGHFVPGNGTGVVRIAGVPVGVATCWEVIFDRAPRKSILGGAQLLTVPSNNATFNKTMSEQQLAFAKVRAVEHDRYVVVAGTTGISAVIAPDGGELIRTDFFQPAYLDSQVRLKTRLTPATRWGPILQWILVGAAAAVVLVAMRQNGWSRVRGARSQRAK

SEQ ID NO: 62570 - protein, 162 aa, Mycobacterium bovis
MAVKIKLTRLGKIRNPQYRVAVADARTRRDGRAIEVIGRYHPKEEPSLIEINSERAQYWLSVGAQPTEPVLKLLKITGDWQKFKGLPGAQGRLKVAAPKPSKLEVFNAALAAADGGPTTEATKPKKKSPAKKAAKAAEPAPQPEQPDTPALGGEQAELTAES

SEQ ID NO: 62571 - protein, 80 aa, Mycobacterium bovis
MSAVVVDAVEHLVRGIVDNPDDVRVDLITSRRGRTVEVHVHPDDLGKVIGRGGRTATALRTLVAGIGGRGIRVDVVDTDQ

SEQ ID NO: 62572 - protein, 287 aa, Mycobacterium bovis
MAVVTMKQLLDSGTHFGHQTRRWNPKMKRFIFTDRNGIYIIDLQQTLTFIDKAYEFVKETVAHGGSVLFVGTKKQAQESVAAEATRVGMPYVNQRWLGGMLTNFSTVHKRLQRLKELEAMEQTGGFEGRTKKEILGLTREKNKLERSLGGIRDMAKVPSAIWVVDTNKEHIAVGEARKLGIPVIAILDTNCDPDEVDYPIPGNDDAIRSAALLTRVIASAVAEGLQARAGLGRADGKPEAEAAEPLAEWEQELLASATASATPSATASTTALTDAPAGATEPTTDAS

SEQ ID NO: 62573 - protein, 176 aa, Mycobacterium bovis
MELVVGRVVKSHGVTGEVVVEIRTDDPADRFAPGTRLRAKGPFDGGAEGSAVSYVIESVRQHGGRLLVRLAGVADRDAADALRGSLFVIDADDLPPIDEPDTYYDHQLVGLMVQTATGEGVGVVTEVVHTAAGELLAVKRDSDEVLVPFVRAIVTSVSLDDGIVEIDPPHGLLNLE

SEQ ID NO: 62574 - protein, 381 aa, Mycobacterium bovis
MPQPPAPTLAPRRATRQLMVGNVGVGSDHPVSVQSMCTTKTHDVNSTLQQIAELTAAGCDIVRVACPRQEDADALAEIARHSQIPVVADIHFQPRYIFAAIDAGCAAVRVNPGNIKEFDGRVGEVAKAAGAAGIPIRIGVNAGSLDKRFMEKYGKATPEALVESALWEASLFEEHGFGDIKISVKHNDPVVMVAAYELLAARCDYPLHLGVTEAGPAFQGTIKSAVAFGALLSRGIGDTIRVSLSAPPVEEVKVGNQVLESLNLRPRSLEIVSCPSCGRAQVDVYTLANEVTAGLDGLDVPLRVAVMGCVVNGPGEAREADLGVASGNGKGQIFVRGEVIKTVPEAQIVETLIEEAMRLAAEMGEQAPGATPSGSPIVTVS

SEQ ID NO: 62575 - protein, 271 aa, Mycobacterium bovis
MANFTAADVKRLRELTGAGMLACKNALAETDGDFDKAVEALRIKGAKDVGKRAERATAEGLVAAKDGALIELNCETDFVAKNAEFQTLADQVVAAAAAAKPADVDALKGASIGDKTVEQAIAELSAKIGEKLELRRVAIFDGTVEAYLHRRSADLPPAVGVLVEYRGDDAAAAHAVALQIAALRARYLSRDDVPEDIVASERRIAEETARAEGKPEQALPKIVEGRLNGFFKDAVLLEQASVSDNKKTVKALLDVAGVMVTRFVRFEVGQA

SEQ ID NO: 62576 - protein, 230 aa, Mycobacterium bovis
MRIDIVTIFPACLDPLRQSLPGKAIESGLVDLNVHDLRRWTHDVHHSVDDAPYGGGPGMVMKAPVWGEALDEICSSETLLIVPTPAGVLFTQATAQRWTTESHLVFACGRYEGIDQRVVQDAARRMRVEEVSIGDYVLPGGESAAVVMVEAVLRLLAGVLGNPASHQDDSHSTGLDGLLEGPSYTRPASWRGLDVPEVLLSGDHARIAAWRREVSLQRTRERRPDLSHPD

SEQ ID NO: 62577 - protein, 113 aa, Mycobacterium bovis
MNRLDFVDKPSLRDDIPAFNPGDTINVHVKVIEGAKERLQVFKGVVIRRQGGGIRETFTVRKESYGVGVERTFPVHSPNIDHIEVVTRGDVRRAKLYYLRELRGKKAKIKEKR

SEQ ID NO: 62578 - protein, 294 aa, Mycobacterium bovis
MTETTDSPSERQPGPAEPELSSRDPDIAGQVFDAAPFDAAPDADSEGDSKAAKTDEPRPAKRSTLREFAVLAVIAVVLYYVMLTFVARPYLIPSESMEPTLHGCSTCVGDRIMVDKLSYRFGSPQPGDVIVFRGPPSWNVGYKSIRSHNVAVRWVQNALSFIGFVPPDENDLVKRVIAVGGQTVQCRSDTGLTVNGRPLKEPYLDPATMMADPSIYPCLGSEFGPVTVPPGRVWVMGDNRTHSADSRAHCPLLCTNDPLPGTVPVANVIGKARLIVWPPSRWGVVRSVNPQQGR

SEQ ID NO: 62579 - protein, 264 aa, Mycobacterium bovis
MTKTWPPRTVIRKSGGLRGMRTLESALHRGGLGPVAGVDEVGRGACAGPLVVAACVLGPGRIASLAALDDSKKLSEQAREKLFPLICRYAVAYHVVFIPSAEVDRHGVHVANIEGMRRAVAGLAVRPGYVLSDGFRVPGLPMPSLPVIGGDAAAACIAAASVLAKVSRDRVMVALDADHPGYGFAEHKGYSTPAHSRALARLGPCPQHRYSFINVRRVASGSNTAEVADGQPDPRDGTAQTGEGRWSKSSHPATMRATGRAQGT

SEQ ID NO: 62580 - protein, 261 aa, Mycobacterium bovis
MTEPDVAGAPASKPEPASTGAASAAQLSGYSRVLLKLGGEMFGGGQVGLDPDVVAQVARQIADVVRGGVQIAVVIGGGNFFRGAQLQQLGMERTRSDYMGMLGTVMNSLALQDFLEKEGIVTRVQTAITMGQVAEPYLPLRAVRHLEKGRVVIFGAGMGLPYFSTDTTAAQRALEIGADVVLMAKAVDGVFAEDPRVNPEAELLTAVSHREVLDRGLRVADATAFSLCMDNGMPILVFNLLTDGNIARAVRGEKIGTLVTT

SEQ ID NO: 62581 - protein, 779 aa, Mycobacterium bovis
MYVEAVRWQRSAASRDVLADYDEQAVTVAPRKREAAGVRAVMVSLQRGMQQMGALRTAAALARLNQRNGFDCPGCAWPEEPGGRKLAEFCENGAKAVAEEATKRTVTAEFFARHSVAELSAKPEYWLSQQGRLAHPMVLRPGDDHYRPISWDAAYQLIAEQLNGLDSPDRAVFYTSGRTSNEAAFCYQLLVRSFGTNNLPDCSNMCHESSGAALTDSIGIGKGSVTIGDVEHADLIVIAGQNPGTNHPRMLSVLGKAKANGAKIIAVNPLPEAGLIRFKDPQKVNGVVGHGIPIADEFVQIRLGGDMALFAGLGRLLLEAEERVPGSVVDRSFVDNHCAGFDGYRRRTLQVGLDTVMDATGIELAQLQRVAAMLMASQRTVICWAMGLTQHAHAVATIGEVTNVLLLRGMIGKPGAGVCPVRGHSNVQGDRTMGIWEKMPEQFLAALDREFGITSPRAHGFDTVAAIRAMRDGRVSVFMGMGGNFASATPDTAVTEAALRRCALTVQVSTKLNRSHLVHGATALILPTLGRTDRDTRNGRKQLVSVEDSMSMVHLSRGSLHPPSDQVRSEVQIICQLARALFGPGHPVPWERFADDYDTIRDAIAAVVPGCDDYNHKVRVPDGFQLPHPPRDAREFRTSTGKANFAVNPLQWVPVPPGRLVLQTLRSHDQYNTTIYGLDDRYRGVKGGRRVVFINPADIETFGLTAGDRVDLVSEWTDGQGGLQERRAKDFLVVAYSTPVGNAAAYYPETNPLVPLDHTAAQSNTPVSKAIIVRLEPTA

SEQ ID NO: 62582 - protein, 185 aa, Mycobacterium bovis
MIDEALFDAEEKMEKAVAVARDDLSTIRTGRANPGMFSRITIDYYGAATPITQLASINVPEARLVVIKPYEANQLRAIETAIRNSDLGVNPTNDGALIRVAVPQLTEERRRELVKQAKHKGEEAKVSVRNIRRKAMEELHRIRKEGEAGEDEVGRAEKDLDKTTHQYVTQIDELVKHKEGELLEV

SEQ ID NO: 62583 - protein, 306 aa, Mycobacterium bovis
MTTNDAGTGNPAEQPARGAKQQPATETSRAGRDLRAAIVVGLSIGLVLIAVLVFVPRVWVAIVAVATLVATHEVVRRLREAGYLIPVIPLLIGGQAAVWLTWPFGAVGALAGFGGMVVVCMIWRLFMQDSVTRPTTGGAPSPGNYLSDVSATVFLAVWVPLFCSFGAMLVYPENGSGWVFCMMIAVIASDVGGYAVGVLFGKHPMVPTISPKKSWEGFAGSLVCGITATIITATFLVGKTPWIGALLGVLFVLTTALGDLVESQVKRDLGIKDMGRLLPGHGGLMDRLDGILPSAVAAWIVLTLLP

SEQ ID NO: 62584 - protein, 808 aa, Mycobacterium bovis
MEAESPCAASDLAVARRELLSGNHRELDPVGLRQTWLDLHESWLIDKADEIGIADASGFAIVGVGGLGRRELLPYSDLDVLLLHDGKPADILRPVADRLWYPLWDANIRLDHSVRTVSEALTIANSDLMAALGMLEARHIAGDQQLSFALIDGVRRQWRNGIRSRMGELVEMTYARWRRCGRIAQRAEPDLKLGRGGLRDVQLLDALALAQLIDRHGIGHTDRPAGSLDGAYRTLLDVRTELHRVSGRGRDHLLAQFADEISAALGFGDRFDLARTLSSAGRTIGYHAEAGLRTAANALPRRGISALVRRPKRRPLDEGVVEYAGEIVLARDAEPEHDPGLVLRVAAASADTGLPIGAATLSRLAASVPDLPTPWPQEALDDLLVVLSAGPTTVATIEALDRTGLWGRLLPEWEPIRDLPPRDVAHKWTVDRHVVETAVHAAPLATRVARPDLLALGALLHDIGKGRGTDHSVLGAELVIPVCTRLGLSPPDVWTLSKLVRHHLLLPITATRRDLNDPKTIEAVSEALGGDPQLLEVLHALSEADSKATGPGVWSDWKASLVDDLVRRCRMVMAGESLPQAEPTAPHYLSLAADHGVHVEISPRDGERIDAVIVAPDERGLVSKAAAVLALNSLRVHSASVNVHQGVAITEFVVSPLFGSPPAAELVRQQFVGALNGDVDVLGMLQKRDSDAASLVSARAGDVQAGVPVTRTAAPPRILWLDTAAPAKLILEVRAMDRAGLLALLAGALEGAGAGIVWAKVNTFGSTAADVFCVTVPAELDARAAVEQHLLEVLGASVDVVVDEPVGD

SEQ ID NO: 62585 - protein, 525 aa, Mycobacterium bovis
MFESLSDRLTAALQGLRGKGRLTDADIDATTREIRLALLEADVSLPVVRAFIHRIKERARGAEVSSALNPAQQVVKIVNEELISILGGETRELAFAKTPPTVVMLAGLQGSGKTTLAGKLAARLRGQGHTPLLVACDLQRPAAVNQLQVVGERAGVPVFAPHPGASPESGPGDPVAVAAAGLAEARAKHFDVVIVDTAGRLGIDEELMAQAAAIRDAINPDEVLFVLDAMIGQDAVTTAAAFGEGVGFTGVALTKLDGDARGGAALSVREVTGVPILFASTGEKLEDFDVFHPDRMASRILGMGDVLSLIEQAEQVFDAQQAEEAAAKIGAGELTLEDFLEQMLAVRKMGPIGNLLGMLPGAAQMKDALAEVDDKQLDRVQAIIRGMTPQERADPKIINASRRLRIANGSGVTVSEVNQLVERFFEARKMMSSMLGGMGIPGIGRKSATRKSKGAKGKSGKKSKKGTRGPTPPKVKSPFGVPGMPGLAGLPGGLPDLSQMPKGLDELPPGLADFDLSKLKFPGKK

SEQ ID NO: 62586 - protein, 411 aa, Mycobacterium bovis
MPPSLHLSDSAAASVFRAVRLRGPVGRDVIAGSTSLSIATVNRQVIALLEAGLLRERADLAVSGAIGRPRVPVEVNHEPFVTLGIHIGARTTSIVATDLFGRTLDTVETPTPRNAAGAALTSLADSADRYLQRWRRRRALWVGVTLGGAVDSATGHVDHPRLGWRQAPVGPVLADALGLPVSVASHVDAMAGAELMLGMRRFAPSSSTSLYVYARETVGYALMIGGRVHCPASGPGTIAPLPVHSEMLGGTGQLESTVSDEAVLAAARRLRIIPGIASRTRTGGSATAITDLLRVARAGNQQAKELLAERARVLGGAVALLRDLLNPDEVVVGGQAFTEYPEAMEQVEAAFTAGSVLAPRDIRVTVFGNRVQEAGAGIVSLSGLYADPLGALRRSGALDARLQDTAPEALA

SEQ ID NO: 62587 - protein, 369 aa, Mycobacterium bovis
MKRSGVGSLFAGAHIAEAVPLAPLTTLRVGPIARRVITCTSAEQVVAALRHLDSAAKTGADRPLVFAGGSNLVIAENLTDLTVVRLANSGITIDGNLVRAEAGAVFDDVVVRAIEQGLGGLECLSGIPGSAGATPVQNVGAYGAEVSDTITRVRLLDRCTGEVRWVSARDLRFGYRTSVLKHADGLAVPTVVLEVEFALDPSGRSAPLRYGELIAALNATSGERADPQAVREAVLALRARKGMVLDPTDHDTWSVGSFFTNPVVTQDVYERLAGDAATRKDGPVPHYPAPDGVKLAAGWLVERAGFGKGYPDAGAAPCRLSTKHALALTNRGGATAEDVVTLARAVRDGVHDVFGITLKPEPVLIGCML

SEQ ID NO: 62588 - protein, 224 aa, Mycobacterium bovis
MLGQPTRAQLAALVDHTLLKPETTRADVAALVAEAAELGVYAVCVSPSMVPVAVQAGGVRVAAVTGFPSGKHVSSVKAHEAAAALASGASEIDMVIDIGAALCGDIDAVRSDIEAVRAAAAGAVLKVIVESAVLLGQSNAHTLVDACRAAEDAGADFVKTSTGCHPAGGATVRAVELMAETVGPRLGVKASGGIRTAADAVAMLNAGATRLGLSGTRAVLDGLS

SEQ ID NO: 62589 - protein, 238 aa, Mycobacterium bovis
MNQSSVFQPPDRQRVDERIATTIADAILDGVFPPGSTLPPERDLAERLGVNRTSLRQGLARLQQMGLIEVRHGSGSVVRDPEGLTHPAVVEALVRKLGPDFLVELLEIRAALGPLIGRLAAARSTPEDAEALCAALEVVQQADTAAARQAADLAYFRVLIHSTRNRALGLLYRWVEHAFGGREHALTGAYDDADPVLTDLRAINGAVLAGDPAAAAATVEAYLNASALRMVKSYRDRA

SEQ ID NO: 62590 - protein, 230 aa, Mycobacterium bovis
MALMTSVLIVEDEESLADPLAFLLRKEGFEATVVTDGPAALAEFDRAGADIVLLDLMLPGMSGTDVCKQLRARSSVPVIMVTARDSEIDKVVGLELGADDYVTKPYSARELIARIRAVLRRGGDDDSEMSDGVLESGPVRMDVERHVVSVNGDTITLPLKEFDLLEYLMRNSGRVLTRGQLIDRVWGADYVGDTKTLDVHVKRLRSKIEADPANPVHLVTVRGLGYKLEG

SEQ ID NO: 62591 - protein, 410 aa, Mycobacterium bovis
MTVFSALLLAGVLSALALAVGGAVGMRLTSRVVEQRQRVATEWSGITVSQMLQCIVTLMPLGAAVVDTHRDVVYLNERAKELGLVRDRQLDDQAWRAARQALGGEDVEFDLSPRKRSATGRSGLSVHGHARLLSEEDRRFAVVFVHDQSDYARMEAARRDFVANVSHELKTPVGAMALLAEALLASADDSETVRRFAEKVLIEANRLGDMVAELIELSRLQGAERLPNMTDVDVDTIVSEAISRHKVAADNADIEVRTDAPSNLRVLGDQTLLVTALANLVSNAIAYSPRGSLVSISRRRRGANIEIAVTDRGIGIAPEDQERVFERFFRGDKARSRATGGSGLGLAIVKHVAANHDGTIRVWSKPGTGSTFTLALPALIEAYHDDERPEQAREPELRSNRSQREEELSR

SEQ ID NO: 62592 - protein, 327 aa, Mycobacterium bovis
MSSYPRQRPRRLRSTVAMRRLVAQTSLEPRHLVLPMFVADGIDEPRPITSMPGVVQHTRDSLRRAAAAAVAAGVGGLMLFGVPRDQDKDGVGSAGIDPDGILNVALRDLAKDLGEATVLMADTCLDEFTDHGHCGVLDDRGRVDNDATVARYVELAVAQAESGAHVVGPSGMMDGQVAAIRDGLDAAGYIDVVILAYAAKFASAFYGPFREAVSSSLSGDRRTYQQEPGNAAEALREIELDLDGGADIVMVKPAMGYLDVVAAAADVSPVPVAAYQVSGEYAMIRAAAANNWIDERAAVLESLTGIRRAGADIVLTYWAVDAAGWLT

SEQ ID NO: 62593 - protein, 551 aa, Mycobacterium bovis
MGSGPGDPGLLTTRAAAVLANAALVFTDPDVPEPVVALIGTDLPPVSGPAPAEPVAGNGDAAGGGSAQEHGRAASAVVSGGPDIRPALGDPADVAKTLTAEARSGVDVVRLVAGDPLTVDAVISEVNAVARTHLHIEIVPGLAASSAVPTYAGLPLGSSHTVADVRIDPENTDWDALAAAPGPLILQATASHLAESARSLIDHQLAESTPCVVTAHGTTCQQRSVETTLQGLTDPAVLGATDPACSANGRDSQAGPLIVTIGKTVTSRAKLNWWESRALYGWTVLVPRTKDQAGEMSERLTSYGALPVEVPTIAVEPPRSPAQMERAVKGLVDGRFQWIVFTSTNAVRAVWEKFGEFGLDARAFSGVKIACVGESTADRVRAFGISPELVPSGEQSSLGLLDDFPPYDSVFDPVNRVLLPRADIATETLAEGLRERGWEIEDVTAYRTVRAAPPPATTREMIKTGGFDAVCFTSSSTVRNLVGIAGKPHARTIIACIGPKTAETAAEFGLRVDVQPDTAAIGPLVDALAEHAARLRAEGALPPPRKKSRRR

SEQ ID NO: 62594 - protein, 312 aa, Mycobacterium bovis
MAHVIRIGTRGSLLATTQAATVRDALIAGGHSAELVTISTEGDRSMAPIASLGVGVFTTALREAMEAGLVDAAVHSYKDLPTAADPRFTVAAIPPRNDPRDAVVARDGLTLGELPVGSLVGTSSPRRAAQLRALGLGLEIRPLRGNLDTRLNKVSSGDLDAIVVARAGLARLGRLDDVTETLEPVQMLPAPAQGALAVECRAGDSRLVAVLAELDDADTRAAVTAERALLADLEAGCSAPVGAIAEVVESIDEDGRVFEELSLRGCVAALDGSDVIRASGIGSCGRARELGLSVAAELFELGARELMWGVRH

SEQ ID NO: 62595 - protein, 468 aa, Mycobacterium bovis
MSVLLFGVSHRSAPVVVLEQLSIDESDQVKIIDRVLASPLVTEAMVLSTCNRVEVYAVVDAFHGGLSVIGQVLAEHSGMSMGELTKYAYVRYSEAAVEHLFAVASGLDSAVIGEQQVLGQVRRAYAVAESNRTVGRVLHELAQRALSVGKRVHSETAIDAAGASVVSVALGMAERKLGSLAGTTAVVIGAGAMGALSAVHLTRAGVGHIQVLNRSLSRAQRLARRIRESGVPAEALALDRLANVLADADVVVSCTGAVRPVVSLADVHHALAAARRDEATRPLVICDLGMPRDVDPAVARLPCVWVVDVDSVQHEPSAHAAAADVEAARHIVAAEVASYLVGQRMAEVTPTVTALRQRAAEVVEAELLRLDNRLPGLQSVQREEVARTVRRVVDKLLHAPTVRIKQLASAPGGDSYAEALRELFELDQTAVDAVATAGELPVVPSGFDAESRRGGGDMQSSPKRSPSN

SEQ ID NO: 62596 - protein, 323 aa, Mycobacterium bovis
MDRQSAVAQLRAAAEQFARVHLDACDRWSVGLSGGPDSLALTAVAARLWPTTALIVDHGLQPGSATVAETARIQAISLGCVDARVLCVQVGAAGGREAAARSARYSALEEHRDGPVLLAHTLDDQAETVLLGLGRGSGARSIAGMRPYDPPWCRPLLGVRRSVTHAACRELGLTAWQDPHNTDRRFTRTRLRTEVLPLLEDVLGGGVAEALARTATALREDTDLIDTIAAQALPGAAVAGSRGQELSTSALTALPDAVRRRVIRGWLLAGGATGLTDRQIRGVDRLVTAWRGQGGVAVGSTLRGQRLVAGRRDGVLVLRREPV

SEQ ID NO: 62597 - protein, 482 aa, Mycobacterium bovis
MLAQGRDPYPVAVPRTHTLAEVRAAHPDLPIDTATEDIVGVAGRVIFARNSGKLCFATLQDGDGTQLQVMISLDKVGQAALDAWKADVDLGDIVYVHGAVISSRRGELSVLADCWRIAAKSLRPLPVAHKEMSEESRVRQRYVDLIVRPEARAVARLRIAVVRAIRTALQRRGFLEVETPVLQTLAGGAAARPFATHSNALDIDLYLRIAPELFLKRCIVGGFDKVFELNRVFRNEGADSTHSPEFSMLETYQTYGTYDDSAVVTRELIQEVADEAIGTRQLPLPDGSVYDIDGEWATIQMYPSLSVALGEEITPQTTVDRLRGIADSLGLEKDPAIHDNRGFGHGKLIEELWERTVGKSLSAPTFVKDFPVQTTPLTRQHRSIPGVTEKWDLYLRGIELATGYSELSDPVVQRERFADQARAAAAGDDEAMVLDEDFLAALEYGMPPCTGTGMGIDRLLMSLTGLSIRETVLFPIVRPHSN

SEQ ID NO: 62598 - protein, 171 aa, Mycobacterium bovis
MNQTNDRQQAVIDALVGAGLDRKDIRTTRVTVAPQYSNPEPAGTATITGYRADNDIEVKIHPTDAASRLLALVVSTGGDATRISSVSYSIGDDSQLVKDARARAFQDAKNRADQYAQLSGLRLGKVISISEASGAAPTHEAPAPPRGLSAVPLEPGQQTVGFSVTVVWELT

SEQ ID NO: 62599 - protein, 848 aa, Mycobacterium bovis
MFERFTDRARRVVVLAQEEARMLNHNYIGTEHILLGLIHEGEGVAAKSLESLGISLEGVRSQVEEIIGQGQQAPSGHIPFTPRAKKVLELSLREALQLGHNYIGTEHILLGLIREGEGVAAQVLVKLGAELTRVRQQVIQLLSGYQGKEAAEAGTGGRGGESGSPSTSLVLDQFGRNLTAAAMEGKLDPVIGREKEIERVMQVLSRRTKNNPVLIGEPGVGKTAVVEGLAQAIVHGEVPETLKDKQLYTLDLGSLVAGSRYRGDFEERLKKVLKEINTRGDIILFIDELHTLVGAGAAEGAIDAASILKPKLARGELQTIGATTLDEYRKYIEKDAALERRFQPVQVGEPTVEHTIEILKGLRDRYEAHHRVSITDAAMVAAATLADRYINDRFLPDKAIDLIDEAGARMRIRRMTAPPDLREFDEKIAEARREKESAIDAQDFEKAASLRDREKTLVAQRAEREKQWRSGDLDVVAEVDDEQIAEVLGNWTGIPVFKLTEAETTRLLRMEEELHKRIIGQEDAVKAVSKAIRRTRAGLKDPKRPSGSFIFAGPSGVGKTELSKALANFLFGDDDALIQIDMGEFHDRFTASRLFGAPPGYVGYEEGGQLTEKVRRKPFSVVLFDEIEKAHQEIYNSLLQVLEDGRLTDGQGRTVDFKNTVLIFTSNLGTSDISKPVGLGFSKGGGENDYERMKQKVNDELKKHFRPEFLNRIDDIIVFHQLTREEIIRMVDLMISRVAGQLKSKDMALVLTDAAKALLAKRGFDPVLGARPLRRTIQREIEDQLSEKILFEEVGPGQVVTVDVDNWDGEGPGEDAVFTFTGTRKPPAEPDLAKAGAHSAGGPEPAAR

SEQ ID NO: 62600 - protein, 211 aa, Mycobacterium bovis
MPHPWDTGDHERNWQGYFIPAMSVLRNRVGARTHAELRDAENDLVEARVIELREDPNLLGDRTDLAYLRAIHRQLFQDIYVWAGDLRTVGIEKEDESFCAPGGISRPMEHVAAEIYQLDRLRAVGEGDLAGQVAYRYDYVNYAHPFREGNGRSTREFFDLLLSERGSGLDWGKTDLEELHGACHVARANSDLTGLVAMFKGILDAEPTYDF

SEQ ID NO: 62601 - protein, 595 aa, Mycobacterium bovis
  MISC_FEATURE (16)..(16): X=any amino acid
VVLLLQRRHPRLQARXYSVAITQINGDNVKSAQIDDREQQLRLILKKGNNETDGSEKVITKYPTGYAVDLFNALSAKNAKVSTVVNQGSILGELLVYVLPLLLLVGLFVMFSRMQGGARMGFGFGKSRAKQLSKDMPKTTFADVAGVDEAVEELYEIKDFLQNPSRYQALGAKIPKGVLLYGPPGTGKTLLARAVAGEAGVPFFTISGSDFVEMFVGVGASRVRDLFEQAKQNSPCIIFVDEIDAVGRQRGAGLGGGHDEREQTLNQLLVEMDGFGDRAGVILIAATNRPDILDPALLRPGRFDRQIPVSNPDLAGRRAVLRVHSKGKPMAADADLDGLAKRTVGMTGADLANVINEAALLTARENGTVITGPALEEAVDRVIGGPRRKGRIISEQEKKITAYHEGGHTLAAWAMPDIEPIYKVTILARGRTGGHAVAVPEEDKGLRTRSEMIAQLVFAMGGRAAEELVFREPTTGAVSDIEQATKIARSMVTEFGMSSKLGAVKYGSEHGDPFLGRTMGTQPDYSHEVAREIDEEVRKLIEAAHTEAWEILTEYRDVLDTLAGELLEKETLHRPELESIFADVEKRPRLTMFDD

SEQ ID NO: 62602 - protein, 280 aa, Mycobacterium bovis
MSPAPVQVMGVLNVTDDSFSDGGCYLDLDDAVKHGLAMAAAGAGIVDVGGESSRPGATRVDPAVETSRVIPVVKELAAQGITVSIDTMRADVARAALQNGAQMVNDVSGGRADPAMGPLLAEADVPWVLMHWRAVSADTPHVPVRYGNVVAEVRADLLASVADAVAAGVDPARLVLDPGLGFAKTAQHNWAILHALPELVATGIPVLVGASRKRFLGALLAGPDGVMRPTDGRDTATAVISALAALHGAWGVRVHDVRASVDAIKVVEAWMGAERIERDG

SEQ ID NO: 62603 - protein, 188 aa, Mycobacterium bovis
MTRVVLSVGSNLGDRLARLRSVADGLGDALIAASPIYEADPWGGVEQGQFLNAVLIADDPTCEPREWLRRAQEFERAAGRVRGQRWGPRNLDVDLIACYQTSATEALVEVTARENHLTLPHPLAHLRAFVLIPWIAVDPTAQLTVAGCPRPVTRLLAELEPADRDSVRLFRPSFDLNSRHPVSRAPES

SEQ ID NO: 62604 - protein, 443 aa, Mycobacterium bovis
RGRRRGRAGVCRRCGGGRSAGHYWWSPGWRARTCASTAATHSQGGSGPCGGHRATPSAAGVTAALAVVAVDPDLGKLAGRITDALTGQELWQRLDDVPLVPASTNKILTAAAALLTLDRQARISTRVVAGGQNPQGPVVLVGAGDPTLSAAPPGQDTWYHGAARIGDLVEQIRRSGVTPTAVQVDASAFSGPTMAPGWDPADIDNGDIAPIEAAMIDAGRIQPTTVNSRRSRTPALDAGRELAKALGLDPAAVTIASAPAGARQLAVVQSAPLIQRLSQMMNASDNVMAECIGREVAVAINRPQSFSGAVDAVTSRLNTAHIDTAGAALVDSSGLSLDNRLTARTLDATMQAAAGPDQPALRPLLDLLPIAGGSGTLGERFLDAATDQGPAGWLRAKTGSLTAINSLVGVLTDRSGRVLTFAFISNEAGPNGRNAMDALATKL

SEQ ID NO: 62605 - protein, 995 aa, Mycobacterium bovis
MGNLFAAGLRRPALECEIVSCPQARERRRTGIHLGFGSRPRPLPTGAVSIGAGIRDGAWAQLADPKTKGRGSGGNGSGRRLVIVESPTKARKLASYLGSGYIVESSRGHIRDLPRAASDVPAKYKSQPWARLGVNVDADFEPLYIISPEKRSTVSELRGLLKDVDELYLATDGDREGEAIAWHLLETLKPRIPVKRMVFHEITEPAIRAAAEHPRDLDIDLVDAQETRRILDRLYGYEVSPVLWKKVAPKLSAGRVQSVATRIIVARERDRMAFRSAAYWDILAKLDASVSDPDAAPPTFSARLTAVAGRRVATGRDFDSLGTLRKGDEVIVLDEGSATALAAGLDGTQLTVASAEEKPYARRPYPPFMTSTLQQEASRKLRFSAERTMSIAQRLYENGYITYMRTDSTTLSESAINAARTQARQLYGDEYVAPAPRQYTRKVKNAQEAHEAIRPAGETFATPDAVRRELDGPNIDDFRLYELIWQRTVASQMADARGMTLSLRITGMSGHQEVVFSATGRTLTFPGFLKAYVETVDELVGGEADDAERRLPHLTPGQRLDIVELTPDGHATNPPARYTEASLVKALEELGIGRPSTYSSIIKTIQDRGYVHKKGSALVPSWVAFAVTGLLEQHFGRLVDYDFTAAMEDELDEIAAGNERRTNWLNNFYFGGDHGVPDSVARSGGLKKLVGINLEGIDAREVNSIKLFDDTHGRPIYVRVGKNGPYLERLVAGDTGEPTPQRANLSDSITPDELTLQVAEELFATPQQGRTLGLDPETGHEIVAREGRFGPYVTEILPEPAADAAAAAQGVKKRQKAAGPKPRTGSLLRSMDLQTVTLEDALRLLSLPRVVGVDPASGEEITAQNGRYGPYLKRGNDSRSLVTEDQIFTITLDEALKIYAEPKRRGRQSASAPPLRELGTDPASGKPMVIKDGRFGPYVTDGETNASLRKGDDVASITDERAAELLADRRARGPAKRPARKAARKVPAKKAAKRD

SEQ ID NO: 62606 - protein, 282 aa, Mycobacterium bovis
MTTAHNGSAPRFQRTRSGYDPVAVNHYIAELVLRQQAQHCEIETLKAEIASLKDENAALKDTSPSAQAVTDRMAKMLRLAVDEVFQMQSEARAEAATLVSAARDEAEAVRTQKREMLADMNARQRALESEHADVMRRAREEAEQLVAQATAEVERMRVIDARRREKAEQELDAEIIRLRTDAQFQIDDQLQATQQECEKRLGEAKIEADRRLHVADEQIEHGLSEARRTLEEISQRRVGILEQLARIHAQLENIPALLESARHSETEPLQSINGAVAELRAI

SEQ ID NO: 62607 - protein, 207 aa, Mycobacterium bovis
MAAPDNSRRRPGRPAGSSDTRERILSSARELFAHNGIDRTSIRAVAAKAGVDAALVHHYFGTKQQLFAAAIHIPIDPMVIIGPIREAPVEELGYKLPSLLLPIWDSELGAGLIATLRSLISGSDVGLARSFLEEVVTVELGSRVDNPPGTGKIRTQFVASQLMGVVMARYIVRIEPFASLPAEQIVQTIAPNLQRYLTGELPDDLAP

SEQ ID NO: 62608 - protein, 273 aa, Mycobacterium bovis
MKPTVPALVACDVDGTLLDDGETVTKRTRDAVHAAVDAGTHFILATGRPPRWVRPIVDALGFAPMAVCANGAVIYDPGTDRVTSVRTLPVDALATLAEVATRVIPGAGLAVERIGERAHDTATPQFVSSPGYEHAWLNPDNTEVSIDHLLSAPAIKLLIRKAGAASADMAAELAKHVGFEGDITYSTNNGLVEIVPLGISKATGVDEIARPLGISDAEVVAFGDMPNDVPMLLRAGLGVAMGNAHPDALAVADEVTAPNSEDGVARVLERWWS

SEQ ID NO: 62609 - protein, 355 aa, Mycobacterium bovis
MEWEFALVDSQTRDLSNEATAVIAEIGENPRVHKELLRNTVEIVSGICECTAEAMQDLRDTLGPARQIVRDRGMELFCAGTHPFARWSAQKLTDAPRYAELIKRTQWWGRQMLIWGVHVHVGIRSAHKVMPIMTSLLNYYPHLLALSASSPWWGGEDTGYASNRAMMFQQLPTAGLPFHFQRWAEFEGFVYDQKKTGIIDHMDEIRWDIRPSPHLGTLEVRICDGVSNLRELGALVALTHCLIVDLDRRLDAGETLPTMPPWHVQENKWRAARYGLDAVIILDADSNERLVTDDLADVLTRLEPVAKSLNCADELAAVSDIYRDGASYQRQLRVAQQHDGDLRAVVDALVAELVI

SEQ ID NO: 62610 - protein, 399 aa, Mycobacterium bovis
MRLLTQGGPASLTQVSRVLLVTNDFPPRRGGIQSYLGEFVGRLVGSRAHAMTVYAPQWKGADAFDDAARAAGYRVVRHPSTVMLPGPTVDVRMRRLIAEHDIETVWFGAAAPLALLAPRARLAGASRVLASTHGHEVGWSMLPVARSVLRRIGDGTDVVTFVSSYTRSRFASAFGPAASLEYLPPGVDTDRFRPDPAARAELRKRYRLGERPTVVCLSRLVPRKGQDTLVTALPSIRRRVDGAALVIVGGGPYLETLRKLAHDCGVADHVTFTGGVATDELPAHHALADVFAMPCRTRGAGMDVEGLGIVFLEASAAGVPVIAGNSGGAPETVQHNKTGLVVDGRSVDRVADAVAELLIDRDRAVAMGAAGREWVTAQWRWDTLAAKLADFLRGDDAAR

SEQ ID NO: 62611 - protein, 276 aa, Mycobacterium bovis
MDMTWADEVLAGHPFVVAHRGASAARPEHTLAAYDLALKEGADGVECDVRLTRDGHLVCVHDRRLDRTSTGAGLVSTMTLAQLRELEYGAWHDSWRPDGSHGDTSLLTLDALVSLVLDWHRPVKIFVETKHPVRYGSLVENKLLALLHRFGIAAPASADRSRAVVMSFSAAAVWRIRRAAPLLPTVLLGKTPRYLTSSAATAVGATAVGPSLPALKEYPQLVDRSAAQGRAVYCWNVDEYEDIDFCREVGVAWIGTHHPGRTKAWLEDGRANGTTR

SEQ ID NO: 62612 - protein, 322 aa, Mycobacterium bovis
MTGKRVERVHAINWNRLLDAKDLQVWERLTGNFWLPEKIPLSNDLASWQTLSSTEQQTTIRVFTGLTLLDTAQATVGAVAMIDDAVTPHEEAVLTNMAFMESVHAKSYSSIFSTLCSTKQIDDAFDWSEQNPYLQRKAQIIVDYYRGDDALKRKASSVMLESFLFYSGFYLPMYWSSRGKLTNTADLIRLIIRDEAVHGYYIGYKCQRGLADLTDAERADHREYTCELLHTLYANEIDYAHDLYDELGWTDDVLPYMRYNANKALANLGYQPAFDRDTCQVNPAVRAALDPGAGENHDFFSGSGSSYVMGTHQPTTDTDWDF

SEQ ID NO: 62613 - protein, 303 aa, Mycobacterium bovis
MVDPQLDGPQLAALAAVVELGSFDAAAERLHVTPSAVSQRIKSLEQQVGQVLVVREKPCRATTAGIPLLRLAAQTALLESEALAEMGGNASLKRTRITIAVNADSMATWFSAVFDGLGDVLLDVRIEDQDHSARLLREGVAMGAVTTERNPVPGCRVHPLGEMRYLPVASRPFVQRHLSDGFTAAAAAKAPSLAWNRDDGLQDMLVRKAFRRAITRPTHFVPTTEGFTAAARAGLGWGMFPEKLAASPLADGSFVRVCDIHLDVPLYWQCWKLDSPIIARITDTVRAAASGLYRGQQRRRRPG

SEQ ID NO: 62614 - protein, 1606 aa, Mycobacterium bovis
MGSVHDVIEAFRKAPSNAERGTKFEQLMVRYFELDPTMAQQYDAVWRWIDWPERRGRTDTGIDLVARERDTGNYTAIQCKFYEPTHTLAKGDIDSFFTASGKTGFTNRVIISTTDRWGRNAEDALADQLVPVQRIGMAEIAESPIDWDIAWPAGDLQVNLTPAKRHELRPHQQQAIDAVFRGFAVGNDRGKLIMACGTGKTFTALKIAERIAADNGGSARILLLVPSISLLSQTLREWTAQSELDVRAFAVCSDTKVSRSAEDYHVHDVPIPVTTDARVLLHEMAHRRCAQGLTVVFCTYQSLPTVAKAQRLGVDEFDLVMCDEAHRTTGVTLAGDDESNVVRVHDGQYLKAARRLYMTATPRIFTESIKDRADQHSAELVSMDDELTFGPEFHRLSFGEAVERGLLTDYKVMVLTVDQGVIAPRLQQELSGVSGELMLDDASKIVGCWNGLAKRSGTGIVAGEPPMRRAVAFAKDIKTSKQVAELFPKVVEAYRELVDDGPGLACSVRHVDGTFNALVRNEQLAWLKGVVAEDECRILSNARCLSEGVDVPALDAVLFLNPRNSIVDVVQSVGRVMRKSPGKDYGYVILPVAVPEGVEPSAALADNKRFKVVWQVLNALRSHDERFDAMVNSIALNVKPTKTGEGSDKLLGGHIGPTSDEAGPAVAEQLAMFSLSQWQEAIYARIVDKVGTRTYWEQWAADVADIAATLTTRIHALLGGADATAAAAFEQFLAGLRDNLNDSITPDDAISMLSQHLITKPVFDALFAGHDFASHNPVSRAMQKMVDTVGGAGLEAETARLEGFYESVRRRAGEVTSAEGKQQVIAELYEKFFRIGFKKQAEALGIVYTPVEVVDFIVRAADFVSRKHFGRGLTDEGVHILDGFAGTGTFITRLLQSDLITAADLTRKYSQELHANEIMLLAYYIAAVNIESTYHALAGKTADADAYEPFPGMALADTFQISEAGDSMDAIMFPYNNARILRQLATPISVIIGNPPYSVGQSSANDLNANVKYPTLDGRIEQTYAKRSTAQLKNSLYDSYIRAFRWATDRIGDNGVVGFVSNGGYIDGNTADGMRLSLADDYAAVYVYNLRGNQRTAGELSRQEGGKVFGGGSRNTVAIFLGIKDPKHSGPCDVLYRDIGDYLSREEKLRIVGDGYLDTVEWQTVTPNLHGDWVNQRDDAFSAWPVIGDKKAALDVTRVFANYSAGLKTSRDAWCYNFSRGALEANIGRTIDFYNSEVDRINEIRGRDAKTPPVDALITVDSAKFSWDRINKRQVAQGIRIEFAPAGMRLGTYRPFTKEHAYLDPNQQLNNCTYQLPSMFPTPEHGNVGYYVVGMGSDKPFSCLMLNAIPDLAFWGSSNGQFFPRWTYEKTEPRDGELDFESTTNAEVDDHGYRRVDNITGVILKLYRDTIGDQVTKDDIFYYVYGLLHDPAYRTKYAADLKKMLPHIPTPETRERFDQLASAGRKLADLHVGYESVKPYPLDVQLKPGADPEDRETWRVEKMKWKSKQDHSTIIYNSRVTIAGIPDEAERYLLGSRSALGWIIDRYRVTTDKASGIVNDPNDWCDEHANPTYIVDLIKKVTTVSVETMKIVDSIVALASAGSDST

SEQ ID NO: 62615 - protein, 887 aa, Mycobacterium bovis
MVLLLESDPYHGLSDGEAAQRLERFGPNTLAVVTRASLLARILRQFHHPLIYVLLVAGTITAGLKEFVDAAVIFGVVVINAIVGFIQESKAEAALQGLRSMVHTHAKVVREGHEHTMPSEELVPGDLVLLAAGDKVPADLRLVRQTGLSVNESALTGESTPVHKDEVALPEGTPVADRRNIAYSGTLVTAGHGAGIVVATGAETELGEIHRLVGAAEVVATPLTAKLAWFSKFLTIAILGLAALTFGVGLLRRQDAVETFTAAIALAVGAIPEGLPTAVTITLAIGMARMAKRRAVIRRLPAVETLGSTTVICADKTGTLTENQMTVQSIWTPHGEIRATGTGYAPDVLLCDTDDAPVPVNANAALRWSLLAGACSNDAALVRDGTRWQIVGDPTEGAMLVVAAKAGFNPERLATTLPQVAAIPFSSERQYMATLHRDGTDHVVLAKGAVERMLDLCGTEMGADGALRPLDRATVLRATEMLTSRGLRVLATGMGAGAGTPDDFDENVIPGSLALTGLQAMSDPPRAAAASAVAACHSAGIAVKMITGDHAGTATAIATEVGLLDNTEPAAGSVLTGAELAALSADQYPEAVDTASVFARVSPEQKLRLVQALQARGHVVAMTGDGVNDAPALRQANIGVAMGRGGTEVAKDAADMVLTDDDFATIEAAVEEGRGVFDNLTKFITWTLPTNLGEGLVILAAIAVGVALPILPTQILWINMTTAIALGLMLAFEPKEAGIMTRPPRDPDQPLLTGWLVRRTLLVSTLLVASAWWLFAWELDNGAGLHEARTAALNLFVVVEAFYLFSCRSLTRSAWRLGMFANRWIILGVSAQAIAQFAITYLPAMNMVFDTAPIDIGVWVRIFAVATAITIVVATDTLLPRIRAQPP

SEQ ID NO: 62616 - protein, 420 aa, Mycobacterium bovis
MDAVVIGLGSMIGAGIFAALAPAAYAAGSGLLLGLAVAAVVAYCNAISSARLAARYPASGGTYVYGRMRLGDFWGYLAGWGFVVGKTASCAAMALTVGFYVWPAQAHAVAVAVVVALTAVNYAGIQKSAWLTRSIVAVVLVVLTAVVVAAYGSGAADPARLDIGVDAHVWGMLQAAGLLFFAFAGYARIATLGEEVRDPARTIPRAIPLALGITLAVYALVAVAVIAVLGPQRLARAAAPLSEAMRVAGVNWLIPVVQIGAAVAALGSLLALILGVSRTTLAMARDRHLPRWLAAVHPRFKVPFRAELVVGAVVAALAATADIRGAIGFSSFGVLVYYAIANASALTLGLDEGRPRRLIPLVGLIGCVVLAFALPLSSVAAGAAVLGVGVAAYGVRRIITRRARQTDSGDTQRSGHPSAT

SEQ ID NO: 62617 - protein, 1041 aa, Mycobacterium bovis
MTDNAYPKLAGGAPDLPALELEVLDYWSRDDTFRASIARRDGAPEYVFYDGPPFANGLPHYGHLLTGYVKDIVPRYRTMRGYKVERRFGWDTHGLPAELEVERQLGITDKSQIEAMGIAAFNDACRASVLRYTDEWQAYVTRQARWVDFDNDYKTLDLAYMESVIWAFKQLWDKGLAYEGYRVLPYCWRDETPLSNHELRMDDDVYQSRQDPAVTVGFKVVGGQPDNGLDGAYLLVWTTTPWTLPSNLAVAVSPDITYVQVQAGDRRFVLAEARLAAYARELGEEPVVLGTYRGAELLGTRYLPPFAYFMDWPNAFQVLAGDFVTTDDGTGIVHMAPAYGEDDMVVAEAVGIAPVTPVDSKGRFDVTVADYQGQHVFDANAQIVRDLKTQSGPAAVNGPVLIRHETYEHPYPHCWRCRNPLIYRSVSSWFVRVTDFRDRMVELNQQITWYPEHVKDGQFGKWLQGARDWSISRNRYWGTPIPVWKSDDPAYPRIDVYGSLDELERDFGVRPANLHRPYIDELTRPNPDDPTGRSTMRRIPDVLDVWFDSGSMPYAQVHYPFENLDWFQGHYPGDFIVEYIGQTRGWFYTLHVLATALFDRPAFKTCVAHGIVLGFDGQKMSKSLRNYPDVTEVFDRDGSDAMRWFLMASPILRGGNLIVTEQGIRDGVRQVLLPLWNTYSFLALYAPKVGTWRVDSVHVLDRYILAKLAVLRDDLSESMEVYDIPGACEHLRQFTEALTNWYVRRSRSRFWAEDADAIDTLHTVLEVTTRLAAPLLPLITEIIWRGLTRERSVHLTDWPAPDLLPSDADLVAAMDQVRDVCSAASSLRKAKKLRVRLPLPKLIVAVENPQLLRPFVDLIGDELNVKQVELTDAIDTYGRFELTVNARVAGPRLGKDVQAAIKAVKAGDGVINPDGTLLAGPAVLTADEYNSRLVAADPESTAALPDGAGLVVLDGTVTAELEAEGWAKDRIRELQELRKSTGLDVSDRIRVVMSVPAEREDWARTHRDLIAGEILATDFEFADLADGVAIGDGVRVSIEKT

SEQ ID NO: 62618 - protein, 1167 aa, Mycobacterium bovis
SGSSAGSSFVHLHNHTEYSMLDGAAKITPMLAEVERLGMPAVGMTDHGNMFGASEFYNSATKAGIKPIIGVEAYIAPGSRFDTRRILWGDPSQKADDVSGSGSYTHLTMMAENATGLRNLFKLSSHASFEGQLSKWSRMDAELIAEHAEGIIITTGCPSGEVQTRLRLGQDREALEAAAKWREIVGPDNYFLELMDHGLTIERRVRDGLLEIGRALNIPPLATNDCHYVTRDAAHNHEALLCVQTGKTLSDPNRFKFDGDGYYLKSAAEMRQIWDDEVPGACDSTLLIAERVQSYADVWTPRDRMPVFPVPDGHDQASWLRHEVDAGLRRRFPAGPPDGYRERAAYEIDVICSKGFPSYFLIVADLISYARSAGIRVGPGRGSAAGSLVAYALGITDIDPIPHGLLFERFLNPERTSMPDIDIDFDDRRRGEMVRYAADKWGHDRVAQVITFGTIKTKAALKDSARIHYGQPGFAIADRITKALPPAIMAKDIPLSGITDPSHERYKEAAEVRGLIETDPDVRTIYQTARGLEGLIRNAGVHACAVIMSSEPLTEAIPLWKRPQDGAIITGWDYPACEAIGLLKMDFLGLRNLTIIGDAIDNVRANRGIDLDLESVPLDDKATYELLGRGDTLGVFQLDGGPMRDLLRRMQPTGFEDVVAVIALYRPGPMGMNAHNDYADRKNNRQAIKPIHPELEEPLREILAETYGLIVYQEQIMRIAQKVASYSLARADILRKAMGKKKREVLEKEFEGFSDGMQANGFSPAAIKALWDTILPFADYAFNKSHAAGYGMVSYWTAYLKANYPAEYMAGLLTSVGDDKDKAAVYLADCRKLGITVLPPDVNESGLNFASVGQDIRYGLGAVRNVGANVVGSLLQTRNDKGKFTDFSDYLNKIDISACNKKVTESLIKAGAFDSLGHARKGLFPGAQRCGGLGAGHQEGRGTGAFDLFGSNDDGTGTADPVFTIKVPDDEWEDKHKLALEREMLGLYVSGHPLNGVAHLLAAQVDTAIPAILDGDVPNDAQVRVGGILASVNRRVNKNGMPWASAQLEDLTGGIEVMFFPHTYSSYGADIVDDAVVLVNAKVAVRDDRIALIANDLTVPDFSNAEVERPLAVSLPTRQCTFDKVSALKQVLARHPGTSQVHLRLISGDRITTLALDQSLRVTPSPA

SEQ ID NO: 62619 - protein, 437 aa, Mycobacterium bovis
MAAATGGLTPEQIIAVDGAHLWHPYSSIGREAVSPVVAVAAHGAWLTLIRDGQPIEVLDAMSSWWTAIHGHGHPALDQALTTQLRVMNHVMFGGLTHEPAARLAKLLVDITPAGLDTVFFSDSGSVSVEVAAKMALQYWRGRGLPGKRRLMTWRGGYHGDTFLAMSICDPHGGMHSLWTDVLAAQVFAPQEPRDYDPAYSAAFEAQLAQHAGELAAVVREPVVQGAGGMRFHDPRYLHDPRDICRRYEVLLIFDEIATGFGRTGALFAADHAGVSPDIMCVGKALTGGYLSLAATLCTADVAHTISAGAAGALMHGPTFMANPLACAVSVASVELLLGQDWRTRITELAAGLTAGLDTARALPAVTDVRVCGAIGVIECDRPVDLAVATPAALDRGVWLRPFRNLVYAMPPYICTPAEITQITSAMVEVARLVGSLP

SEQ ID NO: 62620 - protein, 262 aa, Mycobacterium bovis
MVAMLFYVDTLPDTGAVAVVDGDEGFHAATVRRIRPGEQLVLGDGVGRLARCVVEQAGRGGLRARVLRRWSVPPVRPPVTVVQALPKSERSELAIELATEAGADAFLAWQAARCVANWDGARVDKGLRRWRAVVRSAARQSRRARIPPVDGVLSTPMLVQRVREEVAAGAAVLVLHEEATERIVDIAAAQAGSLMLVVGPEGGIAPDELAALTDAGAVAVRLGPTVLRTSTAAAVALGAVGVLTSRWDASASDCEYCDVTRR

SEQ ID NO: 62621 - protein, 222 aa, Mycobacterium bovis
MDGNGRWATQRGLARTEGHKMGEAVVIDIACGAIELGIKWLSLYAFSTENWKRSPEEVRFLMGFNRDVVRRRRDTLKKLGVRIRWVGSRPRLWRSVINELAVAEEMTKSNDVITINYCVNYGGRTEITEATREIAREVAAGRLNPERITESTIARHLQRPDIPDVDLFLRTSGEQRSSNFMLWQAAYAEYIFQDKLWPDYDRRDLWAACEEYASRTRRFGSA

SEQ ID NO: 62622 - protein, 484 aa, Mycobacterium bovis
MTDVLRVVVSGCARLPDPSKGVHHPVAPVIDTVVNLAKRRGFVYPSGEIYGGTKSAWDYGPLGVELKENIKRQWWRSVVTGRDDVVGIDSSIILPREVWVASGHVDVFHDPLVESLITHKRYRADHLIEAYEAKHGHPPPNGLADIRDPETGEPGQWTQPREFNMMLKTYLGPIETEEGLHYLRPETAQGIFVNFANVVTTARKKPPFGIGQIGKSFRNEITPGNFIFRTREFEQMEMEFFVEPATAKEWHQYWIDNRLQWYIDLGIRRENLRLWEHPKDKLSHYSDRTVDIEYKFGFMGNPWGELEGVANRTDFDLSTHARHSGVDLSFYDQINDVRYTPYVIEPAAGLTRSFMAFLIDAYTEDEAPNTKGGMDKRTVLRLDPRLAPVKAAVLPLSRHADLSPKARDLGAELRKCWNIDFDDAGAIGRRYRRQDEVGTPFCVTVDFDSLQDNAVTVRERDAMTQDRVAMSSVADYLAVRLKGS

SEQ ID NO: 62623 - protein, 435 aa, Mycobacterium bovis
MTGYYQLLGSIVLIGLGGLFAAIDAAISTVSPARVDELVRDQRPGAGSLRKVMADRPRYVNLVVLLRTSCEITATALLVVFIRYHFSMVWGLYLAAGIMVLASFVVVGVGPRTLGRQNAYSISLATALPLRLISWLLMPISRLLVLLGNALTPGRGFRNGPFASEIELREVVDLAQQRGVVAADERRMIESVFELGDTPAREVMVPRTEMIWIESDKTAGQAMTLAVRSGHSRIPVIGENVDDIVGVVYLKDLVEQTFCSTNGGRETTVARVMRPAVFVPDSKPLDALLREMQRDRNHMALLVDEYGAIAGLVSIEDVLEEIVGEIADEYDQAETAPVEDLGDKRFRVSARLPIEDVGELYGVEFDDDLDVDTVGGLLALELGRVPLPGAEVISHGLRLHAEGGTDHRGRVRIGTVLLSPAEPDGADDEEADHPG

SEQ ID NO: 62624 - protein, 309 aa, Mycobacterium bovis
MFTFGEETGMTEFHSGFVCLVGRPNTGKSTLTNALVGAKVAITSTRPQTTRHAIRGIVHSDDFQIILVDTPGLHRPRTLLGKRLNDLVRETYAAVDVIGLCIPADEAIGPGDRWIVEQLRSTGPANTTLVVIVTKIDKVPKEKVVAQLVAVSELVTNAAEIVPVSAMTGDRVDLLIDVLAAALPAGPAYYPDGELTDEPEEVLMAELIREAALQGVRDELPHSLAVVIDEVSPREGRDDLIDVHAALYVERDSQKGIVIGKGGARLREVGTAARSQIENLLGTKVYLDLRVKVAKNWQRDPKQLGRLGF

SEQ ID NO: 62625 - protein, 1787 aa, Mycobacterium bovis
MSIPCWHWTCVTDSNDQSARRCRWPRSWATSPVMDLSRNSKMPTSAHTPHRKWTFRVTNTADIGARLDEARLELLRRRLADRGLSSAAQDIGPHTDDRLSDGQARMWFVQMADPSGALLNICVSYRITGDIDLARLRDAVNAVARRHRILRTTYPVGDDGVAQPTVHADLRPGWTQYDLTDLSQRAQRLRLEVLAQREFCAPFELSRDAPLRITVVRTAADEHVLLLVAHHIAWDDGSWRVFFTDLTQAYSRADLGADLGPEHRPSAASGPDTTEADLNYWRAIMADPPEPLELPGPAGTCVPTSWRAARATLRLPADTAARVATMAKNTGCTPYMVLLAAFGALVHRYTHSDDFLVAAPVLNRGAGTEDAIGYFGNTVAMRLRPQSAMSFRELLTATRDIASGAFAHQRINLDRVVRELNPDRRHGAERMTRVSFGFREPDGGGFNPPGIECERYDLRSNITQLPLGFMVEFDRAGVLVEAEHLVEILEPALAKQMLRHFGVLLDNALAAPDNTLSGLALMDERDAARLREVSRGERFDTPVKTLVDLVNEQTTRTPDATAVVYEGQHFTYHDLNEASNRLGHWLIEQGIGSEDRVAVLLDKSPDLIVTALGVVKSGAVYVPVDPSYPQDRLDFILADCDAKLVLRTPVRELAGYRSDDPTDADRIRPLRPDNTAYLIYTSGTTGLPKGVAVPHRPVAEYFVWFKGEYDVDDTDRLLQVASPSFDVSIAEIFGTLACGARMVIPRPGGLTDIGYLTALLRDEGITAMHFVPSLLGLFLSLPGVSQWRTLQRVPIGGEPLPGEVADKFHATFDALLHNFYGPTETVINASRFKVVGPQGTRIVPIGRPKINTTMHLLDDSLQPVPTGVIGEIYIGGTHVAYGYHRRAGLTAERFVADPFNPGSRMYRSGDLARRNADGDIEFVGRADEQVKIRGFRIELGDVAAAIAVDPTVGQAVVVVSDLPRLGKSLVGYVTPAAGGDGPADVGVDLDRIRARVAAALPEYMLPAAYVVLDEIPITAHGKIDRAALPEPQIASDTEFRAPQTATERRLAQLFGELLGRDRVGADDSFFDLGGHSLLATKLVAAVRNAFGVDVGVREIFEFATVTALAGHIDTLDSDSARPRLTRVDHDGPVRLSSSQMRSWFNYRFDGPNAVNNIPFAAALHGPCDTNAFAAAITDVVARHEILRTVYREIGGVPHQIIQPPAEVPVRCAAGSDAAWLRAELNNERGYVFDLETDWPIRAALLSTPEQTVLSLVVHHIAGDHWSAGVLFTDLLTAYRARSTGQRPSWAPLPVQYADYSVWQSALLDDGAGIVGPQRDYWIRQLGGLAGETGLRPDFPRPALLSGAGDAVEFRLGAAIRDKLAAVSRDLGVTEFMLLQAAVAVVLHKAGGGVDVPIGAPVAGRSEANLDQLIGFFINIVVLRNDLRGNPTLREVLQRTRQMALAAYAHQDLPFDQVVEAVNPQRSLSRNPLFDIVVHVREQMPQDHVIDTGPDGDTTLRVLEPTFDAAQADLSVNFFACGDEYRGHVIYRTELYERATAQRFADWLVRVVEAFADRPDQPLREVEMVSAQARRRILDRSNAGAGTARVYLLDDALKPVPVGVVGDVYYGGGPAVGARLARPSETATRFVADPFAAQPGSRLYRNGERGVWKADGQLELLAEIERLPTAQAAPVPAEPADTETERALAAILADVLEVGEVGRYDDFFNLGGDSILATQVAARARDGGIPLTARMVFEHPVLCELAAAVDAKPHVEAEPDDKHHAPMSTSGLSPDELSALTASWDQWP

SEQ ID NO: 62626 - protein, 691 aa, Mycobacterium bovis
MTDDERFSLLVGLTGASDLWPVRDERIPQGVPMCAGYVPGIPRLGVPALLMSDAGLGVTNPGYRPGDTATALPAGLALAASFNPVLARSSGKAIGREARSRGFNVQLAGAINLARDPRNGRNFEYLSEDPLLSATMAAESIIGIQQQGVIATTKHFSLNCNETNRHWLDAVIDPDAHRESDLLAFEIVIERSQPGAVMAAYNKVNGDYAAGNDHLLNDVLKGAWGYRGWVMSDWGGTPSWECALAGLDQECGAQIDAVLWQSEAFTDRLRAAYADGNLPKGRLSDMVRRILRSMFAVGIDRWKPAPAPDMNAHNEIAAQMARQGIVLLQNRGLLPLAPESAGRIAVIGGYAHLGVPAGYGSSAVTPPGGYAGVIPIGGSGLAAGLRNLYLLPSSPLSELRKRLPNAQFEFDPGINPAEAVLAARRADIAIVFAIRAEGEGFDSADLSLPWGQDALIAAVASANANTVVVLETGNPVTMPWRDSVNAIMQAWYPGQAGGQAVAEIVTGQVNPSGRLPITFPVDLGQTPRSQPRELGAPWGTSTTIHYTEGADVGYRWFASTNQTPMFAFGHGLSYTSFEYRDLVVTGGHTVHASFSVTNTGDRSGADVPQLYMIAAPGESRLRLLGFERVELEPGQTRRVRIEADPRLLARYDGEARSWRIEPGGYTVAVGASAVALKLAAKVKLAGRGFGR

SEQ ID NO: 62627 - protein, 279 aa, Mycobacterium bovis
MTTTRTERNFAGIGDVRIVYDVWTPDTAPQAVVVLAHGLGEHARRYDHVAQRLGAAGLVTYALDHRGHGRSGGKRVLVRDISEYTADFDTLVGIATREYPGCKRIVLGHSMGGGIVFAYGVERPDNYDLMVLSAPAVAAQDLVSPVVAVAAKLLGVVVPGLPVQELDFTAISRDPEVVQAYNTDPLVHHGRVPAGIGRALLQVGETMPRRAPALTAPLLVLHGTDDRLIPIEGSRRLVECVGSADVQLKEYPGLYHEVFNEPERNQVLDDVVAWLTERL

SEQ ID NO: 62628 - protein, 265 aa, Mycobacterium bovis
LIKHDVVWVTLWPERPNNKPPPSPRQVPGNPGPTLKVLASHVNAPLSAKPRSQLPLRRAQLSDEVAGHLRAAIMSGALRSGTFIRLDETAAELGVSVTPVREALLKLRGEGMVGLEPHRGHVVLPLTRQDIDDIFWLQATIAQELATSATAHITDVEIDELDRINNALAGAIGSGDAKTIASIEFAFHRVFNKASRRIKLAWFLLNAARYMPGAGVRGRPAMGRGRGEQSSAADRRAAPPRHSRRNRAHRLAVHRWGTQADGGPG

SEQ ID NO: 62629 - protein, 366 aa, Mycobacterium bovis
MTDPQTQSTRVGVVAESGPDERRVALVPKAVASLVNRGVAVVVEAGAGERALLPDELYTAVGASIGDAWAADVVVKVAPPTAAEVGRLRGGQTLIGFLAPRNADNSIGALTQAGVQAFALEAIPRISRAQVMDALSSQANVSGYKAVLLAASESTRFFPMLTTAAGTVKPATVLVLGVGVAGLQALATAKRLGARTTGYDVRPEVADQVRSVGAQWLDLGISASGEGGYARELTDDERAQQQKALEEAISGFDVVITTALVPGRPAPTLVTAAAVEAMKPGSVVVDLAGETGGNCELTEPGRTVVKHDVTIAAPLNLPATMPEHASELYSKNITALLDLLIKDGRLAPDFDDEVIAQSCVTRGKDS

SEQ ID NO: 62630 - protein, 394 aa, Mycobacterium bovis
  MISC_FEATURE (381)..(381): X=any amino acid
  MISC_FEATURE (389)..(389): X=any amino acid
ATTTRPWTPRIATQLSVLACAAFIYVTAEILPVGALSAIARNLRVSVVLVGTLLSWYALVAAVTTVPLVRWTAHWPRRRALVVSLVCLTVSQLVSALAPNFAVLAAGRVLCAVTHGLLWAVIAPIATRLVPPSHAGRATTSIYIGTSLALVVGSPLTAAMSLMWGWRLAAVCVTGAAAAVALAARLALPEMVLRADQLEHVGRRARHHRNPRLVKVSVLTMIAVTGHFVSYTYIVVIIRDVVGVRGPNLAWLLAAYGVAGLVSVPLVARPLDRWPKGAVIVGMTGLTAAFTLLTALAFGERHTAATALLGTGAIVLWGALATAVSPMLQSAAMRSGGDDPDGASGLYVTAFQIGIMAGALLGGLLYERSLAMDADRVGGFXWVLRCSGXRLAST

SEQ ID NO: 62631 - protein, 96 aa, Mycobacterium bovis
MTAAHGYTQQKDNYAKRLRRVEGQVRGIARMIEEDKYCIDVLTQISAVTSALRSVALNLLDEHLSHCVTRAVAEGGPGADGKLAEASAAIARLVRS

SEQ ID NO: 62632 - protein, 575 aa, Mycobacterium bovis
MPQTTDEAASVSTVADIKPRSRDVTDGLEKAAARGMLRAVGMDDEDFAKPQIGVASSWNEITPCNLSLDRLANAVKEGVFSAGGYPLEFGTISVSDGISMGHEGMHFSLVSREVIADSVEVVMQAERLDGSVLLAGCDKSLPGMLMAAARLDLAAVFLYAGSILPGRAKLSDGSERDVTIIDAFEAVGACSRGLMSRADVDAIERAICPGEGACGGMYTANTMASAAEALGMSLPGSAAPPATDRRRDGFARRSGQAVVELLRRGITARDILTKEAFENAIAVVMAFGGSTNAVLHLLAIAHEANVALSLQDFSRIGSGVPHLADVKPFGRHVMSDVDHIGGVPVVMKALLDAGLLHGDCLTVTGHTMAENLAAITPPDPDGKVLRALANPIHPSGGITILHGSLAPEGAVVKTAGFDSDVFEGTARVFDGERAALDALEDGTITVGDAVVIRYEGPKGGPGMREMLAITGAIKGAGLGKDVLLLTDGRFSGGTTGLCVGHIAPEAVDGGPIALLRNGDRIRLDVAGRVLDVLADPAEFASRQQDFSPPPPRYTTGVLSKYVKLVSSAAVGAVCG

SEQ ID NO: 62633 - protein, 397 aa, Mycobacterium bovis
MGASGLVWTLTIVLIAGLMLVDYVLHVRKTHVPTLRQAVIQSATFVGIAILFGIAVVVFGGSELAVEYFACYLTDEALSVDNLFVFLVIISSFGVPRLAQQKVLLFGIAFALVTRTGFIFVGAALIENFNSAFYLFGLVLLVMAGNLARPTGLESRDAETLKRSVIIRLADRFLRTSQDYNGDRLFTVSNNKRMMTPLLLVMIAVGGTDILFAFDSIPALFGLTQNVYLVFAATAFSLLGLRQLYFLIDGLLDRLVYLSYGLAVILGFIGVKLMLEALHDNKIPFINGGKPVPTVEVSTTQSLTVIIIVLLITTAASFWSARGRAQNAMARARRYATAYLDLHYETESAERDKIFTALLAAERQINTLPTKYRMQPGQDDDLMTLLCRAHAARDAHM

SEQ ID NO: 62634 - protein, 46 aa, Mycobacterium bovis
VTKGKRTFQPNNRRRARVHGFRLRMRTRAGRSIVSSRRRKGRRTLS

SEQ ID NO: 62635 - protein, 309 aa, Mycobacterium bovis
MSAGQLRRHEIGKVTALTNPLSGHGAAVKAAHGAIARLKHRGVDVVEIVGGDAHDARHLLAAAVAKGTDAVMVTGGDGVVSNALQVLAGTDIPLGIIPAGTGNDHAREFGLPTKNPKAAADIVVDGWTETIDLGRIQDDNGIEKWFGTVAATGFDSLVNDRANRMRWPHGRMRYYIAMLAELSRLRPLPFRLVLDGTEEIVADLTLADFGNTRSYGGGLLICPNADHSDGLLDITMAQSDSRTKLLRLFPTIFKGAHVELDEVSTTRAKTVHVECPGINVYADGDFACPLPAEISAVPAALQVLRPRHG

SEQ ID NO: 62636 - protein, 750 aa, Mycobacterium bovis [sequence omitted]

SEQ ID NO: 62637 - protein, 256 aa, Mycobacterium bovis
MNHPDLAGKVAIVTGAGAGIGLAVARRLADEGCHVLCADIDGDAADAAATKIGCGAAACRVDVSDEQQIIAMVDACVAAFGGVDKLVANAGVVHLASLIDTTVEDFDRVIAINLRGAWLCTKHAAPRMIERGGGAIVNLSSLAGQVAVGGTGAYGMSKAGIIQLSRITAAELRSSGIRSNTLLPAFVDTPMQQTAMAMFDGALGAGGARSMIARLQGRMAAPEEMAGIVVFLLSDDASMITGTTQIADGGTIAALW

SEQ ID NO: 62638 - protein, 429 aa, Mycobacterium bovis
MHSDVPSYGNLGRLGGRHEYGVLVAMTSSAELDRVRWAHQLRSYRIASVLRIGVVGLMVAAMVVGTSRSEWPQQIVLIGVYAVAALWALLLAYSASRRFFALRRFRSMGRLEPFAFTAVDVLILTGFQLLSTDGIYPLLIMILLPVLVGLDVSTRRAAVVLACTLVGFAVAVLGDPVMLRAIGWPETIFRFALYAFLCATALMVVRIEERHTRSVAGLSALREELLAQTMTASEVLQRRIAEAIHDGPLQDVLAARQELIELDAVTPGDERVGRALAGLQSASERLRQATFELHPAVLEQVGLGPAVKQLAASTAQRSGIKISTDIDYPIRSGIDPIVFGVVRELLSNVVRHSGATTASVRLGITDEKCVLDVADDGVGVTGDTMARRLGEGHIGLASHRARVDAAGGVLVFLATPRGTHVCVELPLKR

SEQ ID NO: 62639 - protein, 691 aa, Mycobacterium bovis
MSSPDADQTAPEVLRQWQALAEEVREHQFRYYVRDAPIISDAEFDELLRRLEALEEQHPELRTPDSPTQLVGGAGFATDFEPVDHLERMLSLDNAFTADELAAWAGRIHAEVGDAAHYLCELKIDGVALSLVYREGRLTRASTRGDGRTGEDVTLNARTIADVPERLTPGDDYPVPEVLEVRGEVFFRLDDFQALNASLVEEGKAPFANPRNSAAGSLRQKDPAVTARRRLRMICHGLGHVEGFRPATLHQAYLALRAWGLPVSEHTTLATDLAGVRERIDYWGEHRHEVDHEIDGVVVKVDEVALQRRLGSTSRAPRWAIAYKYPPEEAQTKLLDIRVNVGRTGRITPFAFMTPVKVAGSTVGQATLHNASEIKRKGVLIGDTVVIRKAGDVIPEVLGPVVELRDGSEREFIMPTTCPECGSPLAPEKEGDADIRCPNARGCPGQLRERVFHVASRNGLDIEVLGYEAGVALLQAKVIADEGELFALTERDLLRTDLFRTKAGELSANGKRLLVNLDKAKAAPLWRVLVALSIRHVGPTAARALATEFGSLDAIAAASTDQLAAVEGVGPTIAAAVTEWFAVDWHREIVDKWRAAGVRMVDERDESVPRTLAGLTIVVTGSLTGFSRDDAKEAIVARGGKAAGSVSKKTNYVVAGDSPGSKYDKAVELGVPILDEDGFRRLLADGPASRT

SEQ ID NO: 62640 - protein, 1155 aa, Mycobacterium bovis
MAFATLISRITGFARIVLLAAILGAALASSFSVANQLPNLVAALVLEATFTAIFVPVLARAEQDDPDGGAAFVRRLVTLATTLLLGATTLSVLAAPLLVRLMLGTNPQVNEPLTTAFAYLLLPQVLVYGLSSVFMAILNTRNVFGPPAWAPVVNNVVAIATLAVYLAVPGELSVDPVRMGNAKLLVLGIGTTAGVFAQTAVLLVAIRREHISLRPLWGIDQRLKRFGAMAAAMVLYVLISQLGLVVGNRIASTAAASGPAIYNYTWLVLMLPFGMIGVTVLTVVMPRLSRNAAADDTPAVLADLSLATRLTMITLIPTVAFMTVGGPAIGSALFAYGNFGDVDAGYLGAAIALSAFTLIPYALVLVQLRVFYAREQAWTPITIIVVITGVKILGSLLAPHITGDPQLVAAYLGLANGLGFLAGTIVGYYILRRALRPDGGQLIGVGEARTALVTVAASLLAGLLAHVADRLLGLSELTAHAGSVGSLLRLSVLALIMLPILAAVTLCARVPEARAALDAVRARIRSRRLKTGPQTQNVLDQSSRPGPVTYPERRRLAPPRGKSVVHEPIRRRPPEQVARAGRAKGPEVIDRPSENASFGAASGAELPRPVADELQLDAPAGRDPGPVSRPHPSDLQNGDLPADAARGPIAFDALREPDRESSAPPDDVQLVPGARIANGRYRLLIFHGGVPPLQFWQALDTALDRQVALTFVDPQGVLPDDVLQETLSRTLRLSRIDKPGVARVLDVVHTRAGGLVVAEWIRGGSLQEVADTSPSPVGAIRAMQSLAAAADAAHRAGVALSIDHPSRVRVSIDGDVVLAYPATMPDANPQDDIRGIGASLYALLVNRWPLPEAGVRSGLAPAERDTAGQPIEPADIDRDIPFQISAVAARSVQGDGGIRSASTLLNLMQQATAVADRTEVLGPIDEAPVSAAPRTSAPNSETYTRRRRNLLIGIGAGAAVLMVALLVLASVLSRIFGDVSGGLNKDELGLNAPTASTSAASSAPPGSVVKPTKVTVFSPDGGADNPGEADLAIDGNPATSWKTDIYTDPVPFPSFKNGVGLMLQLPQATVVGTVAIDVASTGTKVEIRSASTPTPATLEDTAVLTSATALRPGHNTISVEAAAPTSNLLVWISTLGTTDGKSQADISEITIYAAS

SEQ ID NO: 62641 - protein, 690 aa, Mycobacterium bovis
MADSSAIYLAAPESQTGKSTIALGLLHRLTAMVAKVGVFRPITRLSAERDYILELLLAHTSAGLPYERCVGVTYQQLHADRDDAIAEIVDSYHAMADECDAVVVVGSDYTDVTSPTELSVNARIAVNLGAPVLLTVRAKDRTPDQVASVVEVCLAELDTQRAHTAAVVANRCELSAIPAVTDALRRFTPPSYVVPEEPLLSAPTVAELTQAVNGAVVSGDVALREREVMGVLAAGMTADHVLERLTDGMAVITPGDRSDVVLAVASAHAAEGFPSLSCIVLNGGFQLHPAIAALVSGLRLRLPVIATALGTYDTASAAASARGLVTATSQRKIDTALELMDRHVDVAGLLAQLTIPIPTVTTPQMFTYRLLQQARSDLMRIVLPEGDDDRILKSAGRLLQRGIVDLTILGDEAKVRLRAAELGVDLDGATVIEPCASELHDQFADQYAQLRKAKGITVEHAREIMNDATYFGTMLVHNCHADGMVSGAAHTTAHTVRPALEIIKTVPGISTVSSIFLMCLPDRVLAYGDCAIIPNPTVEQLADIAICSARTAAQFGIEPRVAMLSYSTGDSGKGADVDKVRAATELVRAREPQLPVEGPIQYDAAVEPSVAATKLRDSPVAGRATVLIFPDLNTGNNTYKAVQRSAGAIAIGPVLQGLRKPVNDLSRGALVDDIVNTVAITAIQAQGVHE

SEQ ID NO: 62642 - protein, 368 aa, Mycobacterium bovis
MEDRKDDRKMSTPTLPDMVAPSPRVRVKDRCRRMMGDLRLSVIDQCNLRCRYCMPEEHYTWLPRQDLLSVKEISAIVDVFLSVGVSKVRITGGEPLIRPDLPEIVRTLSAKVGEDSGLRDLAITTNGVLLADRVDGLKAAGMKRITVSLDTLQPERFKAISQRNSHDKVIAGIKAVAAAGFTDTKIDTTVMRGANHDELADLIEFARTVNAEVRFIEYMDVGGATHWAWEKVFTKANMLESLEKRYGRIEPLPKHDTAPANRYALPDGTTFGIIASTTEPFCATCDRSRLTADGLWLHCLYAISGINLREPLRAGATHDDLVETVTTGWRRRADRGAEQRLAQRERGVFLPLSTLKADPHLEMHTRGG

SEQ ID NO: 62643 - protein, 324 aa, Mycobacterium bovis
MGLSIGIVGATGQVGQVMRTLLDERDFPASAVRFFASARSQGRKLAFRGQEIEVEDAETADPSGLDIALFSAGSAMSKVQAPRFAAAGVTVIDNSSAWRKDPDVPLVVSEVNFERDAHRRPKGIIANPNCTTMAAMPVLKVLHDEARLVRLVVSSYQAVSGSGLAGVAELAEQARAVIGGAEQLVYDGGALEFPPPNTYVAPIAFNVVPLAGSLVDDGSGETDEDQKLRFESRKILGIPDLLVSGTCVRVPVFTGHSLSINAEFAQPLSPERARELLDGATGVQLVDVPTPLAAAGVDESLVGRIRRDPGVPRRAWSGAVRVGG

SEQ ID NO: 62644 - protein, 122 aa, Mycobacterium bovis
MTKKPRNPADYVIGDDVEVSDVDLKQEEVYVDGERLTDERVEQMASESLRLAREREANLIPGGKSLSGGSAHSPAVQVVVSKATHAKLKELARSRKMSVSKLLRPVLDEFVQRETGRILPRR

SEQ ID NO: 62645 - protein, 263 aa, Mycobacterium bovis
MSENSHHRLATTSLTLPPGARIERHRHPSHQIVYPSAGAVSVTTHAGTWITPVNRAIWIPAGCWHQHKFHGHTQFHGVALDPQRYRGGPATPTVLAVNPLMRELIIACSQADRTDTDEHHRMLAVLQDQLPTTSIREPLWVPSPTDRRLRHACALIADNLTQPLTLQQIGGRIGVSQRTLSRLFSDELGMTFPQWRTQLRLQHALVLLAERHDVTSVASECGWATPSAFIDTYRQAFGHTPGQAAKPMAATRLTRLRRARDRR

SEQ ID NO: 62646 - protein, 442 aa, Mycobacterium bovis
MSDPARGAEAEDAYGFPAGLWRWLQRHPPPALHRLTRFRSPLRGPWLTSVFGLVLLVALPFVIITGLLSYIAYAPQLGQAIPGDVGWLRLPAFTWPTRPSWLYRLTQGLHVGLGLVIIPVVLAKLWSVIPRLFVWPPARSIAQVLERLSVLMLVGGILFQIVTGVLNIQYDYIFGFSFYTGHYFGAWVFIAGFLLHIVVKIPHMVTGLRSIPMREVLGTNVADTRAQPCDPDGLVSVNPGEATLSRRGALGLVGAGVLLIGVLTVGQTLGGFTRKAALLLPRGRVVSPGDFPVNKTAAAAGITAEAIGPDWRLVLRGGPAEVVLDRATLAGLPQRTARLPLACVEGWSAVRTWSGVPLAELALLAGVPAARSARVTSLQRGGAFGEAKLAANQIADPDALLALRVDGADLSLNHGYPARIIVPALPGVHNTKWVAGIEFHKR

SEQ ID NO: 62647 - protein, 771 aa, Mycobacterium bovis
MPTGLGYDFLRPVEDSGINDLKHYYFMADLADGQPLGRANLYSVCFDLATTDRKLTPAWRTTIKRWFPGFMTFRFLECGLLTMVSNPLALRSDTDLERVLPVLAGQMDQLAHDDGSDFLMIRDVDPEHYQRYLDILRPLGFRPALGFSRVDTTISWSSVEEALGCLSHKRRLPLKTSLEFRERFGIEVEELDEYAEHAPVLARLWRNVKTEAKDYQREDLNPEFFAACSRHLHGRSRLWLFRYQGTPIAFFLNVWGADENYILLEWGIDRDFEHYRKANLYRAALMLSLKDAISRDKRRMEMGITNYFTKLRIPGARVIPTIYFLRHSTDPVHTATLARMMMHNIQRPTLPDDMSEEFCRWEERIRLDQDGLPEHDIFRKIDRQHKYTGLKLGGVYGFYPRFTGPQRSTVKAAELGEIVLLGTNSYLGLATHPEVVEASAEATRRYGTGCSGSPLLNGTLDLHVSLEQELACFLGKPAAVLCSTGYQSNLAAISALCESGDMIIQDALNHRSLFDAARLSGADFTLYRHNDMDHLARVLRRTEGRRRIIVVDAVFSMEGTVADLATIAELADRHGCRVYVDESHALGVLGPDGRGASAALGVLARMDVVMGTFSKSFASVGGFIAGDRPVVDYIRHNGSGHVFSASLPPAAAAATHAALRVSRREPDRRARVLAAAEYMATGLARQGYQAEYHGTAIVPVILGNPTVAHAGYLRLMRSGVYVNPVAPPAVPEERSGFRTSYLADHRQSDLDRALHVFAGLAEDLTPQGAAL

SEQ ID NO: 62648 - protein, 326 aa, Mycobacterium bovis
ASNGCPVVGHMKYPVEGGGNQDWWPNRLNLKVLHQNPAVADPMGAAFDYAAEVATIDVDALTRDIEEVMTTSQPWWPADYGHYGPLFIRMAWHAAGTYRIHDGRGGAGGGMQRFAPLNSWPDNASLDKARRLLWPVKKKYGKKLSWADLIVFAGNCALESMGFKTFGFGFGRVDQWEPDEVYWGKEATWLGDERYSGKRDLENPLAAVQMGLIYVNPEGPNGNPDPMAAAVDIRETFRRMAMNDVETAALIVGGHTFGKTHGAGPADLVGPEPEAAPLEQMGLGWKSSYGTGTGKDAITSGIEVVWTNTPTKWDNSFLEILYGYEW

SEQ ID NO: 62649 - protein, 336 aa, Mycobacterium bovis
MSTPTGSRRIFSGVQPTSDSLHLGNALGAVAQWVGLQDDHDAFFCVVDLHAITIPQDPEALRRRTLITAAQYLALGIDPGRATIFVQSQVPAHTQLAWVLGCFTGFGQASRMTQFKDKSARQGSEATTVGLFTYPVLQAADVLAYDTELVPVGEDQRQHLELARDVAQRFNSRFPGTLVVPDVLIPKMTAKIYDLQDPTSKMSKSAGTDAGLINLLDDPALSAKKIRSAVTDSERDIRYDPDVKPGVSNLLNIQSAVTGTDIDVLVDGYAGHGYGDLKKDTAEAVVEFVNPIQARVDELTADPAELEAVLAAGAQRAHDVASKTVQRVYDRLGFLL

SEQ ID NO: 62650 - protein, 466 aa, Mycobacterium bovis
MSRGRIPRLGAAVLVALTTAAAACGADSQGLVVSFYTPATDGATFTAIAQRCNQQFGGRFTIAQVSLPRSPNEQRLQLARRLTGNDRTLDVMALDVVWTAEFAEAGWALPLSDDPAGLAENDAVADTLPGPLATAGWNHKLYAAPVTTNTQLLWYRPDLVNSPPTDWNAMIAEAARLHAAGEPSWIAVQANQGEGLVVWFNTLLVSAGGSVLSEDGRHVTLTDTPAHRAATVSALQILKSVATTPGADPSITRTEEGSARLAFEQGKAALEVNWPFVFASMLENAVKGGVPFLPLNRIPQLAGSINDIGTFTPSDEQFRIAYDASQQVFGFAPYPAVAPGQPAKVTIGGLNLAVAKTTRHRAEAFEAVRCLRDQHNQRYVSLEGGLPAVRASLYSDPQFQAKYPMHAIIRQQLTDAAVRPATPVYQALSIRLAAVLSPITEIDPESTADELAAQAQKAIDGMGLLP

SEQ ID NO: 62651 - protein, 790 aa, Mycobacterium bovis
MTQTPDREKALELAVAQIEKSYGKGSVMRLGDEARQPISVIPTGSIALDVALGIGGLPRGRVIEIYGPESSGKTTVALHAVANAQAAGGVAAFIDAEHALDPDYAKKLGVDTDSLLVSQPDTGEQALEIADMLIRSGALDIVVIDSVAALVPRAELEGEMGDSHVGLQARLMSQALRKMTGALNNSGTTAIFINQLRDKIGVMFGSPETTTGGKALKFYASVRMDVRRVETLKDGTNAVGNRTRVKVVKNKCLAEGTRIFDPVTGTTHRIEDVVDGRKPIHVVAAAKDGTLHARPVVSWFDQGTRDVIGLRIAGGAIVWATPDHKVLTEYGWRAAGELRKGDRVAQPRRFDGFGDSAPIPADHARLLGYLIGDGRDGWVGGKTPINFINVQRALIDDVTRIAATLGCAAHPQGRISLAIAHRPGERNGVADLCQQAGIYGKLAWEKTIPNWFFEPDIAADIVGNLLFGLFESDGWVSREQTGALRVGYTTTSEQLAHQIHWLLLRFGVGSTVRDYDPTQKRPSIVNGRRIQSKRQVFEVRISGMDNVTAFAESVPMWGPRGAALIQAIPEATQGRRRGSQATYLAAEMTDAVLNYLDERGVTAQEAAAMIGVASGDPRGGMKQVLGASRLRRDRVQALADALDDKFLHDMLAEELRYSVIREVLPTRRARTFDLEVEELHTLVAEGVVVHNCSPPFKQAEFDILYGKGISREGSLIDMGVDQGLIRKSGAWFTYEGEQLGQGKENARNFLVENADVADEIEKKIKEKLGIGAVVTDDPSNDGVLPAPVDF

SEQ ID NO: 62652 - protein, 119 aa, Mycobacterium bovis
MPKSLPVIDISAPVCCAPVAAGPMSDGDALAVALRLKALADPARVKIMSYLFSSPAGEQVSGQLAAALSLSDGTVSHHLAQLRKAGLVISDRRGMHVFHRVHPEALQALCTVLNPNCCA

SEQ ID NO: 62653 - protein, 284 aa, Mycobacterium bovis
MDADDRLGELLEQLNQSGLRPDAIVFTGDLADKGEPAAYRKLRGLVEPFAAQLGAELVWVMGNHDDRAELRKFLLDEAPSMAPLDRVCMIDGLRIIVLDTSVPGHHHGEIRASQLGWLAEELATPAPDGTILALHHPPIPSVLDMAVTVELRDQAALGRVLRGTDVRAILAGHLHYSTNATFVGIPVSVASATCYTQDLTVAAGGTRGRDGAQGCNLVHVYPDTVVHSVIPLGGGETVGTFVSPGQARRKIAESGIFIEPSRRDSLFKHPPMVLTSSAPRSPVD

SEQ ID NO: 62654 - protein, 421 aa, Mycobacterium bovis
MILDELSWRGLIAQSTDLDTLAAEAQRGPMTVYAGFDPTAPSLHAGHLVPLLTLRRFQRAGHRPIVLAGGATGMIGDPRDVGERSLNEADTVAEWTERIRGQLERFVDFDDSPMGAIVENNLEWTGSLSAIEFLRDIGKHFSVNVMLARDTIRRRLAGEGISYTEFSYLLLQANDYVELHRRHGCTLQIGGADQWGNIIAGVRLVRQKLGATVHALTVPLVTAADGTKFGKSTGGGSLWLDPQMTSPYAWYQYFVNTADADVIRYLRWFTFLSADELAELEQATAQRPQQRAAQRRLASELTVLVHGEAATAAVEHASRALFGRGELARLDEATLAAALRETTVAELKPGSPDGIVDLLVASGLSASKGAARRTIHEGGVSVNNIRVDNEEWVPQSSDFLHGRWLVLRRGKRSIAGVERIG

SEQ ID NO: 62655 - protein, 406 aa, Mycobacterium bovis
MTIVSEKGRLFTSESVTEGHPDKICDAISDSVLDALLAADPRSRVAVETLVTTGQVHVVGEVATSAKEAFADITNTVRARILEIGYDSSDKGFDGATCGVNIGIGAQSPDIAQGVDTAHEARVEGAADPLDSQGAGDQGLMFGYAINATPELMPLPIALAHRLSRRLTEVRKNGVLPYLRPDGKTQVTIAYEDNVPVRLDTVVISTQHAADIDLEKTLDPDIREKVLNTVLDDLAHETLDASTVRVLVNPTGKFVLGGPMGDAGLTGRKIIVDTYGGWARHGGGAFSGKDPSKVDRSAAYAMRWVAKNVVAAGLAERVEVQVAYAIGKAAPVGLFVETFGTETEDPVKIEKAIGEVFDLRPGAIIRDLNLLRPIYAPTAAYGHFGRTDVELPWEQLDKVDDLKRAI

SEQ ID NO: 62656 - protein, 167 aa, Mycobacterium bovis
MLIAGGVNAAMLLVAALNMRGRGDTASIEGAYHAVHDTLGATIAVLFAVGLLASGLASSSVGAYAGAMIMQGLLHWSVPMLVRRLITLGPALAILTLGFDPTRTLVLSQVVLSFGIPFAVLPLVKLTGSPAVMGGDTNHRATTWVGWVVAVMVSLLNVMLIYLTVTG

SEQ ID NO: 62657 - protein, 623 aa, Mycobacterium bovis
MCNDTATPQLEELVTTVANQLMTVDAATSAEVSQRVLAYLVEQLGVDVSFLRHNDRDRRATRLVAEWPPRLNIPDPDPLRLIYFADADPVFALCEHAKEPLVFRPEPATEDYQRLIEEARGVPVTSAAAVPLVSGEITTGLLGFIKFGDRKWHEAELNALMTIATLFAQVQARVAAEARLRYLADHDDLTGLHNRRALLQHLDQRLAPGQPGPVAALFLDLDRLKAINDYLGHAAGDQFIHVFAQRIGDALVGESLIARLGGDEFVLIPASPMSADAAQPLAERLRDQLKDHVAIGGEVLTRTVSIGVASGTPGQHTPSDLLRRADQAALAAKHAGGDSVAIFTADMSVSGELRNDIELHLRRGIESDALRLVYLPEVDLRTGDIVGTEALVRWQHPTRGLLAPGCFIPVAESINLAGELDRWVLRRACNEFSEWQSAGLGHDALLRINVSAGQLVTGGFVDFVADTIGQHGLDASSVCLEITENVVVQDLHTARATLARLKEVGVHIAIDDFGTGYSAISLLQTLPIDTLKIDKTFVRQLGTNTSDLVIVRGIMTLAEGFQLDVVAEGVETEAAARILLDQRCYRAQGFLFSRPVPGEAMRHMLSARRLPPTCIPATDPALS

SEQ ID NO: 62658 - protein, 161 aa, Mycobacterium bovis
MSDEGDVADEAVADGAENADSRGSGGRTALVTKPVVRPQRPTGKRSRSRAAGADADVDVEEPSTAASEATGVAKDDSTTKAVSKAARAKKASKPKARSVNPIAFVYNYLKQVVAEMRKVIWPNRKQMLTYTSVVLAFLAFMVALVAGADLGLTKLVMLVFG

SEQ ID NO: 62659 - protein, 238 aa, Mycobacterium bovis
MTTFDGDTSAGEAVDLTEANAFQDAAAPAEEVDPAAALKAELRSKPGDWYVVHSYAGYENKVKANLETRVQNLDVGDYIFQVEVPTEEVTEIKNGQRKQVNRKVLPGYILVRMDLTDDSWAAVRNTPGVTGFVGATSRPSALALDDVVKFLLPRGSTRKAAKGAASTAAAAEAGGLERPVVEVDYEVGESVTVMDGPFATLPATISEVNAEQQKLKVLVSIFGRETPVELTFGQVSKI

SEQ ID NO: 62660 - protein, 142 aa, Mycobacterium bovis
MAPKKKVAGLIKLQIVAGQANPAPPVGPALGQHGVNIMEFCKAYNAATENQRGNVIPVEITVYEDRSFTFTLKTPPAAKLLLKAAGVAKGSAEPHKTKVAKVTWDQVREIAETKKTDLNANDVDAAAKIIAGTARSMGITVE

SEQ ID NO: 62661 - protein, 227 aa, Mycobacterium bovis
MSKTSKAYRAAAAKVDRTNLYTPLQAAKLAKETSSTKQDATVEVAIRLGVDPRKADQMVRGTVNLPHGTGKTARVAVFAVGEKADAAVAAGADVVGSDDLIERIQGGWLEFDAAIAAPDQMAKVGRIARVLGPRGLMPNPKTGTVTADVAKAVADIKGGKINFRVDKQANLHFVIGKASFDEKLLAENYGAAIDEVLRLKPSSSKGRYLKKITVSTTTGPGIPVDPF

SEQ ID NO: 62662 - protein, 259 aa, Mycobacterium bovis
MTGFTEIAAVGPLLVAVGVCLLAGLVSFASPCVVPLVPGYLSYLAAVVGVDEQLPAGVVKPPVAARWRVAGSAALFVAGFTTVFVLGTVAVLGMTTTLITNQLLLQRVGGVLIVVMGLVFVGFIGALQRQARFTPRQLTSVAGAPVLGAVFALGWTPCLGPTLTGVITVASATEGASVARGIVLVIAYCLGLGIPFVLLAFGSAWAVAGLGWLRRHTRAIQIFGGALLIAVGAALVTGVWNDVVSWLRDAFVSDVRLPI

SEQ ID NO: 62663 - protein, 324 aa, Mycobacterium bovis
MNTLHVNVGLARYSDWAFTSAVVALVVALLLLAFEFAQVRGRGLAPLAVPAGSVATDSATPGIVADQRHRPFDERVGRGGLAVAYLGIGLLLACVVLRGLATQRVPWGNMYEFINLTCLSGLIAGAVVLRRARYRPLWVFLLVPVLILLTVSGRWLYANAAPVMPALQSYWLPIHVSVVSLGSGVFLVAGVASILFLVRTSRLGEPTGEGALAGMVRRLPDAQTLDGIAYRTTIFAFPVFGFGVIFGAIWAEEAWGRYWGWDPKETVSFVAWVVYAAYLHARSTAGWRDRKAAWINVAGFVAMVFNLFFVNLVTVGLHSYAGVG

SEQ ID NO: 62664 - protein, 434 aa, Mycobacterium bovis
MIAIGGVIGAGLFVGSGVVIRATGPAAFLTYALCGALIVLVMRMLGEMAAANPSTGAFADYAAKALGGWAGFSVGWLYWYFWVIVVGFEAVAGGKVLTYWIDAPLWLASLCLMMMMTATNLVSVSSFGEFEFWFAGVKVATIVGFLVLGTAFAFGLLPGHGMDFSNLSAHGGFFPDGVGAVFAAIVVAIFSMTGTEVVTIAAAEAPDPQRAVQRAMSTVVARIVIFFVGSVFLLTVILPWNSLELGASPYVAALRHMGIGGADQIMNAVVLTAVLSCLNSGLYTASRMLFVLAARQEAPAQLVKVNRRGVPTFAIMGSSVVGFLCVIMAWVSPATVFVFLLNSSGAVILFVYLLIALSQIVLRRQTSGQNLGVRMWLFPGLSIVTVTGIVAVLARMAFDYAARSQLWLSLLSWAVVVGCYLVTTLVRRPLNRPW

SEQ ID NO: 62665 - protein, 347 aa, Mycobacterium bovis
MNIDMAALHAIEVDRGISVNELLETIKSALLTAYRHTQGHQTDARIEIDRKTGVVRVIARETDEAGNLISEWDDTPEGFGRIAATTARQVMLQRFRDAENERTYGEFSTREGEIVAGVIQRDSRANARGLVVVRIGTETKASEGVIPAAEQVPGESYEHGNRLRCYVVGVTRGAREPLITLSRTHPNLVRKLFSLEVPEIADGSVEIVAVAREAGHRSKIAVRSNVAGLNAKGACIGPMGQRVRNVMSELSGEKIDIIDYDDDPARFVANALSPAKVVSVSVIDQTARAARVVVPDFQLSLAIGKEGQNARLAARLTGWRIDIRGDAPPPPPGQPEPGVSRGMAHDR

SEQ ID NO: 62666 - protein, 405 aa, Mycobacterium bovis
MTENPYLVGLRLAGKKVVVVGGGTVAQRRLPLLIASGADVHVIAPSVTPAVEAMDQITLSVRDYRDGDLDGAWYAIAATDDARVNVAVVAEAERRRIFCVRADIAVEGTAVTPASFSYAGLSVGVLAGGEHRRSAAIRSAIREALQQGVITAQSSDVLSGGVALVGGGPGDPELITVRGRRLLAQADVVVADRLAPPELLAELPPHVEVIDAAKIPYGRAMAQDAINAVLIERARSGNFVVRLKGGDPFVFARGYEEVLACAHAGIPVTVVPGVTSAIAVPAMAGVPVTHRAMTHEFVVVSGHLAPGHPESLVNWDALAALTGTIVLLMAVERIELFVDVLLKGGRTADTPVLVVQHGTTAAQQTLRATLADTPEKVRAAGIRPPAIIVIGAVVGLSGVRGLNNS

SEQ ID NO: 62667 - protein, 578 aa, Mycobacterium bovis
MSELFLRTLRDDPADAEVASHKLLIRAGYIRPVAPGLYSWLPLGLRVLRNIERVIRDEMNAIGGQEILFPALLPRAPYETTNRWTQYGDSVFRLKDRRGNDYLLGPTHEELFTLTVKGEYSSYKDFPLTLYQIQTKYRDEARPRAGILRAREFVMKDSYSFDIDAAGLKAAYRAHREAYQRIFDRLQVRYVIVSAVSGAMGGSASEEFLAESPSGEDAFVRCLESGYTANVEAVVTARPDTLPIDGLPEAVVHDTGDTPTIASLVAWANEADLGRTVTAADTLKNVLIKVRQPGGDTELLAIGVPGDREVDDKRLGAALEPADYALLDDDDFAKHPFLVKGYIGPKALRENNVRYLVDPRIVDGTSWITGADQPGRHVVGLVAGRDFTADGTIEAAEVREGDPSPDGAGPLVMARGIEIGHIFQLGSKYTDAFTADVLGEDGKPVRLTMGSYGIGVSRLVAVVAEQHHDELGLRWPSTVAPFDVHLVIANKDAQARAGATALAADLDRLGVEVLLDDRQASPGVKFKDAELLGMPWIVVVGRGWADGVVELRDRFSGQTRELVAGASLATDIAAAVTG

SEQ ID NO: 62668 - protein, 84 aa, Mycobacterium bovis
MITAALTIYTTSWCGYCLRLKTALTANRIAYDEVDIEHNRAAAEFVGSVNGGNRTVPTVKFADGSTLTNPSADEVKAKLVKIAG

SEQ ID NO: 62669 - protein, 470 aa, Mycobacterium bovis
MTATRLPDGFAVQVDRRVRVLGDGSALLGGSPTRLLRLAPAARGLLCDGRLKVRDEVSAELARILLDATVAHPRPPSGPSHRDVTVVIPVRNNASGLRRLVTSLRGLRVIVVDDGSACPVESDDFVGAHCDIEVLHHPHSKGPAAARNTGLAACTTDFVAFLDSDVTPRRGWLESLLGHFCDPTVALVAPRIVSLVEGENPVARYEALHSSLDLGQREAPVLPHSTVSYVPSAAIVCRSSAIRDVGGFDETMHSGEDVDLCWRLIEAGARLRYEPIALVAHDHRTQLRDWIARKAFYGGSAAPLAVRHPDKTAPLVISGGALMAWILMSIGTGLGRLASLVIAVLTGRRIARAMRCAETSFLDVLAVATRGLWAAALQLASAICRHYWPLALLAAILSRRCRRVVLIAAVVDGVVDWLRRREGADDDAEPIGPLTYLVLKRVDDLAYGAGLWYGVVRERNIGALKPQIRT

SEQ ID NO: 62670 - protein, 620 aa, Mycobacterium bovis
MYWVGKAWTISAICVLAILVLLRYLTPWGRQFWRITRAYFVGPNSVRVWLMLGVLLLSVVLAVRLNVLFSYQGNDMYTALQKAFEGIASGDGTVKRSGARGFWMSIGVFSVMAVLHVTRVMADIYLTQRFIIAWRVWLTHHLTQDWLDGRAYYRDLFIDETIDNPDQRIQQDVDIFTAGAGGTPNAPSNGTASTLLFGAVQSIISVISFTAILWNLSGTLNIFGVSIPRAMFWTVLVYVFVATVISFIIGRPLIWLSFRNEKLNAAFRYALVRLRDAAEAVGFYRGERVEGTQLQRRFTPVIDNYRRYVRRSIAFNGWNLSVSQTIVPLPWVIQAPRLFAGQIDFGDVGQTATSFGNIHDSLSFFRNNYDAFASFRAAIIRLHGLVDANEKGRALPAVLTRPSDDESVELNDIEVRTPAGDRLIDPLDVRLDRGGSLVITGRSGAGKTTLLRSLAELWPYASGTLHRPGGENETMFLSQLPYVPLGTLRDVVCYPNSAAAIPDATLRDTLTKVALAPLCDRLDEERDWAKVLSPGEQQRVAFARILLTKPKAVFLDESTSALDTGLEFALYQLLRSELPDCIVVSVSHRPALERLHENQLELLGGGQWRLAPVEAAPAEV

SEQ ID NO: 62671 - protein, 369 aa, Mycobacterium bovis
MEIGIFLMPAHPPERTLYDATRWDLDVIELADQLGYVEAWVGEHFTVPWEPICAPDLLLAQALLRTQQIKLAPGAHLLPYHHPVELAHRVAYFDHLAQGRFMLGVGASGIPGDWALYDVDGKNGEHREMTREALEIMLRIWTEDEPWEHRGKYWNANGIAPMFEGLMRRHIKPYQKPHPPIGVTGFSAGSETLKLAGERGYIPMSLDLNTEYVATHWDAVEEGALRSGRTPDRRDWRLVREVLVAETDEQAFRYAVDGTMGRAMREYVLPTFRMFGMTKFYKHNPSVPDDEVTPEYLAENTFVVGSVQTVVDKLEATYDQVGGFGHLLILGFDYSDNPGPWKESLRLLAHEVMPRLNARLATKPATAVV

SEQ ID NO: 62672 - protein, 124 aa, Mycobacterium bovis
MPTIQQLVRKGRRDKISKVKTAALKGSPQRRGVCTRVYTTTPKKPNSALRKVARVKLTSQVEVTAYIPGEGHNLQEHSMVLVRGGRVKDLPGVRYKIIRGSLDTQGVKNRKQARSRYGAKKEKG

SEQ ID NO: 62673 - protein, 156 aa, Mycobacterium bovis
MPRKGPAPKRPLVNDPVYGSQLVTQLVNKVLLKGKKSLAERIVYGALEQARDKTGTDPVITLKRALDNVKPALEVRSRRVGGATYQVPVEVRPDRSTTLALRWLVGYSRQRREKTMIERLANEILDASNGLGASVKRREDTHKMAEANRAFAHYRW

SEQ ID NO: 62674 - protein, 701 aa, Mycobacterium bovis
MAQKDVLTDLSRVRNFGIMAHIDAGKTTTTERILYYTGINYKIGEVHDGAATMDWMEQEQERGITITSAATTTFWKDNQLNIIDTPGHVDFTVEVERNLRVLDGAVAVFDGKEGVEPQSEQVWRQADKYDVPRICFVNKMDKIGADFYFSVRTMGERLGANAVPIQLPVGAEADFEGVVDLVEMNAKVWRGETKLGETYDTVEIPADLAEQAEEYRTKLLEVVAESDEHLLEKYLGGEELTVDEIKGAIRKLTIASEIYPVLCGSAFKNKGVQPMLDAVVDYLPSPLDVPPAIGHAPAKEDEEVVRKATTDEPFAALAFKIATHPFFGKLTYIRVYSGTVESGSQVINATKGKKERLGKLFQMHSNKENPVDRASAGHIYAVIGLKDTTTGDTLSDPNQQIVLESMTFPDPVIEVAIEPKTKSDQEKLSLSIQKLAEEDPTFKVHLDSETGQTVIGGMGELHLDILVDRMRREFKVEANVGKPQVAYKETIKRLVQNVEYTHKKQTGGSGQFAKVIINLEPFTGEEGATYEFESKVTGGRIPREYIPSVDAGAQDPIQYGVLAGYPLVNLKVTLLDGAYHEVDSSEMAFKIAGSQVLKKAAALAQPVILEPIMAVEVTTPEDYMGDVIGDLNSRRGQIQAMEERAGARVVRAHVPLSEMFGYVGDLRSKTQGRANYSMVFDSYSEVPANVSKEIIAKATGE

SEQ ID NO: 62675 - protein, 396 aa, Mycobacterium bovis
MAKAKFQRTKPHVNIGTIGHVDHGKTTLTAAITKVLHDKFPDLNETKAFDQIDNAPEERQRGITINIAHVEYQTDKRHYAHVDAPGHADYIKNMITGAAQMDGAILVVAATDGPMPQTREHVLLARQVGVPYILVALNKADAVDDEELLELVEMEVRELLAAQEFDEDAPVVRVSALKALEGDAKWVASVEELMNAVDESIPDPVRETDKPFLMPVEDVFTITGRGTVVTGRVERGVINVNEEVEIVGIRPSTTKTTVTGVEMFRKLLDQGQAGDNVGLLLRGVKREDVERGQVVTKPGTTTPHTEFEGQVYILSKDEGGRHTPFFNNYRPQFYFRTTDVTGVVTLPEGTEMVMPGDNTNISVKLIQPVAMDEGLRFAIREGGRTVGAGRVTKIIK

SEQ ID NO: 62676 - protein, 1234 aa, Mycobacterium bovis
MTAPGPACSDTPIAGLVELALSAPTFQQLMQRAGGRPDELTLIAPASARLLVASALARQGPLLVVTATGREADDLAAELRGVFGDAVALLPSWETLPHERLSPGVDTVGTRLMALRRLAHPDDAQLGPPLGVVVTSVRSLLQPMTPQLGMMEPLTLTVGDESPFDGVVARLVELAYTRVDMVGRRGEFAVRGGILDIFAPTAEHPVRVEFWGDEITEMRMFSVADQRSIPEIDIHTLVAFACRELLLSEDVRARAAQLAARHPAAESTVTGSASDMLAKLAEGIAVDGMEAVLPVLWSDGHALLTDQLPDGTPVLVCDPEKVRTRAADLIRTGREFLEASWSVAALGTAENQAPVDVEQLGGSGFVELDQVRAAAARTGHPWWTLSQLSDESAIELDVRAAPSARGHQRDIDEIFAMLRAHIATGGYAALVAPGTGTAHRVVERLSESDTPAGMLDPGQAPKPGVVGVLQGPLRDGVIIPGANLVVITETDLTGSRVSAAEGKRLAAKRRNIVDPLALTAGDLVVHDQHGIGRFVEMVERTVGGARREYLVLEYASAKRGGGAKNTDKLYVPMDSLDQLSRYVGGQAPALSRLGGSDWANTKTKARRAVREIAGELVSLYAKRQASPGHAFSPDTPWQAELEDAFGFTETVDQLTAIEEVKADMEKPIPMDRVICGDVGYGKTEIAVRAAFKAVQDGKQVAVLVPTTLLADQHLQTFGERMSGFPVTIKGLSRFTDAAESRAVIDGLADGSVDIVIGTHRLLQTGVRWKDLGLVVVDEEQRFGVEHKEHIKSLRTHVDVLTMSATPIPRTLEMSLAGIREMSTILTPPEERYPVLTYVGPHDDKQIAAALRRELLRDGQAFYVHNRVSSIDAAAARVRELVPEARVVVAHGQMPEDLLETTVQRFWNREHDILVCTTIVETGLDISNANTLIVERADTFGLSQLHQLRGRVGRSRERGYAYFLYPPQVPLTETAYDRLATIAQNNELGAGMAVALKDLEIRGAGNVLGIEQSGHVAGVGFDLYVRLVGEALETYRDAYRAAADGQTVRTAEEPKDVRIDLPVDAHLPPDYIASDRLRLEGYRRLAAASSDREVAAVVDELTDRYGALPEPARRLAAVARLRLLCRGSGITDVTAASAATVRLSPLTLPDSAQVRLKRMYPGAHYRATTATVQVPIPRAGGLGAPRIRDVELVQMVADLITALAGKPRQHIGITNPSPPGEDGRGRNTTIKERQP

SEQ ID NO: 62677 - protein, 822 aa, Mycobacterium bovis
MNSDGRHHQSSSGAPRGPANPGQRGQVPPDDRLTAILPPVTDDRSAPHADSIEAVKAALDGAPPMPPPRDPLEEVTAALAAPPGKPPRGDQLGGRRRPPGPPGPPGSSGQPAGRLPQPRVDLPRVGQINWKWIRRSLYLTAAVVILLLMVTFTMAYLIVDVPKPGDIRTNQVSTILASDGSEIAKIVPPEGNRVDVNLSQVPMHVRQAVIAAEDRNFYSNPGFSFTGFARAVKNNLFGGDLQGGSTITQQYVKNALVGSAQHGWSGLMRKAKELVIATKMSGEWSKDDVLQAYLNIIYFGRGAYGISAASKAYFDKPVEQLTVAEGALLAALIRRPSTLDPAVDPEGAHARWNWVLDGMVETKALSPNDRAAQVFPETVPPDLARAENQTKGPNGLIERQVTRELLELFNIDEQTLNTQGLVVTTTIDPQAQRAAEKAVAKYLDGQDPDMRAAVVSIDPHNGAVRAYYGGDNANGFDFAQAGLQTGSSFKVFALVAALEQGIGLGYQVDSSPLTVDGIKITNVEGEGCGTCNIAEALKMSLNTSYYRLMLKLNGGPQAVADAAHQAGIASSFPGVAHTLSEDGKGGPPNNGIVLGQYQTRVIDMASAYATLAASGIYHPPHFVQKVVSANGQVLFDASTADNTGDQRIPKAVADNVTAAMEPIAGYSRGHNLAGGRDSAAKTGTTQFGDTTANKDAWMVGYTPSLSTAVWVGTVKGDEPLVTASGAAIYGSGLPSDIWKATMDGALKGTSNETFPKPTEVGGYAGVPPPPPPPPSEVPPSETVIQPTVEIAPGITIPIGPPTTITLAPPPPAPPAATPTPPP

SEQ ID NO: 62678 - protein, 937 aa, Mycobacterium bovis
MVKRLKKVADYVGTLSDDVEKLTDAELRAKTDEFKRRLADQKNPETLDDLLPEAFAVAREAAWRVLDQRPFDVQVMGAAALHLGNVAEMKTGEGKTLTCVLPAYLNALAGNGVHIVTVNDYLAKRDSEWMGRVHRFLGLQVGVILATMTPDERRVAYNADITYGTNNEFGFDYLRDNMAHSLDDLVQRGHHYAIVDEVDSILIDEARTPLIISGPADGASNWYTEFARLAPLMEKDVHYEVDLRKRTVGVHEKGVEFVEDQLGIDNLYEAANSPLVSYLNNALKAKELFSRDKDYIVRDGEVLIVDEFTGRVLIGRRYNEGMHQAIEAKEHVEIKAENQTLATITLQNYFRLYDKLAGMTGTAQTEAAELHEIYKLGVVSIPTNMPMIREDQSDLIYKTEEAKYIAVVDDVAERYAKGQPVLIGTTSVERSEYLSRQFTKRRIPHNVLNAKYHEQEATIIAVAGRRGGVTVATNMAGRGTDIVLGGNVDFLTDQRLRERGLDPVETPEEYEAAWHSELPIVKEEASKEAKEVIEAGGLYVLGTERHESRRIDNQLRGRSGRQGDPGESRFYLSLGDELMRRFNGAALETLLTRLNLPDDVPIEAKMVTRAIKSAQTQVEQQNFEVRKNVLKYDEVMNQQRKVIYAERRRILEGENLKDQALDMVRDVITAYVDGATGEGYAEDWDLDALWTALKTLYPVGITADSLTRKDHEFERDDLTREELLEALLKDAERAYAAREAELEEIAGEGAMRQLERNVLLNVIDRKWREHLYEMDYLKEGIGLRAMAQRDPLVEYQREGYDMFMAMLDGMKEESVGFLFNVTVEAVPAPPVAPAAEPAELAEFAAAAAAAAQQRSAVDGGARERAPSALRAKGVASESPALTYSGPAEDGSAQVQRNGGGAHKTPAGVPAGASRRERREAARRQGRGAKPPKSVKKR

SEQ ID NO: 62679 - protein, 125 aa, Mycobacterium bovis
MIATPGLFAVLRARNRMRRSADFETTVKHGMRTVRSDMVVYWWRGSGGGPRVGLIIAKSVGSAVERHRVARRLRHVAGSIVKELHPSDHVVIRALPSSRHVSSARLEQQLRCGLRRAVELAGSDR

SEQ ID NO: 62680 - protein, 614 aa, Mycobacterium bovis
MRSRDFWGSAARLVKRLAPQRRLSIAVITLGIAGTTIGVIVPRILGHATDLLFNGVIGRGLPGGITKAQAVASARARGDNTFADLLSGMNVVPGQGVDFAAVERTLALALALYLAAALMIWAQARLLNLTVQKTMVRLRTDVEDKVHRLPLSYFDGQQRGELLSRVTNDIDNLQSSLSMTISQLVTSILTMVAVLAMMVSISGLLALITLLTVPLSLLVTRAITRRSQPLFVAHWTSTGRLNAHLEETYSGFTVVKTFGHQAAARERFHELNDDVYQAGFGAQFLSGLVQPATAFIGNLGYVAVAVAGGLQVATGQITLGSIQAFIQYIRQFNMPLSQLAGMYNALQSGVASAERVFDVLDEPEESPEPEPELPNLTGRVEFEHVNFAYLPGTPVIRDLSLVAEPGSTVAIVGPTGAGKTTLVNLLMRFYEIGSGRILIDGVDIASVSRQSLRSRIGMVLQDTWLYDGTIAENIAYGRPEATTDEIVEAARAAHVDRFVNTLPAGYQTRVSGDGGSISVGEKQLITIARAFLARPQLLILDEATSSVDTRTELLIQRAMRELRRDRTSFIIAHRLSTIRDADHILVVQTGQIVERGNHAELLARRGVYYQMTRA

SEQ ID NO: 62681 - protein, 290 aa, Mycobacterium bovis
AVVVLLNLSRDQLDRVGEINVIERTLRAGLARHPDAVVVANCDDVLMTSAAYDSPNVVWVAAGGAWSNDSVSCPRSSEVIVRKAPSQEDHWYSTGADFKRPAPHWWFDDATLYGPDGLALPMRLALPGSVNRGNAAQAVAAAVALGADPAVAVAAVCQVDEVAGRYRTVRIGAHQARILLAKNPAGWQEALAMVDKHADGVVIAVNGRVPDGEDLSWLWDVRFEHFETTRVVAAGERGTDLAVRLGYAGVEHTLVHDTVAAIASCPPGRVEVVANYTAFLQLQRALARRG

SEQ ID NO: 62682 - protein, 767 aa, Mycobacterium bovis
MRAVWMMAAKGTGGAARSIGRARDIEPGHRRDGIALVLLGLAVVVAASSWFDAARPLGAWVDALLRTFIGSAVVMLPLVAAAVAVVLMRTSPNPDSRPRLILGASLIGLSFLGLCHLWAGSPEAPESRLRAAGFIGFAIGGPLSDGLTAWIAAPLLFIGALFGLLLLAGITIREVPDAMRAMFGTRLLPREYADDFEDFADFDGDDADTVEVARQDFSDGYYDEVPLCSDDGPPAWPSAEVPQDDTATIPEASAGRGSGRRGRRKDTQVLDRIVEGPYTLPSLDLLISGDPPKKRSAANTHMAGAIGEVLTQFKVDAAVTGCTRGPTVTRYEVELGPGVKVEKITALQRNIAYAVATESVRMLAPIPGKSAVGIEVPNTDREMVRLADVLTARETRRDHHPLVIGLGKDIEGDFISANLAKMPHLLVAGSTGSGKSSFVNSMLVSLLTRATPEEVRMILIDPKMVELTPYEGIPHLITPIITQPKKAAAALAWLVDEMEQRYQDMQASRVRHIDDFNDKVRSGAITAPLGSQREYRPYPYVVAIVDELADLMMTAPRDVEDAIVRITQKARAAGIHLVLATQRPSVDVVTGLIKTNVPSRLAFATSSLTDSRVILDQAGAEKLIGMGDGLFLPMGASKPLRLQGAYVSDEEIHAVVTACKEQAEPEYTEGVTTAKPTAERTDVDPDIGDDMDVFLQAVELVVSSQFGSTSMLQRKLRVGFAKAGRLMDLMETRGIVGPSEGSKAREVLVKPDELAGTLAAIRGDGGE

SEQ ID NO: 62683 - protein, 126 aa, Mycobacterium bovis
MSTTRRRRPALIALVIIATCGCLALGWWQWTRFQSTSGTFQNLGYALQWPLFAWFCVYAYRNFVRYEETPPQPPTGGAAAAIPAGLLPERPKPAQQPPDDPVLREYNAYLAELAKDDARKQNRTTA

SEQ ID NO: 62684 - protein, 1127 aa, Mycobacterium bovis
MFSKVLVANRGEIAIRAFRAAYELGVGTVAVYPYEDRNSQHRLKADESYQIGDIGHPVHAYLSVDEIVATARRAGADAIYPGYGFLSENPDLAAACAAAGISFVGPSAEVLELAGNKSRAIAAAREAGLPVLMSSAPSASVDELLSVAAGMPFPLFVKAVAGGGGRGMRRVGDIAALPEAIEAASREAESAFGDPTVYLEQAVINPRHIEVQILADNLGDVIHLYERDCSVQRRHQKVIELAPAPHLDAELRYKMCVDAVAFARHIGYSCAGTVEFLLDERGEYVFIEMNPRVQVEHTVTEEITDVDLVASQLRIAAGETLEQLGLRQEDIAPHGAALQCRITTEDPANGFRPDTGRISALRTAGGAGVRLDGSTNLGAEISPYFDSMLVKLTCRGRDLPTAVSRARRAIAEFRIRGVSTNIPFLQAVLDDPDFRAGRVTTSFIDERPQLLTARASADRGTKILNFLADVTVNNPYGSRPSTIYPDDKLPDLDLRAAPPAGSKQRLVKLGPEGFARWLRESAAVGVTDTTFRDAHQSLLATRVRTSGLSRVAPYLARTMPQLLSVECWGGATYDVALRFLKEDPWERLATLRAAMPNICLQMLLRGRNTVGYTPYPEIVTSAFVQEATATGIDIFRIFDALNNIESMRPAIDAVRETGSAIAEVAMCYTGDLTDPGEQLYTLDYYLKLAEQIVDAGAHVLAIKDMAGLLRPPAAQRLVSALRSRFDLPVHLHTHDTPGGQLASYVAAWHAGADAVDGAAAPLAGTTSQPALSSIVAAAAHTEYDTGLSLSAVCALEPYWEALRKVYAPFESGLPGPTGRVYHHEIPGGQLSNLRQQAIALGLGDRFEEIEEAYAGADRVLGRLVKVTPTSKVVGDLALALVGAGVSADEFASDPARFGIPESVLGFLRGELGDPPGGWPEPLRTAALAGRGAARPTAQLAADDEIALSSVGAKRQATLNRLLFPSPTKEFNEHREAYGDTSQLSANQFFYGLRQGEEHRVKLERGVELLIGLEAISEPDERGMRTVMCILNGQLRPVLVRDRSIASAVPAAEKADRGNPGHIAAPFAGVVTVGVCVGERVGAGQTIATIEAMKMEAPITAPVAGTVERVAVSDTAQVEGGDLLVVVS

SEQ ID NO: 62685 - protein, 464 aa, Mycobacterium bovis
MTHYDVVVLGAGPGGYVAAIRAAQLGLSTAIVEPKYWGGVCLNVGCIPSKALLRNAELVHIFTKDAKAFGISGEVTFDYGIAYDRSRKVAEGRVAGVHFLMKKNKITEIHGYGTFADANTLLVDLNDGGTESVTFDNAIIATGSSTRLVPGTSLSANVVTYEEQILSRELPKSIIIAGAGAIGMEFGYVLKNYGVDVTIVEFLPRALPNEDADVSKEIEKQFKKLGVTILTATKVESIADGGSQVTVTVTKDGVAQELKAEKVLQAIGFAPNVEGYGLDKAGVALTDRKAIGVDDYMRTNVGHIYAIGDVNGLLQLAHVAEAQGVVAAETIAGAETLTLGDHRMLPRATFCQPNVASFGLTEQQARNEGYDVVVAKFPFTANAKAHGVGDPSGFVKLVADAKHGELLGGHLVGHDVAELLPELTLAQRWDLTASELARNVHTHPTMSEALQECFHGLVGHMINF

SEQ ID NO: 62686 - protein, 2031 aa, Mycobacterium bovis
  MISC_FEATURE (61)..(61): X=any amino acid
  MISC_FEATURE (166)..(166): X=any amino acid
  MISC_FEATURE (173)..(173): X=any amino acid
  MISC_FEATURE (278)..(278): X=any amino acid
  MISC_FEATURE (888)..(888): X=any amino acid
  MISC_FEATURE (890)..(890): X=any amino acid
  MISC_FEATURE (896)..(896): X=any amino acid
  MISC_FEATURE (943)..(943): X=any amino acid
  MISC_FEATURE (980)..(980): X=any amino acid
  MISC_FEATURE (1044)..(1044): X=any amino acid
  MISC_FEATURE (1058)..(1058): X=any amino acid
  MISC_FEATURE (1069)..(1069): X=any amino acid
  MISC_FEATURE (1087)..(1087): X=any amino acid
  MISC_FEATURE (1095)..(1095): X=any amino acid
  MISC_FEATURE (1442)..(1442): X=any amino acid
  MISC_FEATURE (1474)..(1474): X=any amino acid
  MISC_FEATURE (1487)..(1487): X=any amino acid
  MISC_FEATURE (1512)..(1512): X=any amino acid
  MISC_FEATURE (1560)..(1560): X=any amino acid
  MISC_FEATURE (1592)..(1592): X=any amino acid
  MISC_FEATURE (1650)..(1650): X=any amino acid
  MISC_FEATURE (1728)..(1728): X=any amino acid
  MISC_FEATURE (1756)..(1756): X=any amino acid
  MISC_FEATURE (1809)..(1809): X=any amino acid
  MISC_FEATURE (1844)..(1844): X=any amino acid
  MISC_FEATURE (1890)..(1890): X=any amino acid
  MISC_FEATURE (1924)..(1924): X=any amino acid
STSTSRPLAKSPHSTASTSGTVRRYAAAPCQTAAGYQGTAKDSATTLALTSGVSITCRTAXSACSRSAWARPARTDALSPCCQSGAVIAVTPAGADTSTAPSTKKRRYNHRRATPRPRCPATRQPALSACHTTGPHPRPARLPRPSTATTPFSDYAGRCRSASLQXIAGPRAXPTPDISDFRGVARAAIAHCRGMAALLAATALVAGCNTTIDGRPVASPGSGPTEPTFPTPRPTTAPPGTTAPTLPTTPVSRPRRPAPFRSRLTPTVTSSSKPSPEXRVARSIGTALAARHRSPTPPCEMVSTPTASTSPPAAPCSGCWAIWAPSPPSASTTEPMKRRAGPSTPPPMAPASRTTARAMACSSASRRSTHSERMPYDPCAPSCRRCPLGSKTCSTRWLITVALAPPVTPTTVTPEGLTRQRRAENSATIASALRTAARQALVVNGSLSGCAARRRQCCAAASAARGASREFAGSRPSRAAALVPDPPMMRRSDAISSSFNVVAREGKRLSIRSSSKAWVSASNGSMSAMTYGVAGTGCVCTNRRKETKAVCALSMSERCANCWSITLRSATSPLRSSSSAASPVESVTPAASTAIDIRMPNMPNRSSNCARMPASTGSGLSRRTKRSTLSRALLSSVRSAPASLRSAMNSVWRSVRAVSARSPDTGTTAWQMPIWFSSRVNRLATSLAESIASMRPAPISSARDATPMMPRAPTDPPTSPPICLSSATSAAFRVRNRNTTASTRGTPSAGTSSRNVRSEASHANDDVPGVSTMVASMSSSAGHSTSRSISSAGLILRRSKLSPPRRVIGTLARRPPRWLAVTRGVGPCRNQVTIRVASVASVGAMSSPTRALTRVDFPALSVPANAMRSGSARRAPMRSSWQKTSPRXRXAGAPRXAWMVACRIARTRSLVLTLVPSSPGASRLAPSRQRLSLTWLRIPNCRXSSRIRLSRSVSATCAAAMVACRDSVSDRVISSAISRXWSRSRRWIILSRSRDCLLTTNEMSSTKRRTLALASLRTRSNRFCLSSLYAIRPRITRPPPIAGXTTQVRPPTTACQSXPRRHRNPACRXSFSGPGAAVSIPSGPALXAGRSRCPXRGGSALLTGPSSNPASAKERATSSANASERWYAHTKLSPTAVAIAFSTSLPISAQCAVGSQESIWRSASSVTVRKRVRRSWSTSAVRSLNPSPSTCCHSAVCCTACWASRLRRSKSEASRSRRFGSLTTDSSEPRDTANCSVAERISPSTPARTRSVARESTCSLRNLTIAGKLDSSLSSLSLSVTAWLRNSDETAMIGIGTRARCRCAALALTISRQRGYRSVLVATTAPTGQIWWACRTNHISGSVNSWLVSLTTKTASASGSSPSVADRWGCPRPPTPGVSINASPPRSSGLGAPTSTRNTSRPPACGARRTSVLMSSTGMSTAAVVPSGPAASTSRADGWALXLTTVITTVASSSPTRAAGRLSNELAIDSCPVXAARRSPHGPAGRXSAGEPASTAVLDHHARSVLAMAIVXSISSTITPTRRGSSGWVTVSPHFLARLRLRSRYAHKPAGTMNVPTGSXNRLANQNPGSPKRPYDGSSMGAGGVCVTGGSXPTSNTEWLGGLSWTGGSTGVCCGWVTAGVCSAAVVIGWARAGTCGAGASVTGGFMPPXPPVPPWIRGPLGRTKPCSTGVTPALTVSTLPSAAPSWPRMSPCAPPTPAAVAPPTPPTTPAAASVLATTPAAPRAAGXGVGCPTAPKPNPAPPAGAGLTTHTDTGXRARQMRHSSAVQGSAFTGDQPRLAACVGSQHCVAADPGQAADIADAAEPTTGXDTDLASDARLAADTSADTSANGTLAGNSDLAIAAXATADAGTDSPGRAPTDHTAGLTTQTQANPAAKAHTGLSTQTRPNTXPSTNLSADLGLNHGSKTQTDLGSQADLTAETTAXRGESQATLTQEPSTQSASQARTDIGRDDACTPAPASPAKPTLATSCAKPCRAATACRNPLMGSPAPRFRPGTTLAATDEIWCGAISISPALVMARPGAATNDRAASS

SEQ ID NO: 62687 - protein, 590 aa, Mycobacterium bovis
MICQHRYDVVIVGAGGAGMRAAVEAGPRVRTAVLTKLYPTRSHTGAAQGGMCAALANVEDDNWEWHTFDTVKGGDYLADQDAVEIMCKEAIDAVLDLEKMGMPFNRTPEGRIDQRRFGGHTRDHGKAPVRRACYAADRTGHMILQTLYQNCVKHDVEFFNEFYALDLALTQTPSGPVATGVIAYELATGDIHVFHAKAVVIATGGSGRMYKTTSNAHTLTGDGIGIVFRKGLPLEDMEFHQFHPTGLAGLGILISEAVRGEGGRLLNGEGERFMERYAPTIVDLAPRDIVARSMVLEVLEGRGAGPLKDYVYIDVRHLGEEVLEAKLPDITEFARTYLGVDPVTELVPVYPTCHYLMGGIPTTVTGQVLRDNTSVVPGLYAAGECACVSVHGANRLGTNSLLDINVFGRRAGIAAASYAQGHDFVDMPPNPEAMVVGWVSDILSEHGNERVADIRGALQQSMDNNAAVFRTEETLKQALTDIHALKERYSRITVHDKGKRFNTDLLEAIELGFLLELAEVTVVGALNRKESRGGHAREDYPNRDDVNYMRHTMAYKEIGADKEGPELRSDVRLDFKPVVQTRYEPKERKY

SEQ ID NO: 62688 - protein, 69 aa, Mycobacterium bovis
LADIFEFGSMSEVHLARDLRLHSDVAVKVLRADLARDPSFHLRFRREAQNAAALNHPAIVAVYDTGEAD

SEQ ID NO: 62689 - protein, 159 aa, Mycobacterium bovis
MVGLIWAQATSGVIGRGGDIPWRLPEDQAHFREITMGHTIVMGRRTWDSLPAKVRPLPGRRNVVLSRQADFMASGAEVVGSLEEALTSPETWVIGGGQVYALALPYATRCEVTEVDIGLPREAGDALAPVLDETWRGETGEWRFSRSGLRYRLYSYHRS

SEQ ID NO: 62690 - protein, 406 aa, Mycobacterium bovis
MPSPRREDGDALRCGDRSAAVTEIRAALTALGMLDHQEEDLTTGRNVALELFDAQLDQAVRAFQQHRGLLVDGIVGEATYRALKEASYRLGARTLYHQFGAPLYGDDVATLQARLQDLGFYTGLVDGHFGLQTHNALMSYQREYGLAADGICGPETLRSLYFLSSRVSGGSPHAIREEELVRSSGPKLSGKRIIIDPGRGGVDHGLIAQGPAGPISEADLLWDLASRLEGRMAAIGMETHLSRPTNRSPSDAERAATANAVGADLMISLRCETQTSLAANGVASFHFGNSHGSVSTIGRNLADFIQREVVARTGLRDCRVHGRTWDLLRLTRMPTVQVDIGYITNPHDRGMLVSTQTRDAIAEGILAAVKRLYLLGKNDRPTGTFTFAELLAHELSVERAGRLGGS

SEQ ID NO: 62691 - protein, 231 aa, Mycobacterium bovis
MPSPSSADQVADSPRPRLPADHPGVNELFALLAYGEVAAFYRLTDEARMAPDLRGRISMASMAAAEMGHYELLRNALERRGVDVVSAMSKYTSALENYHRLTTPSTWLEALVKTYVADALAADLYLEIADGLPDEVADVVRAALSETGHSQFVVAEVRAAVTASGKQRSRLALWSRRLLGEAITQAQLVLADHDELVDLVVSGSGGLSQLGAFFDRLQQTHDQRMRELGLS

SEQ ID NO: 62692 - protein, 601 aa, Mycobacterium bovis
MNEAEHSVEHPPVQGSHVEGGVVEHPDAKDFGSAAALPADPTWFKHAVFYEVLVRAFFDASADGSGDLRGLIDRLDYLQWLGIDCIWLPPFYDSPLRDGGYDIRDFYKVLPEFGTVDDFVALVDAAHRRGIRIITDLVMNHTSESHPWFQESRRDPDGPYGDYYVWSDTSERYTDARIIFVDTEESNWSFDPVRRQFYWHRFFSHQPDLNYDNPAVQEAMIDVIRFWLGLGIDGFRLDAVPYLFEREGTNCENLPETHAFLKRVRKVVDDEFPGRVLLAEANQWPGDVVEYFGDPNTGGDECHMAFHFPLMPRIFMAVRRESRFPISEIIAQTPPIPDMAQWGIFLRNHDELTLEMVTDEERDYMYAEYAKDPRMKANVGIRRRLAPLLDNDRNQIELFTALLLSLPGSPVLYYGDEIGMGDVIWLGDRDGVRIPMQWTPDRNAGFSTANPGRLYLPPSQDPVYGYQAVNVEAQRDTSTSLLNFTRTMLAVRRRHPAFAVGAFQELGGSNPSVLAYVRQVAGDDGDTVLCVNNLSRFPQPIELDLQQWTNYTPVELTGHVEFPRIGQVPYLLTLPGHGFYWFQLTTHEVGAPPTCGGERRL

SEQ ID NO: 62693 - protein, 526 aa, Mycobacterium bovis
MKELKDTLWKAADKLRGSLSASQYKDVILGLVFLKYVSDAYDERREAIRAELAAEGMEESQIEDLIDDPEQYQGYGVFVVPVSARWKFLAENTKGKPAVGGEPAKNIGQLIDEAMDAVMKANPTLGGTLPRLYNKDNIDQRRLGELIDLFNSARFSRQGEHRARDLMGEVYEYFLGNFARAEGKRGGEFFTPPSVVKVIVEVLEPSSGRVYDPCCGSGGMFVQTEKFIYEHDGDPKDVSIYGQESIEETWRMAKMNLAIHGIDNKGLGARWSDTFARDQHPDVQMDYVMANPPFNIKDWARNEEDPRWRFGVPPANNANYAWIQHILYKLAPGGRAGVVMANGSMSSNSNGEGDIRAQIVEADLVSCMVALPTQLFRSTGIPVCLWFFAKDKAAGKQGSIDRCGQVLFIDARELGDLVDRAERALTNEEIVRIGDTFHAWRGSKSAAVKGIMYEDVPGFCKSATLAEIKATDYALTPGRYVGTPAVEDDGEPIDEKMARLSKALLEAFDESARLERVVREQLGRLR

SEQ ID NO: 62694 - protein, 446 aa, Mycobacterium bovis
MDRQKEFVLRTLEERDIRFVRLWFTDVLGFLKSVAIAPAELEGAFEEGIGFDGSSIEGFARVSESDTVAHPDPSTFQVLPWATSSGHHHSARMFCDITMPDGSPSWADPRHVLRRQLTKAGELGFSCYVHPEIEFFLLKPGPEDGSVPVPVDNAGYFDQAVHDSALNFRRHAIDALEFMGISVEFSHHEGAPGQQEIDLRFADALSMADNVMTFRYVIKEVALEEGARASFMPKPFGQHPGSAMHTHMSLFEGDVNAFHSADDPLQLSEVGKSFIAGILEHACEISAVTNQWVNSYKRLVQGGEAPTAASWGAANRSALVRVPMYTPHKTSSRRVEVRSPDSACNPYLTFAVLLAAGLRGVEKGYVLGPQAEDNVWDLTPEERRAMGYRELPSSLDSALRAMEASELVAEALGEHVFDFFLRNKRTEWANYRSHVTPYELRTYLSL

SEQ ID NO: 62695 - protein, 266 aa, Mycobacterium bovis
MSIVTPYEDLLRFVLETGTPKSDRTGTGTRSLFGQQMRYDLSAGFPLLTTKKVHFKSVAYELLWFLRGDSNIGWLHEHGVTIWDEWASDTGELGPIYGVQWRSWPAPSGEHIDQISAALDLLRTDPDSRRIIVSAWNVGEIERMALPPCHAFFQFYVADGRLSCQLYQRSADLFLGVPFNIASYALLTHMMAAQAGLSVGEFIWTGGDCHIYDNHVEQVRLQLSREPRPYPKLLLADRDSIFEYTYEDIVVKNYDPHPAIKAPVAV

SEQ ID NO: 62696 - protein, 439 aa, Mycobacterium bovis
MQQLRRKENPVPIIEQVGAREILDSRGNPTVEVEVALIDGTFARAAVPSGASTGEHEAVELRDGGDRYGGKGVQKAVQAVLDEIGPAVIGLNADDQRLVDQALVDLDGTPDKSRLGGNAILGVSLAVAKAAADSAELPLFRYVGGPNAHILPVPMMNILNGGAHADTAVDIQEFMVAPIGAPSFVEALRWGAEVYHALKSVLKKEGLSTGLGDEGGFAPDVAGTTAALDLISRAIESAGLRPGADVALALDAAATEFFTDGTGYVFEGTTRTADQMTEFYAGLLGAYPLVSIEDPLSEDDWDGWAALTASIGDRVQIVGDDIFVTNPERLEEGIERGVANALLVKVNQIGTLTETLDAVTLAHHGGYRTMISHRSGETEDTMIADLAVAIGSGQIKTGAPARSERVAKYNQLLRIEEALGDAARYAGDLAFPRFACETK

SEQ ID NO: 62697 - protein, 421 aa, Mycobacterium bovis
MALVVQKYGGSSVADAERIRRVAERIVATKKQGNDVVVVVSAMGDTTDDLLDLAQQVCPAPPPRELDMLLTAGERISNALVAMAIESLGAHARSFTGSQAGVITTGTHGNAKIIDVTPGRLQTALEEGRVVLVAGFQGVSQDTKDVTTLGRGGSDTTAVAMAAALGADVCEIYTDVDGIFSADPRIVRNARKLDTVTFEEMLEMAACGAKVLMLRCVEYARRHNIPVHVRSSYSDRPGTVVVGSIKDVPMEDPILTGVAHDRSEAKVTIVGLPDIPGYAAKVFRAVADADVNIDMVLQNVSKVEDGKTDITFTCSRDVGPAAVEKLDSLRNEIGFSQLLYDDHIGKVSLIGAGMRSHPGVTATFCEALAAVGVNIELISTSEIRISVLCRDTELDKAVVALHEAFGLGGDEEATVYAGTGR

SEQ ID NO: 62698 - protein, 448 aa, Mycobacterium bovis
MTGPEHGSASTIEILPVIGLPEFRPGDDLSAAVAAAAPWLRDGDVVVVTSKVVSKCEGRLVPAPEDPEQRDRLRRKLIEDEAVRVLARKDRTLITENRLGLVQAAAGVDGSNVGRSELALLPVDPDASAATLRAGLRERLGVTVAVVITDTMGRAWRNGQTDAAVGAAGLAVLRNYAGVRDPYGNELVVTEVAVADEIAAAADLVKGKLTATPVAVVRGFGVSDDGSTARQLLRPGANDLFWLGTAEALELGRQQAQLLRRSVRRFSTDPVPGDLVEAAVAEALTAPAPHHTRPTRFVWLQTPAIRARLLDRMKDKWRSDLTSDGLPADAIERRVARGQILYDAPEVVIPMLVPDGAHSYPDAARTDAEHTMFTVAVGAAVQALLVALAVRGLGSCWIGSTIFAADLVRDELDLPVDWEPLGAIAIGYADEPSGLRDPVPAADLLILK

SEQ ID NO: 62699 - protein, 379 aa, Mycobacterium bovis
MCQQGRPLGWDAVSDVPELIHGPLEDRHRELGASFAEFGGWLMPVSYAGTVSEHNATRTAVGLFDVSHLGKALVRGPGAAQFVNSALTNDLGRIGPGKAQYTLCCTESGGVIDDLIAYYVSDDEIFLVPNAANTAAVVGALQAAAPGGLSITNLHRSYAVLAVQGPCSTDVLTALGLPTEMDYMGYADASYSGVPVRVCRTGYTGEHGYELLPPWESAGVVFDALLAAVSAAGGEPAGLGARDTLRTEMGYPLHGHELSLDISPLQARCGWAVGWRKDAFFGRAALLAEKAAGPRRLLRGLRMVGRGVLRPGLAVLVGDETVGVTTSGTFSPTLQVGIGLALIDSDAGIEDGQQINVDVRGRAVECQVVCPPFVAVKTR

SEQ ID NO: 62700 - protein, 353 aa, Mycobacterium bovis
MSVVRGTALANYPSLVAGLGGDPATLLRAAGVRDQDVGNYDAFISIRAAIRAIESAAAVTATMDFGRRLAQRQGIEILGPVGVAARTAATVGDALAIFNTFMAAYSPVIAIRITPLAGQRSFIALEFLLDEPASYPQTMELALGVALGVIRLLLGADYAPLAVHLPHDPLTPEAFYLQYFGCRPYFAERVGGFTMRTADLSRPLNRDDVAHRVVVDYLSSITPLGEGIVESVRTIVRQLLPTGAATLNVVAEQFHLHPKTLQRRLAEENTTFVILVDRVRKDVADRYLRTTGIGLTHLARELGYAEQSVLTRSCKRWFGTGPAAYRNQARLQTTVSAPGSGRGPNPGNVSVSC

SEQ ID NO: 62701 - protein, 838 aa, Mycobacterium bovis
MTDTTLPPDDSLDRIEPVDIQQEMQRSYIDYAMSVIVGRALPEVRDGLKPVHRRVLYAMFDSGFRPDRSHAKSARSVAETMGNYHPHGDASIYDTLVRMAQPWSLRYPLVDGQGNFGSPGNDPPAAMRYTEARLTPLAMEMLREIDEETVDFIPNYDGRVQEPTVLPSRFPNLLANGSGGIAVGMATNIPPHNLRELADAVFWALENHDADEEETLAAVMGRVKGPDFPTAGLIVGSQGTADAYKTGRGSIRMRGVVEVEEDSRGRTSLVITELPYQVNHDNFITSIAEQVRDGKLAGISNIEDQSSDRVGLRIVIEIKRDAVAKVVINNLYKHTQLQTSFGANMLAIVDGVPRTLRLDQLIRYYVDHQLDVIVRRTTYRLRKANERAHILRGLVKALDALDEVIALIRASETVDIARAGLIELLDIDEIQAQAILDMQLRRLAALERQRIIDDLAKIEAEIADLEDILAKPERQRGIVRDELAEIVDRHGDDRRTRIIAADGDVSDEDLIAREDVVVTITETGYAKRTKTDLYRSQKRGGKGVQGAGLKQDDIVAHFFVCSTHDLILFFTTQGRVYRAKAYDLPEASRTARGQHVANLLAFQPEERIAQVIQIRGYTDAPYLVLATRNGLVKKSKLTAFDSNRSGGIVAVNLRDNDELVGAVLCSADDDLLLVSANGQSIRFSATDEALRPMGRATSGVQGMRFNIDDRLLSLNVVREGTYLLVATSGGYAKRTAIEEYPVQGRGGKGVLTVMYDRRRGRLVGALIVDDDSELYAVTSGGGVIRTAARQVRKAGRQTKGVRLMNLGEGDTLLAIARNAEESGDDNAVDANGADQTGN

SEQ ID NO: 62702 - protein, 507 aa, Mycobacterium bovis
MTDDPGSGFTTVWNAVVSELNGDPKVDDGPSSDANLSAPLTPQQRAWLNLVQPLTIVEGFALLSVPSSFVQNEIERHLRAPITDALSRRLGHQIQLGVRIAPPATDEADDTTVPPSENPATTSPDTTTDNDEIDDSAAARGDNQHSWPSYFTERPRNTDSATAGVTSLNRRYTFDTFVIGASNRFAHAAALAIAEAPARAYNPLFIWGESGLGKTHLLHAAGNYAQRLFPGMRVKYVSTEEFTNDFINSLRDDRKVAFKRSYRDVDVLLVDDIQFIEGKEGIQEEFFHTFNTLHNANKQIVISSDRPPKQLATLEDRLRTRFEWGLITDVQPPELETRIAILRKKAQMERLAIPDDVLELIASSIERNIRELEGALIRVTAFASLNKTPIDKALAEIVLRDLIADANTMQISAATIMAATAEYFDTTVEELRGPGKTRALAQSRQIAMYLCRELTDLSLPKIGQAFGRDHTTVMYAQRKILSEMAERREVFDHVKELTTRIRQRSKR

SEQ ID NO: 62703 - protein, 343 aa, Mycobacterium bovis
MRIGVLTGGGDCPGLNAVIRAVVRTCHARYGSSVVGFQNGFRGLLENRRVQLHNDDRNDRLLAKGGTMLGTARVHPDKLRAGLPQIMQTLDDNGIDVLIPIGGEGTLTAASWLSEENVPVVGVPKTIDNDIDCTDVTFGHDTALTVATEAIDRLHSTAESHERVMLVEVMGRHAGWIALNAGLASGAHMTLIPEQPFDIEEVCRLVKGRFQRGDSHFICVVAEGAKPAPGTIMLREGGLDEFGHERFTGVAAQLAVEVEKRINKDVRVTVLGHIQRGGTPTAYDRVLATRFGVNAADAAHAGEYGQMVTLRGQDIGRVPLADAVRKLKLVPQSRYDDAAAFFG

SEQ ID NO: 62704 - protein, 310 aa, Mycobacterium bovis
MSIAEDITQLIGRTPLVRLRRVTDGAVADIVAKLEFFNPANSVKDRIGVAMLQAAEQAGLIKPDTIILEPTSGNTGIALAMVCAARGYRCVLTMPETMSLERRMLLRAYGAELILTPGADGMSGAIAKAEELAKTDQRYFVPQQFENPANPAIHRVTTAEEVWRDTDGKVDIVVAGVGTGGTITGVAQVIKERKPSARFVAVEPAASPVLSGGQKGPHPIQGIGAGFVPPVLDQDLVDEIITVGNEDALNVARRLAREEGLLVGISSGAATVAALQVARRPENAGKLIVVVLPDFGERYLSTPLFADVAD

SEQ ID NO: 62705 - protein, 346 aa, Mycobacterium bovis
MSTVAAYAAMSATEPLTKTTITRRDPGPHDVAIDIKFAGICHSDIHTVKAEWGQPNYPVVPGHEIAGVVTAVGSEVTKYRQGDRVGVGCFVDSCRECNSCTRGIEQYCKPGANFTYNSIGKDGQPTQGGYSEAIVVDENYVLRIPDVLPLDVAAPLLCAGITLYSPLRHWNAGANTRVAIIGLGGLGHMGVKLGAAMGADVTVLSQSLKKMEDGLRLGAKSYYATADPDTFRKLRGGFDLILNTVSANLDLGQYLNLLDVDGTLVELGIPEHPMAVPAFALALMRRSLAGSNIGGIAETQEMLNFCAEHGVTPEIELIEPDYINDAYERVLASDVRYRFVIDISAL

SEQ ID NO: 62706 - protein, 423 aa, Mycobacterium bovis
MNDQAPVAYAPLWRTAWRRLRQRPFQYILLVLGIALGVAMIVAIDVSSNSAQRAFDLSAAAITGKSTHRLVSGPAGVDQQLYVDLRRHGYDFSAPVIEGYVLARGLGNRAMQFMGTDPFAESAFRSPLWSNQNIAELGGFLTRPNGVVLSRQVAQKYGLAVGDRIALQVKGAPTTVTLVGLLTPADEVSNQKLSDLIIADISTAQELFHMPGRLSHIDLIIKDEATATRIQQRLPAGVRMETSDTQRDTVKQMTDAFTVNLTALSLIALLVGIFLIYNTVTFNVVQRRPFFAILRCLGVTREQLFWLIMTESLVAGLIGTGLGLLIGIWLGEGLIGLVTQTINDFYFVINVRNVSVSAESLLKGLIIGIFAAMLATLPPAIEAMRTVPASTLRRSSLESKITKLMPWLWVAWFGLGSFGVLML

SEQ ID NO: 62707 - protein, 467 aa, Mycobacterium bovis
MPTSDPGLRRVTVHAGAQAVDLTLPAAVPVATLIPSIVDILGDRGASPATAARYQLSALGAPALPNATTLAQCGIRDGAVLVLHKSSAQPPTPRCDDVAEAVAAALDTTARPQCQRTTRLSGALAASCITAGGGLMLVRNALGTNVTRYSDATAGVVAAAGLAALLFAVIACRTYRDPIAGLTLSVIATIFGAVAGLLAVPGVPGVHSVLVAAMAAAATSVLAMRITGCGGITLTAVACCAVVVAAATLVGAITAAPVPAIGSLDTLASFGLLEVSARMAVLLAGLSPRLPPALNPDDADALPTTDRLTTRANRADAWLTSLLAAFAASATIGAIGTAVATHGIHRSSMGGIALAAVTGALLLLRARSADTRRSLVFAICGITTVATAFTVAADRALEHGPWIAALTAMLAAVAMFLGFVAPALSLSPVTYRTIELLECLALIAMVPLTAWLCGAYSAVRHLDLTWT

SEQ ID NO: 62708 - protein, 664 aa, Mycobacterium bovis
  MISC_FEATURE (26)..(26): X=any amino acid
  MISC_FEATURE (296)..(296): X=any amino acid
  MISC_FEATURE (501)..(501): X=any amino acid
  MISC_FEATURE (505)..(505): X=any amino acid
  MISC_FEATURE (542)..(542): X=any amino acid
AFAGACSSGDGKALRTCSTDIACHSXAGAGRGACASTTLRASRYPESSPAAAPVVTGPGPSPRTPGSINRAPKADAPPEISLPRWRAALAAGIACSTLQAAPRSGSRTSAYQGGAPAPGGGSTPSATSAAESACLPTDDNTATVRPAWRSSATARARASSRDPLAPSSRGRMSSNTGRNSPRASTSTETRSAPVRCASATTAEASRSCMGRKSASTAESEPLAETPGTRCQPGRRPLSVKTSCARFHAVDSSSAPQPRMRATRRSSVHSTRGSMTIASTRSNRRKLSGRNGNTACXSAKPWPSAAANASGVVRLALGVATSVAVAAMSASRVPAPTSTALSAWISAKRATLRWTGCVDRAGRGQRDWGWSAGSSACSASCGSCRRQALAPARHSAAFSAWIVRSTDNAAGDSVTVCAAAMASSRTVAVAAVPIRSSSRRRSNGWWSTAATAASMTSGNRGQRSARPPSAKPSPAAVAATVTALTASSTPSPGRLPGDCASXSAAXSGWRCLSAFSASSTMRQSSRSDVSGSSIATTTRDNGXFRLADPTPGWAWIALSTTRPSSSSPPLRKPRTSIQARRSPRQQFRPSVSRDSSPESALAPARSGMMATFIPVPTPVLARVAETAVAAVIDAPVRVAVARKPVATARTGIARAMDAAMLKSCS

SEQ ID NO: 62709 - protein, 88 aa, Mycobacterium bovis
MWSQVCLLWQAVESVLAEQQPAGAAGTGRGPGFAGVAAVAAVADQHGVAADTTAAAGTGAKPAGTPVTGVAEHPCVATVTAGAAGTGA

SEQ ID NO: 62710 - protein, 338 aa, Mycobacterium bovis
MLARAGEVGRAGPAIRWLGGIGAVIPLLALVLVLVVLVIEAMGAIRLNGLHFFTATEWNPGNTYGETVVTDGVAHPVGAYYGALPLIVGTLATSAIALIIAVPVSVGAALVIVERLPKRLAEAVGIVLELLAGIPSVVVGLWGAMTFGPFIAHHIAPVIAHNAPDVPVLNYLRGDPGNGEGMLVSGLVLAVMVVPIIATTTHDLFRQVPVLPREGAIALGMSNWECVRRVTLPWVSSGIVGAVVLGLGRALGETMAVAMVSGAVLGAMPANIYATMTTIAATIVSQLDSAMTDSTNFAVKTLAEVGLVLMVITLLTNVAARGMVRRVSRTALPVGRGI

SEQ ID NO: 62711 - protein, 792 aa, Mycobacterium bovis
MTTDVLSDTDVSLKVVSNASGRMRVCVTGFNVDAVRAVAIEETVSQVTGVHAVHAYPRTASVVIWYSPELGDTAAVLSAITKAQHVPAELVPARAPHSAGVRGVGVVRKITGGIRRMLSRPPGVDKPLKASRCGGRPRGPVRGSASWPGEQNRRERRTWLPRVWLALPLGLLALGSSMFFGAYPWAGWLAFAATLPVQFVAGWPILRGAVQQARALTSNMDTLIALGTLTAFVYSTYQLFAGGPLFFDTSALIIAFVVLGRHLEARATGKASEAISKLLELGAKEATLLVDGQELLVPVDQVQVGDLVRVRPGEKIPVDGEVTDGRAAVDESMLTGESVPVEKTAGDRVAGATVNLDGLLTVRATAVGADTALAQIVRLVEQAQGDKAPVQRLADRVSAVFVPAVIGVAVATFAGWTLIAANPVAGMTAAVAVLIIACPCALGLATPTAIMVGTGRGAELGILVKGGEVLEASKKIDTVVFDKTGTLTRARMRVTDVIAGQRRQPNQVLRLAAAVESGSEHPIGAAIVAAAHERGLAIPAANAFTAVAGHGVRAQVNGGPVVVGRRKLVDEQHLVLPDHLAAAAVEQEERGRTAVFVGQDGQVVGVLAVADTVKDDAADVVGRLHAMGLQVAMITGDNARTAAAIAKQVGIEKVLAEVLPQDKVAEVRRLQDQGRVVAMVGDGVNDAPALVQADLGIAIGTGTDVAIEASDITLMSGRLDGVVRAIELSRQTLRTIYQNLGWAFGYNTAAIPLAALGALNPVVAGAAMGFSSVSVVTNSLRLRRFGRDGRTA

SEQ ID NO: 62712 - protein, 260 aa, Mycobacterium bovis
MLTERSARVATAVKLHRHVGRRRAGRFLAEGPNLVAAALARGLVREVFVTEVAARRHELLLAAHEASVHLVTERAAKALSDTVTPAGLVAVCDLPATRLEDVLAGSPQLIAVTVEIREPGNAGTVIRIADAMGAAAVILAGRSVDPYNGKCLRASTGSIFAIPVVVAPDVGAAIADLRAAGLQVLATAVDGEMALDDADRLLAEPTAWLFGPEAHGLSAEIAALADHRVHIPMSGGAESLNVAAAAAICLYESARALGRR

SEQ ID NO: 62713 - protein, 352 aa, Mycobacterium bovis
MGDPPLESIVSMLSPEALTTAVDAAQQAIALADTLDVLARVKTEHLGDRSPLALARQALAVLPKEQRAEAGKRVNAARNAAQRSYDERLATLRAERDAAVLVAEGIDVTLPSTRVPAGARHPIIMLAEHVADTFIAMGWELAEGPEVETEQFNFDALNFPADHPARGEQDTFYIAPEDSRQLLRTHTSPVQIRTLLARELPVYIISIGRTFRTDELDATHTPIFHQVEGLAVDRGLSMAHLRGTLDAFARAEFGPSARTRIRPHFFPFTEPSAEVDVWFANKIGGADWVEWGGCGMVHPNVLRATGIDPDLYSGFAFGMGLERTLQFRNGIPDMRDMVEGDVRFSLPFGVGA

SEQ ID NO: 62714 - protein, 184 aa, Mycobacterium bovis
MIGPGGEQVGIVRIEDALRVAADADLDLVEVAPNARPPVCKIMDYGKYKYEAAQKARESRRNQQQTVVKEQKLRPKIDDHDYETKKGHVVRFLEAGSKVKVTIMFRGREQSRPELGYRLLQRLGADVADYGFIETSAKQDGRNMTMVLAPHRGAKTRARARHPGEPAGGPPPKPTAGDSKAAPN

SEQ ID NO: 62715 - protein, 355 aa, Mycobacterium bovis
MTNGLRNYRLGVGYTVERRGRRRAEPLGTVADMKYLDVDGIGQVSRIGLGTWQFGSREWGYGDRYATGAARDIVKRARALGVTLFDTAEIYGLGKSERILGEALGDDRTEVVVASKVFPVAPFPAVIKNRERASARRLQLNRIPLYQIHQPNPVVPDSVIMPGMRDLLDSGDIGAAGVSNYSLARWRKADAALGRPVVSNQVHFSLAHPDALEDLVPFAELENRIVIAYSPLAQGLLGGKYGLENRPGGVRALNPLFGTENLRRIEPLLATLRAIAVDVDAKPAQVALAWLISLPGVVAIPGASSVEQLEFNVAAADIELSAQSRDALTDAARAFRPVSTGRFLTDMVREKVSRR

SEQ ID NO: 62716 - protein, 551 aa, Mycobacterium bovis
MAGMSVPAAPLLSVEGLEVTFGTDAPAVCGVDLAVRSGQTVAVVGESGSGKSTTAAAILGLLPAGGRITAGRVVFDGRDITGADAKRLRSIRGREIGYVPQDPMTNLNPVWKVGFQVTEALRANTDGRAARRRAVELLAEAGLPDPAKQAGRYPHQLSGGMCQRALIAIGLAGRPRLLIADEPTSALDVTVQRQVLDHLQGLTDELGTALLLITHDLALAAQRAEAVVVVRRGVVVESGAAQSILQSPQHEYTRRLVAAAPSLTARSRRPPESRSRATTQAGDILVVSELTKIYRESRGAPWRRVESRAVDGVSFRLPRASTLAIVGESGSGKSTLARMVLGLLQPTSGTVVFDGTYDVGALARDQVLAFRRRVQPVFQNPYSSLDPMYSVFRAIEEPLRVHHVGDRRQRQRAVRELVDQVALPSSILGRRPRELSGGQRQRVAIARALALRPEVLVCDEAVSALDVLVQAQILDLLADLQADLGLTYLFISHDLAVIRQIADDVLVMRAGRVVEHASTEEVFSRPRHEYTRQLLQAIPGAPSAPRKVGNL

SEQ ID NO: 62717 - protein, 884 aa, Mycobacterium bovis
MAPSASAATNGYDVDRLLAGYRTARAQETLFDLRDGPGAGYDEFVDDDGNVRPTWTELADAVAERGKAGLDRLRSVVHSLIDHDGITYTAIDAHRDALTGDHDLEPGPWRLDPLPLVISAADWEVLEAGLVQRSRLLDAILADLYGPRSMLTEGVLPPEMLFAHPGYVRAANGIQMPGRHQLFMHACDLSRLPDGTFQVNADWTQAPSGSGYAMADRRVVAHAVPDLYEELAPRPTTPFAQALRLALIDAAPDVAQDPVVVVLSPGIYSETAFDQAYLATLLGFPLVESADLVVRDGKLWMRSLGTLKRVDVVLRRVDAHYADPLDLRADSRLGVVGLVEAQHRGTVTVVNTLGSGILENPGLLRFLPQLSERLLDESPLLHTAPVYWGGIASERSHLLANVSSLLIKSTVSGETLVGPTLSSAQLADLAVRIEAMPWQWVGQELPQFSSAPTNHAGVLSSAGVGMRLFTVAQRSGYAPMIGGLGYVLAPGPAAYTLKTVAAKDIWVRPTERAHAEVITVPVLAPPAKTGAGTWAVSSPRVLSDLFWMGRYGERAENMARLLIVTRERYHVFRHQQDTDESECVPVLMAALGKITGYDTATGAGSAYDRADMIAVAPSTLWSLTVDPDRPGSLVQSVEGLALAARAVRDQLSNDTWMVLANVERAVEHKSDPPQSLAEADAVLASAQAETLAGMLTLSGVAGESMVHDVGWTMMDIGKRIERGLWLTALLQATLSTVRHPAAEQAIIEATLVACESSVIYRRRTVGKFSVAAVTELMLFDAQNPRSLVYQLERLRADLKDLPGSSGSSRPERMVDEMNTRLRRSHPEELEEVSADGLRAELAELLAGIHASLRDVADVLTATQLALPGGMQPLWGPDQRRVMPA

SEQ ID NO: 62718 - protein, 139 aa, Mycobacterium bovis
MKTQDKLRTATIRMLLAAIQTEEVSGKQARELSDDEVIKVLARESRKRGEAAEIYTQNGRGELAATEHAEARIIDEYLPTPLTEGELADVADTAIAEVAEELGHRPSMKQMGLVMKAATVIAAGKADGARLSAAVKERL

SEQ ID NO: 62719 - protein, 265 aa, Mycobacterium bovis
MTSTGPETSETPGATTQRHGFGIDVGGSGIKGGIVDLDTGQLIGDRIKLLTPQPATPLAVAKTIAEVVNGFGWRGPLGVTYPGVVTHGVVRTAANVDKSWIGTNARDTIGAELGGQQVTILNDADAAGLAETRYGAGKNNPGLVVLLTFGTGIGSAVIHNGTLIPNTEFGHLEVGGKEAEERAASSVKEKNDWTYPKWAKQVTRVLIAIENAIWPDLFIAGGGISRKADKWVPLLENRTPVVPAALQNTAGIVGAAMASVADTTH

SEQ ID NO: 62720 - protein, 273 aa, Mycobacterium bovis
MSAGGTPLQAGATPTGSRGTVALRPDAGPSWLRPLVDNVGQIPDAYRRRLPADVLAMVTAAGAVSAMTSSRRDHREAAVLVLFSGPEAGPGDGGVPDDADLLLTVRASTLRHHAGQAAFPGGVVDPADDGPVATALREANEETGIDPSRLHPLATMERTFIAPSRFHVVPVLAYSPDPGPVAVVNEAETAIVARVPVRAFINPANRLMVYRRPHTRRWAGPAFLLNQMLVWGFTGQVISAVLDVAGWAQPWDTGDIRELDAAMVLIDDESDPR

SEQ ID NO: 62721 - protein, 368 aa, Mycobacterium bovis
MTSGSLQFTVLRAVNPATDAQRESMLRAPGFGKYHTDHMVSIDYAEGRGWHNARVIPYGPIELDPSAIVLHYAQEVFEGLKAYRWADGSIVSFRADANAARLRSSARRLAIPELPDAVFIESLRQLIAVDKAWVPGAGGEEALYLRPFIFATEPGLGVRPATQYRYLLIASPAGAYFKGGIAPVSVWVSTEYVRACPGGTGAAKFGGNYAASLLAQAEAAENGCDQVVWLDAVERRYIEEMGGMNIFFVLGSGGSARLVTPELSGSLLPGITRDSLLQLAIDAGFAVEERRIDIDEWQKKAAAGEITEVFACGTAAVITPVARVRHGASEFRIADGQPGEVTMALRDTLTGIQRGTFADTHGWMARLG

SEQ ID NO: 62722 - protein, 220 aa, Mycobacterium bovis
MKVAVAGAGAVGRSVTRELVENGHDITLIERNPDHLDAAAIPEAHWRLGDACELSLLESIHLEEFDVVVAATGDDKVNVVLSLLAKTEFAVPRVVARVNDPRNEWLFNDAWGVDVAVSTPRMLASLIEEAVTVGDLVRLMEFRTGQANLVEITLPDNTPWGGKPVRKLQLPRDAALVTILRGPRVIVPEADEPLEGGDELLFVAVTEAEEELSRLLLPSM

SEQ ID NO: 62723 - protein, 236 aa, Mycobacterium bovis
MAHGSTAHEVLAVVFQVRGVGMSRGAAKPQLNVLLWQRAKEPQRGAWSLPGGRLRNDEDMTSSVRRQLAEKVDLRELAHLEQLAVFSDPHRLPGIRMIASTYLGVVPSPATPELPADTRWHPVSSLPPMAFDHGPMVTHARTRLIAKMSYTNIGFALAPKEFALSTLRDIYGAALGYQVDATNLQRVLARRRVITQTGTIAQSGRSGGRPAALYRFTDSQLRVTDEFAALRPPGQL

SEQ ID NO: 62724 - protein, 355 aa, Mycobacterium bovis
MSASLLVRTACGGRAVAQRLRTVLWPITQTSVVAGLAWYLTHDVFNHPQAFFAPISAVVCMSATNVLRARRAQQMIVGVALGIVLGAGVHALLGSGPIAMGVVVFIALSVAVLCARGLVAQGLMFINQAAVSAVLVLVFASNGSVVFERLFDALVGGGLAIVFSILLFPPDPVVMLCSARADVLAAVRDILAELVNTVSDPTSAPPDWPMAAADRLHQQLNGLIEVRANAAMVARRAPRRWGVRSTVRDLDQQAVYLALLVSSVLHLARTIAGPGGDKLPTPVHAVLTDLAAGTGLADADPTAANEHAAAARATASTLQSAACGSNEVVRADIVQACVTDLQRVIERPGPSGMSA

SEQ ID NO: 62725 - protein, 396 aa, Mycobacterium bovis
MAEAWFETVAIAQQRAKRRLPKSVYSSLIAASEKGITVADNVAAFSELGFAPHVIGATDKRDLSTTVMGQEVSLPVIISPTGVQAVDPGGEVAVARAAAARGTVMGLSSFASKPIEEVIAANPKTFFQVYWQGGRDALAERVERARQAGAVGLVVTTDWTFSHGRDWGSPKIPEEMNLKTILRLSPEAITRPRWLWKFAKTLRPPDLRVPNQGRRGEPGPPFFAAYGEWMATPPPTWEDIGWLRELWGGPFMLKGVMRVDDAKRAVDAGVSAISVSNHGGNNLDGTPASIRALPAVSAAVGDQVEVLLDGGIRRGSDVVKAVALGARAVMIGRAYLWGLAANGQAGVENVLDILRGGIDSALMGLGHASVHDLSPADILVPTGFIRDLGVPSRRDV

SEQ ID NO: 62726 - protein, 298 aa, Mycobacterium bovis
MLSRVGADRADRLRTDMEAAAAGWPGAALLRVDSRNRVLVANGRVLLGAAIELADKPPPEAVFLGRVEGGRHVWAVRAALQPIADPDIPAEAVDLRGLGRIMDDTSSQLVSSASALLNWHDNARFSALDGAPTKPARAGWSRVNPITGHEEFPRIDPAVICLVHDGADRAVLARQAAWPERMFSLLAGFVEAGESFEVCVAREIREEIGLTVRDVRYLGSQPWPFPRSLMVGFHALGDPDEEFSFSDGEIAEAAWFTRDEVRAALAAGDWSSASESKLLLPGSISIARVIIESWAACE

SEQ ID NO: 62727 - protein, 294 aa, Mycobacterium bovis
MRWGVESICTQLTELGVPIAPSTYYDHINREPSRRELRDGELKEHISRVHAANYGVYGARKVWLTLNREGIEVARCTVERLMTKLGLSGTTRGKARRTTIADPATARPADLVQRRFGPPAPNRLWVADLTYVSTWAGFAYVAFVTDAYARRILGWRVASTMATSMVLDAIEQAIWTRQQEGVLDLKDVIHHTDRGSQYTSIRFSERLAEAGIQPSVGAVGSSYDNALAETINGLYKTELIKPGKPWRSIEDVELATARWVDWFNHRRLYQYCGDVPPVELEAAYYAQRQRPAAG

SEQ ID NO: 62728 - protein, 846 aa, Mycobacterium bovis
  MISC_FEATURE (133)..(133): X=any amino acid
MAPLAVDPAALDSAGGAVVAAGAGLGAVISSLTAALAGCAGMAGDDPAGAVFGRSYDGSAAALVQAMSVARNGLCNLGDGVRMSAHNYSLAEAMSDVAGRAAPLPAPPPSGCVGVGAPPSAVGGGGGAPKGWXVVAPYIGMIWPNGDSTKLRAAAVAWRSAGTQFALTEIQSTAGPMGVIRAQQLPEAGLIESAFADAYASTTAVVGQCHQLAAQLDAYAARIDAVHAAVLDLLARICDPLTGIKEVWEFLTDQDEDEIQRIAHDIAVVVDQFSGEVDALAAEITAVVSHAEAVITAMADHAGKQWDRFLHSNPVGVVIDGTGQQLKGFGEEAFGMAKDSWDLGPLRASIDPFGWYRSWEEMLTGMAPLAGLGGENAPGVVESWKQFGKSLIHWDEWTTNPNEALGKTVFDAATLALPGGPLSKLGSKGRDILAGVRGLKERLEPTTPHLEPPATPPRPGPQPPRIEPPESGHPAPAPAAKPAPVPANGPLPHSPTESKPPPVDRPAEPVAPSSASAGQPRVSAATTPGTHVPHGLPQPGEHVPAQAPPATTLLGGPPVESAPATAHQPQWATTPAAPAAAPHSTPGGVHSTESGPHGRSLSAHGSEPTHDGASHGSGHGSGSEPPGLHAPHREQQLAMHSNEPAGEGWHRLSDEAVDPQYGEPLSRHWDFTDNPADRSRINPVVAQLMEDPNAPFGRDPQGQPYTQERYQERFNSVGPWGQQYSNFPPNNGAVPGTRIAYTNLEKFLSDYGPQLDRIGGDQGKYLAIMEHGRPASWEQRALHVTSLRDPYHAYTIDWLPEGWFIEVSEVAPGCGQPGGSIQVRIFDHQNEMRKVEELIRRGVLRQ

SEQ ID NO: 62729 - protein, 242 aa, Mycobacterium bovis
MSGQADTATTAEARTPAHAAHHLVEGVARVLTKPRFRGWIHVYSAGTAVLAGASLVAVSWAVGSAKAGLTTLAYTAATITMFTVSATYHRVNWKSATARNWMKRADHSMIFVFIAGSYTPFALLALPAHDGRVVLSIVWGGAIAGILLKMCWPAAPRSVGVPLYLLLGWVAVWYTATILHNAGVTALVLLFVGGALYSIGGILYAVRWPDPWPTTFGYHEFFHACTAVAAICHYIAMWFVVF

SEQ ID NO: 62730 - protein, 387 aa, Mycobacterium bovis
MTGSLIERVRERLASESGPLRPSVVAAAIRAESGGMLGDTEVLANLRVLQTELTGAGILEPLLSADGTTDVLVTAPDSVWVDDGNGLRRSQIRFADESAVRRLAQRLALAAGRRLDDAQPWVDGQLTGIGVGGFAVRLHAVLPPVATQGTCLSLRVLRPATQDLAALAAAGAIDPAAAALVADIVTARLAFLVCGGTGAGKTTLLAAMLGAVSPDERIVCVEDAAELAPRHPHLVKLVARRANVEGIGEVTVRQLVRQALRMRPDRIVVGEVRGAEVVDLLAALNTGHEGGAGTVHANNPGEVPARMEALGALGGLDRAALHSQLAAAVQVLLHVARDRAGRRRLAEIAVLRQAEGRVQAVTVWHADRGMSDDAAALHDLLRSRASA

SEQ ID NO: 62731 - protein, 273 aa, Mycobacterium bovis
MSDPHHPHIQTHNAWVEFPIFDAKSRSLKKAVLGKAGGTIGRNNSNVVVIEALRDITMELNLGDRVGLVGHNGAGKSTLLRLLSGIYEPTRGWAKVTGRVAPVFDLGIGMDPEISGYENIIIRGLFLGQTRKQMQAKVDEIAEFTELGEYLSMPLRTYSTGMRVRLAMGVVTSIDPEILLLDEGIGAVDADFLRKAQSRLQNLVERSGILVFASHSNEFLARLCKTAIWIDHGVIRLAGGIEEVVRAYEGEDAARHVREVLAETQADRQNVQG

SEQ ID NO: 62732 - protein, 708 aa, Mycobacterium bovis
MIARMETSATAAAATSAPRLRLAKRSLFDPMIVRSALPQSLRKLAPRVQARNPVMLVVLVGAVITTLAFLRDLASSTAQENVFNGLVAAFLWFTVLFANFAEAMAEGRGKAQAAALRKVRSETMANRRTAAGNIESVPSSRLDLDDVVEVSAGETIPSDGEIIEGIASVDESAITGESAPVIRESGGDRSAVTGGTVVLSDRIVVRITAKQGQTFIDRMIALVEGAARQQTPNEIALNILLAGLTIIFLLAVVTLQPFAIYSGGGQRVVVLVALLVCLIPTTIGALLSAIGIAGMDRLVQHNVLATSGRAVEAAGDVNTLLLDKTGTITLGNRQATEFVPINGVSAEAVADAAQLSSLADETPEGRSIVVLAKDEFGLRARDEGVMSHARFVPFTAETRMSGVDLAEVSGIRRIRKGAAAAVMKWVRDHGGHPTEEVGAIVDGISSGGGTPLVVAEWTDNSSARAIGVVHLKDIVKVGIRERFDEMRRMSIRTVMITGDNPATAKAIAQEAGVDDFLAEATPEDKLALIKREQQGGRLVAMTGDGTNDAPALAQADVGVAMNTGTQAAREAGNMVDLDSDPTKLIEVVEIGKQLLITRGALTTFSIANDVAKYFAIIPAMFVGLYPVLDKLNVMALHSPRSAILSAVIFNALVIVALIPLALRGVRFRAESASAMLRRNLLIYGLGGLVVPFIGIKLVDLVIVALGVS

SEQ ID NO: 62733 - protein, 558 aa, Mycobacterium bovis
MDVDLPPPGPLTSGGLRVTALGGINEIGRNMTVFEHLGRLLIIDCGVLFPGHDEPGVDLILPDMRHVEDRLDDIEALVLTHGHEDHIGAIPFLLKLRPDIPVVGSKFTLALVAEKCREYRITPVFVEVREGQSTRHGVFECEYFAVNHSTPDALAIAVYTGAGTILHTGDIKFDQLPPDGRPTDLPGMSRLGDTGVDLLLCDSTNAEIPGVGPSESEVGPTLHRLIRGADGRVIVACFASNVDRVQQIIDAAVALGRRVSFVGRSMVRNMRVARQLGFLRVADSDLIDIAAAETMAPDQVVLITTGTQGEPMSALSRMSRGEHRSITLTAGDLIVLSSSLIPGNEEAVFGVIDALSKIGARVVTNAQARVHVSGHAYAGELLFLYNGVRPRNVMPVHGTWRMLRANAKLAASTGVPQESILLAENGVSVDLVAGKASISGAVPVGKMFVDGLIAGDVGDITLGERLILSSGFVAVTVVVRRGTGQPLAAPHLHSRGFSEDPKALEPAVRKVEAELESLVAANVTDPIRIAQGVRRTVGKWVGETYRRQPMIVPTVIEV

SEQ ID NO: 62734 - protein, 714 aa, Mycobacterium bovis
MGKNEARRSALAPDHGTVVCDPLRRLNRMHATPEESIRIVAAQKKKAQDEYGAASITILEGLEAVRKRPGMYIGSTGERGLHHLIWEVVDNAVDEAMAGYATTVNVVLLEDGGVEVADDGRGIPVATHASGIPTVDVVMTQLHAGGKFDSDAYAISGGLHGVGVSVVNALSTRLEVEIKRDGYEWSQVYEKSEPLGLKQGAPTKKTGSTVRFWADPAVFETTEYDFETVARRLQEMAFLNKGLTINLTDERVTQDEVVDEVVSDVAEAPKSASERAAESTAPHKVKSRTFHYPGGLVDFVKHINRTKNAIHSSIVDFSGKGTGHEVEIAMQWNAGYSESVHTFANTINTHEGGTHEEGFRSALTSVVNKYAKDRKLLKDKDPNLTGDDIREGLAAVISVKVSEPQFEGQTKTKLGNTEVKSFVQKVCNEQLTHWFEANPTDSKVVVNKAVSSAQARIAARKARELVRRKSATDIGGLPGKLADCRSTDPRKSELYVVEGDSAGGSAKSGRDSMFQAILPLRGKIINVEKARIDRVLKNTEVQAIITALGTGIHDEFDIGKLRYHKIVLMADADVDGQHISTLLLTLLFRFMRPLIENGHVFLAQPPLYKLKWQRSDPEFAYSDRERDGLLEAGLKAGKKINKEDGIQRYKGLGEMDAKELWETTMDPSVRVLRQVTLDDAAAADELFSILMGEDVDARRSFITRNAKDVRFLDV

SEQ ID NO: 62735 - protein, 1832 aa, Mycobacterium bovis
LDSLSKVFSDRAGSDQLVIGSVKTNLGHLEAAAGVAGLMKAVLAVHNGYIPRHLNFHQLTPHASEAASRLRIAADGIDWPTTGRPRRAGVSSFGVSGTNAHVVIEQAPDPMAAAGTEPQRGPVPAVSTLVVFGKTAPRVAATASVLADWLDGPGAAVPLADVAHTLNHHRARQTRFGTVAAVDRRQAVIGLRALAAGQSAPGVVAPREGSIGGGTVFVYSGRGSQWAGMGRQLLADEPAFAAAIAELEPEFVAQGGFSLRDVIAGGKELVGIEQIQLGLIGMQLALTALWRSYGVTPDAVIGHSMGEVAAAVVAGALTPAQGLRVTAVRSRLMAPLSGQGTMALLELDAEATEALIADYPEVSLGIYASPRQTVISGPPLLIDELIDKVRQQNGFATRVNIEVAPHNPAMDALQPAMRSELADLTPQPPTIPIISTTYADLGISLGSGPRFDAEHWATNMRNPVRFHQAIAHAGADHHTFIEISAHPLLTHSISDTLRASYDVDNYLSIGTLQRDAHDTLEFHTNLNTTHTTHPPQTPHPPEPHPVLPTTPWQHTQHWITATSAAYHRPDTHPLLGVGVTDPTNGTRVWESELDPDLLWLADHVIDDLVVLPGAAYAEIALAAATDTFAVEQDQPWMISELDLRQMLHVTPGTVLVTTLTGDEQRCQVEIRTRSGSSGWTTHATATVARAEPLAPLDHEGQRREVTTADLEDQLDPDDLYQRLRGAGQQHGPAFQGIVGLAVTQAGVARAQVRLPASARTGSREFMLHPVMMDIALQTLGATRTATDLAGGQDARQGPSSNSALVVPVRFAGVHVYGDITRGVRAVGSLAAAGDRLVGEVVLTDANGQPLLVVDEVEMAVLGSGSGATELTNRLFMLEWEPAPLEKTAEATGALLLIGDPAAGDPLLPALQSSLRDRITDLELASAADEATLRAAISRTSWDGIVVVCPPRANDESMPDEAQLELARTRTLLVASVVETVTRMGARKSPRLWIVTRGAAQFDAGESVTLAQTGLRGIARVLTFEHSELNTTLVDIEPDGTGSLAALAEELLAGSEADEVALRDGQRYVNRLVPAPTTTSGDLAAEARHQVVNLDSSGASRAAVRLQIDQPGRLDALNVHEVKRGRPQGDQVEVRVVAAGLNFSDVLKAMGVYPGLDGAAPVIGGECVGYVTAIGDEVDGVEVGQRVIAFGPGTFGTHLGTIADLVVPIPDTLADNEAATFGVAYLTAWHSLCEVGRLSPGERVLIHSATGGVGMAAVSIAKMIGARIYTTAGSDAKREMLSRLGVEYVGDSRSVDFADEILELTDGYGVDVVLNSLAGEAIQRGVQILAPGGRFIELGKKDVYADASLGLAALAKSASFSVVDLDLNLKLQPARYRQLLQHILQHVADGKLEVLPVTAFSLHDAADAFRLMASGKHTGKIVISIPQHGSIEAIAAPPPLPLVSRDGGYLIVGGMGGLGFVVARWLAEQGAGLIVLNGRSAPSDEVAAAIAELNASGSRIEVITGDITEPDTAERLVRAVEDAGFRLAGVVHSAMVLADEIVLNMTDSAARRVFAPKVTGSWRLHVATAARDVDWWLTFSSAAALLGTPGQGAYAAANSWVDGLVAHRRSAGLPAVGINWGPWADVGRAQFFKDLGVEMINAEQGLAAMQAVLTADRGRTGVFSLDARQWFQSFPAVAGSSLFAKLHDSAARKSGQRRGGGAIRAQLDALDAAERPGHLASAIADEIRAVLRSGDPIDHHRPLETLGLDSLMGLELRNRLEASLGITLPVALVWAYPTISDLATALCERMDYATPAAAQEISDTEPELSDEEMDLLADLVDASELEAATRGES

SEQ ID NO: 62736 - protein, 839 aa, Mycobacterium bovis
MAVRQVTVGYSDGTHKTMPVRCDQTVLDAAEEHGVAIVNECQSGICGTCVATCTAGRYQMGRTEGLSDVERAARKILTCQTFVTSDCRIELQYPVDDNAALLVTGDGVVTAVELVSPSTAILRVDTSGMAGALRYRAGQFAQLQVPGTNVWRNYSYAHPADGRGECEFIIRLLPDGVMSNYLRDRAQPGDHIALRCSKGSFYLRPIVRPVILVAGGTGLSAILAMAQSLDADVAHPVYLLYGVERTEDLCKLDELTELRRRVGRLEVHVVVARPDPDWDGRTGLVTDLLDERMLASGDADVYLCGPVAMVDAARTWLDHNGFHRVGLYYEKFVASGAARRRTPARLDYAGVDIAEVCRRGRGTAVVIGGSIAGIAAAKMLSETFDRVIVLEKDGPHRRREGRPGAAQGWHLHHLLTAGQIELERIFPGIVDDMVREGAFKVDMAAQYRIRLGGTWKKPGTSDIEIVCAGRPLLEWCVRRRLDDEPRIDFRYESEVADLAFDRANNAIVGVAVDNGDADGGDGLQVVPAEFVVDASGKNTRVPEFLERLGVGAPEAEQDIINCFYSTMQHRVPPERRWQDKVMVICYAYRPFEDTYAAQYYTDSSRTILSTSLVAYNCYSPPRTAREFRAFADLMPSPVIGENIDGLEPASPIYNFRYPNMLRLRYEKKRNLPRALLAVGDAYTSADPVSGLGMSLALKEVREMQALLAKYGAGHRDLPRRYYRAIAKMADTAWFVIREQNLRFDWMKDVDKKRPFYFGVLTWYMDRVLELVHDDLDAYREFLAVVHLVKPPSALMRPRIASRVLGKWARTRLSGQKTLIARNYENHPIPAEPADQLVNA

SEQ ID NO: 62737 - protein, 436 aa, Mycobacterium bovis
MRARGAKATDIAILVVAADDGVMPQTVEAINHAQAADVPIVVAVNKIDKEGADPAKIRGQLTEYGLVPEEFGGDTMFVDISAKQGTNIEALEEAVLLTADAALDLRANPDMEAQGVAIEAHLDRGRGPVATVLVQRGTLRVGDSVVAGDAYGRVRRMVDEHGEDVEVALPSRPVQVIGFTSVPGAGDNFLVVDEDRIARQIADRRSARKRNALAARSRKRISLEDLDSALKETSQLNLILKGDNAGTVEALEEALMGIQVDDEVVLRVIDRGVGGITETNVNLASASDAVIIGFNVRAEGKATELASREGVEIRYYSVIYQAIDEIEQALRGLLKPIYEENQLGRAEIRALFRSSKVGLIAGCLVTSGVMRRNAKARLLRDNIVVAENLSIASLRREKDDVTEVRDGFECGLTLGYADIKEGDVIESYELVQKERA

SEQ ID NO: 62738 - protein, 415 aa, Mycobacterium bovis
MTQNSAENPFPVRAVAIRVAGWIDKLGAVWVEGQLAQITMRPDAKTVFMVLRDPAADMSLTVTCSRDLVLSAPVKLAEGVQVVVCGKPSFYTGRGTFSLRLSEIRAVGIGELLARIDRLRRLLDAEGLFDPRLKRPIPYLPNMIGLITGRASAAERDVTTVASARWPAARFAVRNVAVQGPNAVGQIVEALRELDRDPDVDVIVLARGGGSVEDLLPFSDETLCRAIAACRTPVVSAVGHEPDNPLCDLVVDLRAATPTDAAKKVVPDTAAEQRLIDDLRRRSAQALRNWVSREQRAVAQLRSRPVLADPMTMVSVRAEEVHRARSTLRRNLTLMVAAETERIGHLAARLATLGPAATLARGYAIVQTVAQTGPEGGSEPQVLRSVHDAPEGTKLRVRVADGALAAVSEGQTNGL

SEQ ID NO: 62739 - protein, 370 aa, Mycobacterium bovis
MLRRMGDASLTTELGRVLVTGGAGFVGANLVTTLLDRGHWVRSFDRAPSLLPAHPQLEVLQGDITDADVCAAAVDGIDTIFHTAAIIELMGGASVTDEYRQRSFAVNVGGTENLLHAGQRAGVQRFVYTSSNSVVMGGQNIAGGDETLPYTDRFNDLYTETKVVAERFVLAQNGVDGMLTCAIRPSGIWGNGDQTMFRKLFESVLKGHVKVLVGRKSARLDNSYVHNLIHGFILAAAHLVPDGTAPGQAYFINDAEPINMFEFARPVLEACGQRWPKMRISGPAVRWVMTGWQRLHFRFGFPAPLLEPLAVERLYLDNYFSIAKARRDLGYEPLFTTQQALTECLPYYVSLFEQMKNEARAEKTAATVKP

SEQ ID NO: 62740 - protein, 362 aa, Mycobacterium bovis [sequence omitted]

SEQ ID NO: 62741 - protein, 490 aa, Mycobacterium bovis
MTRITRANGCPDGTLENAVVALDGGANYPREILGNKGHGIDMMRRHHLPVPPAFCITTEVGVRYLAAPESTIAAIWDDVLDRMSWLETETSCTFGRGPNPLLVSVRSGATQSMPGMMDTILDVGMTDAVERVLARPGAADFAHDTRRRFTSMYRRIVGSAGPITDDPYAQLRASIEAVFASWNSPRAVAYRDHHGLDDQGGTAVVVQAMVFGNLTANSGAGVLSSRNPITGANEPFGEWLPGGQGDDVVSGLVAVAPITALRDQQPAVYDQLMAAARSLERMAGDVQEIEFTVEDSQLWLLQTRGAERSAQAAVRLALQLHHEGLIDDTETLRRVTPTHIETLLRPSLQPETRLAAPLLAKGLPACPGVVSGTAYTEVDEALDAADRGEPVILVRDHTRPEDVMGMLAAQGIVTEVGGAASHAAVVSRELGRVAVVGCGPGVAAALAGKEITVDGYEGEVRQGVLALSAWSESDTPELRELADIAQRISS

SEQ ID NO: 62742 - protein, 195 aa, Mycobacterium bovis
MPLLTIGDQFPAYQLTALIGGDLSKVDAKQPGDYFTTITSDEHPGKWRVVFFWPKDFTFVCPTEIAAFSKLNDEFEDRDAQILGVSIDSEFAHFQWRAQHNDLKTLPFPMLSDIKRELSQAAGVLNADGVADRVTFIVDPNNEIQFVSATAGSVGRNVDEVLRVLDALQSDELCACNWRKGDPTLDAGELLKASA

SEQ ID NO: 62743 - protein, 415 aa, Mycobacterium bovis
MTVPAPSQLDLRQEVHDAARRARVAARRLASLPTTVKDRALHAAADELLAHRDQILAANAEDLNAAREADTPAAMLDRLSLNPQRVDGIAAGLRQVAGLRDPVGEVLRGYTLPNGLQLRQQRVPLGVVGMIYEGRPNVTVDAFGLTLKSGNAALLRGSSSAAKSNEALVAVLRTALVGLELPADAVQLLSAADRATVTHLIQARGLVDVVIPRGGAGLIEAVVRDAQVPTIETGVGNCHVYVHQAADLDVAERILLNSKTRRPSVCNAAETLLVDAAIAETALPRLLAALQHAGVTVHLDPDEADLRREYLSLDIAVAVVDGVDAAIAHINEYGTGHTEAIVTTNLDAAQRFTEQIDAAAVMVNASTAFTDGEQFGFGAEIGISTQKLHARGPMGLPELTSTKWIAWGAGHTRPA

SEQ ID NO: 62744 - protein, 468 aa, Mycobacterium bovis
  MISC_FEATURE (114)..(114): X=any amino acid
  MISC_FEATURE (132)..(132): X=any amino acid
  MISC_FEATURE (144)..(144): X=any amino acid
DVRLVPAALVSWIVTAAGIVWPIGNVCALCCVVVALGGGALWWCVARRSWHAPRLGSISAGLVAVGMVGAGYGLAVALRSEAVDRHPITVAFGTPRWSRSPPARAQCRWGGAGXCSGRRFNGCGMTRHPAGXWFSRERWTSASXWSDSPSSSARVSVARRVHDLTVAVFNATGRPTVGRAGPVHRAAHIVRHRFAAAVREVLPADQATMLPALVLGDTSTVTALTSREFRAAGLTHLTAVSGANVTIVCAAALVSARLIGPRAAVVCAAVALVAFVILVQPTASVLRAAVMGAIALVGMLSARRRQAIPALSGSVLVLLAAAPHLAVDIGFALSVAATGALVVIAPVWSRRLVDRGCPKVLADALAVAAAAQLVTAPLVAAISGRVSLVAVVANLAVAAVIAPITVLGSVAAVLVVPWPAGAQVLIRFTGPEVWWVLRVAHWASGVPAATVPVAAGLPGVLLVGGATV

SEQ ID NO: 62745 - protein, 88 aa, Mycobacterium bovis
MHVANIKSQQKRNRTNERARLRNKAVKSSLRTAVRAFREAAHAGDKAKAAELLASTNRKLDKAASKGVIHKNQAANKKSALAQALNKL

SEQ ID NO: 62746 - protein, 104 aa, Mycobacterium bovis
MMATYAIVKTGGKQYKVAVGDVVKVEKLESEQGEKVSLPVALVVDGATVTTDAKALAKVAVTGEVLGHTKGPKIRIHKFKNKTGYHKRQGHRQQLTVLKVTGIA

SEQ ID NO: 62747 - protein, 86 aa, Mycobacterium bovis
MAHKKGASSSRNGRDSAAQRLGVKRYGGQVVKAGEILVRQRGTKFHPGVNVGRGGDDTLFAKTAGAVEFGIKRGRKTVSIVGSTTA

SEQ ID NO: 62748 - protein, 484 aa, Mycobacterium bovis
MKGSSVPRFVDRVVIHTRAGSGGNGCASVHREKFKPLGGPDGGNGGRGGSIVFVVDPQVHTLLDFHFRPHLTAASGKHGMGNNRDGAAGADLEVKVPEGTVVLDENGRLLADLVGAGTRFEAAAGGRGGLGNAALASRVRKAPGFALLGEKGQSRDLTLELKTVADVGLVGFPSAGKSSLVSAISAAKPKIADYPFTTLVPNLGVVSAGEHAFTVADVPGLIPGASRGRGLGLDFLRHIERCAVLVHVVDCATAEPGRDPISDIDALETELACYTPTLQGDAALGDLAARPRAVVLNKIDVPEARELAEFVRDDIAQRGWPVFCVSTATRENLQPLIFGLSQMISDYNAARPVAVPRRPVIRPIPVDDSGFTVEPDGHGGFVVSGARPERWIDQTNFDNDEAVGYLADRLARLGVEEELLRLGARSGCAVTIGEMTFDWEPQTPAGEPVAMSGRGTDPRLDSNKRVGAAERKAARSRRREHGDG

SEQ ID NO: 62749 - protein, 517 aa, Mycobacterium bovis
MPVTTEPGYLSPSVAVATSMPKRGVGAAVLIVPVVSTGEEDRPGAVVASAEPFLRADTVAEIEAGLRALDATGASDQVHRLAVPSLPVGSVLTVGLGKPRREWPADTIRCAAGVAARALNSSEAVITTLAELPGDGICSATVEGLILGSYRFSAFRSDKTAPKDAGLRKITVLCCAKDAKKRALHGAAVATAVATARDLVNTPPSHLFPAELAKRAKTLSESVGLDVEVIDEKALKKAGYGGVIGVGQGSSRPPRLVRLIHRGSRLAKNPQKAKKVALVGKGITFDTGGISIKPAASMHHMTSDMGGAAAVIATVTLAARLRLPIDVIATVPMAENMPSATAQRPGDVLTQYGGTTVEVLNTDAEGRLILADAIVRACEDKPDYLIETSTLTGAQTVALGTRIPGVMGSDEFRDRVAAISQRVGENGWPMPLPDDLKDDLKSTVADLANVSGQRFAGMLVAGVFLREFVAESVDWAHIDVAGPAYNTGSAWGYTPKGATGVPTRTMFAVLEDIAKNG

SEQ ID NO: 62750 - protein, 144 aa, Mycobacterium bovis
MAEKMFAQQLRHRGLGDAVRVTSAGTGNWHVGSCADERAAGVLRAHGYPTDHRAAQVGTEHLAADLLVALDRNHARLLRQLGVEAARVRMMRSFDPRSGTHALDVEDPYNGDHSDFEEVFAVIESALPGLHDWVDERLARNGPS

SEQ ID NO: 62751 - protein, 553 aa, Mycobacterium bovis
MAFSVQMPALGESVTEGTVTRWLKQEGDTVELDEPLVEVSTDKVDTEIPSPAAGVLTKIIAQEDDTVEVGGELAVIGDAKDAGEAAAPAPEKVPAAQPESKPAPEPPPVQPTSGAPAGGDAKPVLMPELGESVTEGTVIRWLKKIGDSVQVDEPLVEVSTDKVDTEIPSPVAGVLVSISADEDATVPVGGELARIGVAADIGAAPAPKPAPKPVPEPAPTPKAEPAPSPPAAQPAGAAEGAPYVTPLVRKLASENNIDLAGVTGTGVGGRIRKQDVLAAAEQKKRAKAPAPAAQAAAAPAPKAPPAPAPALAHLRGTTQKASRIRQITANKTRESLQATAQLTQTHEVDMTKIVGLRARAKAAFAEREGVNLTFLPFFAKAVIDALKIHPNINASYNEDTKEITYYDAEHLGFAVDTEQGLLSPVIHDAGDLSLAGLARAIADIAARARSGNLKPDELSGGTFTITNIGSQGALFDTPILVPPQAAMLGTGAIVKRPRVVVDASGNESIGVRSVCYLPLTYDHRLIDGADAGRFLTTIKHRLEEGAFEADLGL

SEQ ID NO: 62752 - protein, 302 aa, Mycobacterium bovis
MMANAVVAIAGSSGLIGSALTAALRAADHTVLRIVRRAPANSEELHWNPESGEFDPHALTDVDAVVNLCGVNIAQRRWSGAFKQSLRDSRITPTEVLSAAVADAGVATLINASAVGYYGNTKDRVVDENDSAGTGFLAQLCVDWETATRPAQQSGARVVLARTGVVLSPAGGMLRRMRPLFSVGLGARLGSGRQYMSWISLEDEVRALQFAIAQPNLSGPVNLTGPAPVTNAEFTTAFGRAVNRPTPLMLPSVAVRAAFGEFADEGLLIGQRAIPSALERAGFQFHHNTIGEALGYATTRPG

SEQ ID NO: 62753 - protein, 281 aa, Mycobacterium bovis
MSEQTIYGANTPGGSGPRTKIRTHHLQRWKADGHKWAMLTAYDYSTARIFDEAGIPVLLVGDSAANVVYGYDTTVPISIDELIPLVRGVVRGAPHALVVADLPFGSYEAGPTAALAAATRFLKDGGAHAVKLEGGERVAEQIACLTAAGIPVMAHIGFTPQSVNTLGGFRVQGRGDAAEQTIADAIAVAEAGAFAVVMEMVPAELATQITGKLTIPTVGIGAGPNCDGQVLVWQDMAGFSGAKTARFVKRYADVGGELRRAAMQYAQEVAGGVFPADEHSF

SEQ ID NO: 62754 - protein, 311 aa, Mycobacterium bovis
MSVAAEGRRLLRLEVRNAQTPIERKPPWIKTRARIGPEYTELKNLVRREGLHTVCEEAGCPNIFECWEDREATFLIGGDQCTRRCDFCQIDTGKPAELDRDEPRRVADSVRTMGLRYATVTGVARDDLPDGGAWLYAATVRAIKELNPSTGVELLIPDFNGEPTRLAEVFESGPEVLAHNVETVPRIFKRIRPAFTYRRSLGVLTAARDAGLVTKSNLILGLGETSDEVRTALGDLRDAGCDIVTITQYLRPSARHHPVERWVKPEEFVQFARFAEGLGFAGVLAGPLVRSSYRAGRLYEQARNSRALASR

SEQ ID NO: 62755 - protein, 240 aa, Mycobacterium bovis
MALQPVTRRSVPEEVFEQIATDVLTGEMPPGEALPSERRLAELLGVSRPAVREALKRLSAAGLVEVRQGDVTTVRDFRRHAGLDLLPRLLFRNGELDISVVRSILEARLRNFPKVAELAAERNEPELAELLQDSLRALDTEEDPIVWQRHTLDFWDHVVDSAGSIVDRLMYNAFRAAYEPTLAALTTTMTAAAKRPSDYRKLADAICSGDPTGAKKAAQDLLELANTSLMAVLVSQASRQ

SEQ ID NO: 62756 - protein, 214 aa, Mycobacterium bovis
MLIAIEGVDGAGKRTLVEKLSGAFRAAGRSVATLAFPRYGQSVAADIAAEALHGEHGDLASSVYAMATLFALDRAGAVHTIQGLCRGYDVVILDRYVASNAAYSAARLHENAAGKAAAWVQRIEFARLGLPKPDWQVLLAVSAELAGERSRGRAQRDPGRARDNYERDAELQQRTGAVYAELAAQGWGGRWLVVGADVDPGRLAATLAPPDVPS

SEQ ID NO: 62757 - protein, 388 aa, Mycobacterium bovis
  MISC_FEATURE (119)..(119): X=any amino acid
  MISC_FEATURE (126)..(126): X=any amino acid
  MISC_FEATURE (141)..(141): X=any amino acid
DVVVVGAGPAGSAAAAWAARAGRDVLVIDTATFPRDKPCGDGLTPRAVAELHQLGLGKWLADHIRHRGLRMSGFGGEVEVDWPGPSFPSYGSAVARLELDDRIRKVARGHRCAHATWRXSRCCSPXFIEAGGIADPGRRHXGGCRQLIVADGARSPLGRKLGRRWHRETVYGVAVRGYLSTAYSDDPWLTSHLELRSPDGAVLPGYGWIFPLGNGEVNIGVGALSTSRRPADLALRPLISYYTDLRRDEWGFTGQPRAVSSALLPMGGAVSGVAGSNWMLIGDAAACVNPLNGEGIDYGLETGRLAAELLDSRDLARLWPSLLADRYGRGFSVARRLALLLTFPRFLPTTGPITMRSTALMNIAVRVMSNLVTDDDRDWVARVWRGGG

SEQ ID NO: 62758 - protein, 241 aa, Mycobacterium bovis
MSTVLTYIRAVDIYEHMTESLDLEFESAYRGESVAFGEGVRPPWSIGEPQPELAALIVQGKFRGDVLDVGCGEAAISLALAERGHTTVGLDLSPAAVELARHEAAKRGLANASFEVADASSFTGYDGRFDTIVDSTLFHSMPVESREGYLQSIVRAAAPGASYFVLVFDRAAIPEGPINAVTEDELRAAVSKYWIIDEIKPARLYARFPAGFAGMPALLDIREEPNGLQSIGGWLLSAHLG

SEQ ID NO: 62759 - protein, 417 aa, Mycobacterium bovis
MNLQLFLLLIVVVTALAFDFTNGFHDTGNAMATSIASGALAPRVAVALSAVLNLIGAFLSTAVAATIAKGLIDANLVTLELVFAGLVGGIVWNLLTWLLGIPSSSSHALIGGIVGATIAAVGLRGVIWSGVVSKVIVPAVVAALLATLVGAVGTWLVYRTTRGVAEKRTERGFRRGQIGSASLVSLAHGTNDAQKTMGVIFLALMSYGAVSTTASVPPLWVIVSCAVAMAAGTYLGGWRIIRTLGKGLVEIKPPQGMAAESSSAAVILLSAHFGYALSTTQVATGSVLGSGVGKPGAEVRWGVAGRMVVAWLVTLPLAGLVGAFTYGLVHFIGGYPGAILGFALLWLTATAIWLRSRRAPIDHTNVNADWEGNLTAGLEAGAQPLADQRPPVPAPPAPTPPPNHRAPQFGVTTRNAP

SEQ ID NO: 62760 - protein, 269 aa, Mycobacterium bovis
MTEIATTSGARSVGLLSVGAYRPERVVTNDEICQHIDSSDEWIYTRTGIKTRRFAADDESAASMATEACRRALSNAGLSAADIDGVIVTTNTHFLQTPPAAPMVAASLGAKGILGFDLSAGCAGFGYALGAAADMIRGGGAATMLVVGTEKLSPTIDMYDRGNCFIFADGAAAVVVGETPFQGIGPTVAGSDGEQADAIRQDIDWITFAQNPSGPRPFVRLEGPAVFRWAAFKMGDVGRRAMDAAGVRPDQIDVFVPHQANSRINELLV

SEQ ID NO: 62761 - protein, 1439 aa, Mycobacterium bovis
  MISC_FEATURE (1281)..(1281): X=any amino acid
PSALSRFSALTRDWFTSTFAAPTAAQASAWAAIADGDNTLVIAPTGSGKTLAAFLWALDSLAGSEPMSERPAATRVLYVSPLKALAVDVERNLRTPLAGLTRLAERQGLPAPQIRVGVRSGDTPPALRRQLVSQPPDVLITTPESLFLMLTSAARQTLTGVQTVIIDEIHAIAATKRGAHLALSLERLDDLSSRRRAQRIGLSATVRPPEELARFLSGQSPTTIVAPPAAKTVELSVQVPVPDMANLTDNTIWPDVEARLVDLIESHNSTIVFANSRRLAERLTARLNEIHAARCGIELAPDTNQQVAGGAPAHIMGSGQTFGAPPVLARAHHGSISKEQRAVVEEDLKRGQLKAVVATSSLELGIDMGAVDLVIQVQAPPSVASGLQRIGRAGHQVGEISRGVLFPKHRTDLLGCAVSVQRMLAGEIETMRVPANPLDILAQHTVAAAALEPLDADAWFDTVRRAAPFATLPRSLFEATLDLLSGKYPSTEFAELRPRLVYDRDTGTLTARPGAQRLAVTSGGAIPDRGLFAVYLATERPSRVGELDEEMVYESRPGDVISLGATSWRITEITHDRVLVIPAPGQPARLPFWRGDDAGRPAELGAALGALTGELAALDRTAFGTRCAGLGFDDYATDNLWRLLDDQRTATAVVPTDSTLLVERFRDELGDWRVILHSPYGLRVHGPLALAVGRRLRDRYGIDEKPTASDNGIMVRLPDTVSAGEDSPPGAELFVFDADEIDPIVTTEVAGSALFASRFRESAARALLLPRRHPGRRSPLWQQRQRAARLLEVARKYPDFPIVLETVRECLQNVYDVPILVELMARIAQRRVRVAEAETAKPSPFAASLLFGYVGAFMYEGDTPLAERRAAALALDGTLLAELLGRVELRELLDPDVIAATSRQLQHLAADRVARDAEGVADLLRLLGPLTEDEIAARAGAPEVSGWLDGLRAAKRALVVSFAGRSWWVAVEDMGRLRDGVGAAVPVGLPASFTEAVADPLGELLGRYARTHTPFTTAAAAARFGLGLRVTADVLGRLASDGRLVRGEFVAAAEGSAGGEQWCDAEVLRILRRRSLAALRAQAEPVSTAAYGRFLPAWQHVSAGNSGIDGLAAVIDQLAGVRIPASAIEPLVLAPRIRDYSPAMLDELLASGDVTWSGAGSISGSDGWIALHPADSAPMTLAEPAEIDFTDAHRAILASLGTGGAYFFRQLTHDGLTEAELKAALWELIWAGRVTGDTFAPVRAVLGGAGTRKRAASRTRRASTAAPEPIPPHARPGPQRXPDRRRAVVRAAASRTGSTLRAHYQAELLLNRHGVLTKDAVAAEGVAGGFATLYKVLSAFEDAGRCQRGYFIESLGGAQFAVASTVDRLRSYLDGVDPEQPDYHAVVLAAADPANPYGAALPWPASSADGTARPGRKAGALVVLVDGELAWFLERGGRS

SEQ ID NO: 62762 - protein, 500 aa, Mycobacterium bovis
FIAAIDQGTTSTRCMIFDHHGAEVARHQLEHEQILPRAGWVEHNPVEIWERTASVLISVLNATNLSPKDIAALGITNQRETTLVWNRHTGRPYYNAIVWQDTRTDRIASALDRDGRGNLIRRKAGLPPATYFSGGKLQWILENVDGVRAAAENGDALFGTPDTWVLWNLTGGPGGGVHVTDVTNASRTMLMDLETLDWDDELLSLFSIPRAMLPEIASSAPSEPYGVTLATGPVGGEVPITGVLADQHAAMVGQVCLAPGEAKNTYGTGNFLLLNTGETIVRSNNGLLTTVCYQFGNAKPVYALEGSIAVTGSAVQWLRDQLGIISGAAQSEALARQVPDNGGMYFVPAFSGLFAPYWRSDARGAIVGLSRFNTNAHLARATLEAICYQSRDVVDAMEADSGVRLQVLKVDGGITGNDLCMQIQADVLGVDVVRPVVAETTALGAAYAAGLAVGFWAAPSDLRANWREDKRWTPTWDDDERAAGYAGWRKAVQRTLDWVD

SEQ ID NO: 62763 - protein, 357 aa, Mycobacterium bovis
MSLSLGIVGLPNVGKSTLFNALTRNNVVAANYPFATIEPNEGVVSLPDPRLDKLAELFGSQRVVPAPVTFVDIAGLIKGASEGAGLGNKFLAHIRECDAICQVVRVFVDDDVTHVTGRVDPQSDIEVVETELILADLQTLERATGRLEKEARTNKARKPVYDAALRAQQVLDAGKTLFAAGVDAAALRELNLLTTKPFLYVFNADEAVLTDPARVGELRALVAPADAVFLDAAIESELTELDDESAAELLESIGQSERGLDALARAGFHTLKLQTFLTAGPKEARAWTIHQGDTAPKAAGVIHSDFEKGFIKAEIVSYDDLVAAGSMAAAKAAGKVRIEGKDYVMADGDVVEFRFNV

SEQ ID NO: 62764 - protein, 637 aa, Mycobacterium bovis
MGATGGTQLSFADLAHAQGAAWTPADEMSLRETTFVVVDLETTGGRTTGNDATPPDAITEIGAVKVCGGAVLGEFATLVNPQHSIPPQIVRLTGITTAMVGNAPTIDAVLPMFFEFAGDSVLVAHNAGFDIGFLRAVARRCDITCAQPQVLCTMRLVRRVLSRDEAPSVRLAALARLFAVASNPTHRALDDARATVDVLHALIERVGNQGVHTYAELRSYLPNVTQAQRCKRVLAETLPHRPGVYLFRGPSGEVLYVGTAADLRRRVSQYFNGTDRRKRMTEMVMLASSIDHVECAHPLEAGVRELRMLSTHAPPYNRRSKFPYRWWWVALTDEAFPRLSVIRAPRHDRVVGPFRSRSKAAETTALLARCTGLRTCTTRLTRSARHGPACPELEVSACPAARDVTAAQYAEAVLRAAALIGGLDNAALAAAVQQVTELAERRRYESAARLRDHLATAIEALWHGQRLRALAALPELIAAKPDGPREGGYQLAVIRHGQLAAAGRAPRGVPPMPVVDAIRRGAQAILPTPAPLGGALVEEIALIARWLAEPGVRIVGVSNDAAGLASPVRSAGPWAAWAATARSAQLAGEQLSRGWQSDLPTEPHPSREQLFGRTGVDCRTGPPQPLLPGRQPFSTAG

SEQ ID NO: 62765 - protein, 393 aa, Mycobacterium bovis
MTGPLAAARSVAATKSMTAPTVDERPDIKKGLAGVVVDTTAISKVVPQTNSLTYRGYPVQDLAARCSFEQVAFLLWRGELPTDAELALFSQRERASRRVDRSMLSLLAKLPDNCHPMDVVRTAISYLGAEDPDEDDAAANRAKAMRMMAVLPTIVAIDMRRRRGLPPIAPHSGLGYAQNFLHMCFGEVPETAVVSAFEQSMILYAEHGFNASTFAARVVTSTQSDIYSAVTGAIGALKGRLHGGANEAVMHDMIEIGDPANAREWLRAKLARKEKIMGFGHRVYRHGDSRVPTMKRALERVGTVRDGQRWLDIYQVLAAEMASATGILPNLDFPTGPAYYLMGFDIASFTPIFVMSRITGWTAHIMEQATANALIRPLSAYCGHEQRVLPGTF

SEQ ID NO: 62766 - protein, 971 aa, Mycobacterium bovis
MGVTESPTAGPGGVPRADDADSDVPRYRYTAELAARLERTWQENWARLGTFNVPNPVGSLAPPDGAAVPDDKLFVQDMFPYPSGEGLHVGHPLGYIATDVYARYFRMVGRNVLHALGFDAFGLPAEQYAVQTGTHPRTRTEANVVNFRRQLGRLGFGHDSRRSFSTTDVDFYRWTQWIFLQIYNAWFDTTANKARPISELVAEFESGARCLDGGRDWAKLTAGERADVIDEYRLVYRADSLVNWCPGLGTVLANEEVTADGRSDRGNFPVFRKRLRQWMMRITAYADRLLDDLDVLDWPEQVKTMQRNWIGRSTGAVALFSARAASDDGFEVDIEVFTTRPDTLFGATYLVLAPEHDLVDELVAASWPAGVNPLWTYGGGTPGEAIAAYRRAIAAKSDLERQESREKTGVFLGSYAINPANGEPVPIFIADYVLAGYGTGAIMAVPGHDQRDWDFARAFGLPIVEVIAGGNISESAYTGDGILVNSDYLNGMSVPAAKRAIVDRLESAGRGRARIEFKLRDWLFARQRYWGEPFPIVYDSDGRPHALDEAALPVELPDVPDYSPVLFDPDDADSEPSPPLAKATEWVHVDLDLGDGLKPYSRDTNVMPQWAGSSWYELRYTDPHNSERFCAKENEAYWMGPRPAEHGPDDPGGVDLYVGGAEHAVLHLLYSRFWHKVLYDLGHVSSREPYRRLVNQGYIQAYAYTDARGSYVPAEQVIERGDRFVYPGPDGEVEVFQEFGKIGKSLKNSVSPDEICDAYGADTLRVYEMSMGPLEASRPWATKDVVGAYRFLQRVWRLVVDEHTGETRVADGVELDIDTLRALHRTIVGVSEDFAALRNNTATAKLIEYTNHLTKKHRDAVPRAAVEPLVQMLAPLAPHIAEELWLRLGNTTSLAHGPFPKADAAYLVDETVEYPVQVNGKVRGRVVVAADTDEETLKAAVLTDEKVQAFLAGATPRKVIVVAGRLVNLVI

SEQ ID NO: 62767 - protein, 385 aa, Mycobacterium bovis
MEVSRALLFELGVLLAVLAVLGAVARRFALSPIPVYLLAGLSLGNGGILGVAAAGEFIATGAPIGVVLLLLALGLEFSATEFASSLRHHLPSAGVDIVLNATPGAVAGWLLGLDGVAILGLAGVTYISSSGVIARLLEDLRRLGNRETPAVLSVLVLEDFAMAAYLPLFAVLATDGSWLEAVVGMTVAIAALLGAFAASYRWGHHVGRLVTHPDSEQLLLRVLGITLIVAAVAESLHASAAVGAFLVGLTLTGETADRARMVLTPLRDLFATIFFLGIGLSVDPGKLVSMLPVALALAAVTAATKVATGMFAARREGVARRGQLRAGTALVARGEFSLIIIGLAGASIPGVAALATAYVFVMAIVGPILARYTGGGLPAAAVASN

SEQ ID NO: 62768 - protein, 152 aa, Mycobacterium bovis
MKLILTADVDHLGSIGDTVEVKDGYGRNFLLPRGLAIVASRGAQKQADEIRRARETKSVRDLEHANEIKAAIEALGPIALPVKTSADSGKLFGSVTAADVVAAIKKAGGPNLDKRIVRLPKTHIKAVGTHFVSVHLHPEIDVEVSLDVVAQS

SEQ ID NO: 62769 - protein, 2512 aa, Mycobacterium bovis
MHRVRLSRSQRNLYNGVRQDNNPALYLIGKSYRFRRLELARFLAALHATVLDNPVQLCVLENSGADYPDLVPRLRFGDIVRVGSADEHLQSTWCSGILGKPLVRHTVHTDPNGYVTGLDVHTHHILLDGGATGTIEADLARYLTTDPAGETPSVGAGLAKLREAHRRETAKVEESRGRLSAVVQRELADEAYHGGHGHSVSDAPGTAAKGVLHESATICGNAFDAILTLSEAQRVPLNVLVAAAAVAVDASLRQNTETLLVHTVDNRFGDSDLNVATCLVNSVAQTVRFPPFASVSDVVRTLDRGYVKAVRRRWLREEHYRRMYLAINRTSHVEALTLNFIREPCAPGLRPFLSEVPIATDIGPVEGMTVASVLDEEQRTLNLAIWNRADLPACKTHPKVAERIAAALESMAAMWDRPIAMIVNDWFGIGPDGTRCQGDWPARQPSTPAWFLDSARGVHQFLGRRRFVYPWVAWLVQRGAAPGDVLVFTDDDTDKTIDLLIACHLAGCGYSVCDTADEISVRTNAITEHGDGILVTVVDVAATQLAVVGHDELRKVVDERVTQVTHDALLATKTAYIMPTSGTTGQPKLVRISHGSLAVFCDAISRAYGWGAHDTVLQCAPLTSDISVEEIFGGAACGARLVRSAAMKTGDLAALVDDLVARETTIVDLPTAVWQLLCADGDAIDAIGRSRLRQIVIGGEAIRCSAVDKWLESAASQGISLLSSYGPTEATVVATFLPIVCDQTTMDGALLRLGRPILPNTVFLAFGEVVIVGDLVADGYLGIDGDGFGTVTAADGSRRRAFATGDRVTVDAEGFPVFSGRKDAVVKISGKRVDIAEVTRRIAEDPAVSDVAVELHSGSLGVWFKSQRTREGEQDAAAATRIRLVLVSLGVSSFFVVGVPNIPRKPNGKIDSDNLPRLPQWSAAGLNTAETGQRAAGLSQIWSRQLGRAIGPDSSLLGEGIGSLDLIRILPETRRYLGWRLSLLDLIGADTAANLADYAPTPDAPTGEDRFRPLVAAQRPAAIPLSFAQRRLWFLDQLQRPAPVYNMAVALRLRGYLDTEALGAAVADVVGRHESLRTVFPAVDGVPRQLVIEARRADLGCDIVDATAWPADRLQRAIEEAARHSFDLATEIPLRTWLFRIADDEHVLVAVAHHIAADGWSVAPLTADLSAAYASRCAGRAPDWAPLPVQYVDYTLWQREILGDLDDSDSPIAAQLAYWENALAGMPERLRLPTARPYPPVADQRGASLVVDWPASVQQQVRRIARQHNATSFMVVAAGLAVLLSKLSGSPDVAVGFPIAGRSDPALDNLVGFFVNTLVLRVNLAGDPSFAELLGQVRARSLAAYENQDVPFEVLVDRLKPTRALTHHPLIQVMLAWQDNPVGQLNLGDLQATPMPIDTRTARMDLVFSLAERFSEGSEPAGIGGAVEYRTDVFEAQAIDVLIERLRKVLVAVAAAPERTVSSIDALDGTERARLDEWGNRAVLTAPAPTPVSIPQMLAAQVARIPEAEAVCCGDASMTYRELDEASNRLAHRLAGCGAGPGECVALLFERCAPAVVAMVAVLKTGAAYLPIDPANPPPRVAFMLGDAVPVAAVTTAGLRSRLAGHDLPIIDVVDALAAYPGTPPPMPAAVNLAYILYTSGTTGEPKGVGITHRNVTRLFASLPARLSAAQVWSQCHSYGFDASAWEIWGALLGGGRLVIVPESVAASPNDFHGLLVAEHVSVLTQTPAAVAMLPTQGLESVALVVAGEACPAALVDRWAPGRVMLNAYGPTETTICAAISAPLRPGSGMPPIGVPVSGAALFVLDSWLRPVPAGVAGELYIAGAGVGVGYWRRAGLTASRFVACPFGGSGARMYRTGDLVCWRADGQLEFLGRTDDQVKIRGYRIELGEVATALAELAGVGQAVVIAREDRPGDKRLVGYATEIAPGAVDPAGLRAQLAQRLPGYLVPAAVVVIDALPLTVNGKLDHRALPAPEYGDTNGYRAPAGPVEKTVAGIFARVLGLERVGVDDSFFELGGDSLAAMRVIAAINTTLNADLPVRALLHASSTRGLSQLLGRDARPTSDPRLVSVHGDNPTEVHASDLTLDRFIDADTLATAVNLPGPSPELRTVLLTGATGFLGRYLVLELLRRLDVDGRLICLVRAESDEDARRRLEKTFDSGDPELLRHFKELAADRLEVVAGDKSEPDLGLDQPMWRRLAETVDLIVDSAAMVNAFPYHELFGPNVAGTAELIRIALTTKLKPFTYVSTADVGAAIEPSAFTEDADIRVISPTRTVDGGWAGGYGTSKWAGEVLLREANDLCALPVAVFRCGMILADTSYAGQLNMSDWVTRMVLSLMATGIAPRSFYEPDSEGNRQRAHFDGLPVTFVAEAIAVLGARVAGSSLAGFATYHVMNPHDDGIGLDEYVDWLIEAGYPIRRIDDFAEWLQRFEASLGALPDRQRRHSVLPMLLASNSQRLQPLKPTRGCSAPTDRFRAAVRAAKVGSDKDNPDIPHVSAPTIINYVTNLQLLGLL

SEQ ID NO: 62770 - protein, 286 aa, Mycobacterium bovis
MSDAIQRVGVVGAGQMGSGIAEVSARAGVEVTVFEPAEALITAGRNRIVKSLERAVSAGKVTERERDRALGLLTFTTDLNDLSDRQLVIEAVVEDEAVKSEIFAELDRVVTDPDAVLASNTSSIPIMKVAAATKQPQRVLGLHFFNPVPVLPLVELVRTLVTDEAAAARTEEFASTVLGKQVVRCSDRSGFVVNALLVPYLLSAIRMVEAGFATVEDVDKAVVAGLSHPMGPLRLSDLVGLDTLKLIADKMFEEFKEPHYGPPPLLLRMVEAGQLGKKSGRGFYTY

SEQ ID NO: 62771 - protein, 37 aa, Mycobacterium bovis
MKVNPSVKPICDKCRLIRRHGRVMVICSDPRHKQRQG

SEQ ID NO: 62772 - protein, 391 aa, Mycobacterium bovis
MKPHLRGRAVGVIPRIPRQIGLSLSRHQTPIERTNVVPLSNRQDSLDSAALGPRQVLGAQDWPLQRSELSDAALEFGRRGVTVEGDHVGVVELNGADGAAASGISPIPLPDTTGQRLNRIDRAGPSEHLGEELRDALELVFPFHLAIHARGIVGFIPQVPTQHAIVVAELAQHTRDVVVQRAGIAAVIEAFSTRTLHPPGVVHPSPWRPLPTRSGERVPAGVEQDKERFDVVSRRDGDELREPGLETGRVLGPQQVVEEDSHGVEPVKPRKAQLVVDAPGIVCAWLEHLELVDGVRGDVVCTDEPAVRLIPAMCAVGRPPAWFSGGGPRRLAQHRACRQQQRELQGRSTVHKMTIVSRPRCTALFGDVVRLALSIRNNLRLGIVMRTPAWL

SEQ ID NO: 62773 - protein, 402 aa, Mycobacterium bovis
MDAATTRVGLTDLTFRLLRESFADAVSWVAKNLPARPAVPVLSGVLLTGSDNGLTISGFDYEVSAEAQVGAEIVSPGSVLVSGRLLSDITRALPNKPVGVHVEGNRVALTCGNARFSLPTMPVEDYPTLPTLPEETGLLPAELFAEAISQVAIAAGRDDTLPMLTGIRVEILGETVVLAATDRFRLAVRELKWSASSPDIEAAVLVPAKTLAEAAKAGIGGSDVRLSLGTGPGVGKDGLLGISGNGKRSTTRLLDAEFPKFRQLLPTEHTAVATMDVAELIEAIKLVALVADRGAQVRMEFADGSVRLSAGADDVGRAEEDLVVDYAGEPLTIAFNPTYLTDGLSSLRSERVSFGFTTAGKPALLRPVSGDDRPVAGLNGNGPFPAVSTDYVYLLMPVRLPG

SEQ ID NO: 62774 - protein, 440 aa, Mycobacterium bovis
MAPAAKNTSQTRRRVAVLGGNRIPFARSDGAYADASNQDMFTAALSGLVDRFGLAGERLDMVVGGAVLKHSRDFNLMRECVLGSELSPYTPAFDLQQACGTGLQAAIAAADGIAAGRYEVAAAGGVDTTSDPPIGLGDDLRRTLLKLRRSRSNVQRLKLVGTLPASLGVEIPANSEPRTGLSMGEHAAVTAKQMGIKRVDQDELAAASHRNMADAYDRGFFDDLVSPFLGLYRDDNLRPNSSVEKLATLRPVFGVKAGDATMTAGNSTPLTDGASVALLASEQWAEAHSLAPLAYLVDAETAAVDYVNGNDGLLMAPTYAVPRLLARNGLSLQDFDFYEIHEAFASVVLAHLAAWESEEYCKRRLGLDAALGSIDRSKLNVNGSSLAAGHPFAATGGRILAQTAKQLAEKKAAKKGGGPLRGLISICAAGGQGVAAILEA

SEQ ID NO: 62775 - protein, 463 aa, Mycobacterium bovis
MALTTAPAIDYALPRQQDEGDHWIDDWRPEDPVFWETIGRPIARRNLIFSIFAEHVGFSVWMLWSIVVVQMTAAAPGHPAASGWALSASQALCLVAVPSGVGAFLRLPYTFAIPIFGGRNWTTVSAALLVIPCLLLAWAVSHPSLPFAVLVVIAATAGFGGGNFASSMANISFFYPEKDKGWALGLNAAGGNIGVAVVQKIIPPIVVAGSGVALSRAGLFFVPLAVAAAVCAFLFMNNLTEAKADVKPVWQSLRHADTWIMSLLYIGTFGSFIGYSAAFPTLLKTVFGRGDIALGWAFLGAGIGSLVRPLGGKLADRIGGARITAASFVMLAAGAAAALWSVQSVNLPVFFVSFMFLFVATGIGNGSSYRMISRIFQVKGEVAGGDPETMVNMRRQAAGALGIISSIGAFGGFVVPLAYAWSKVHFGNIEPALHFYVAFFLALLVVTWYCYLRRTTPMGQVGV

SEQ ID NO: 62776 - protein, 962 aa, Mycobacterium bovis
REIVVVGHGMVGHRLVEAVRARDADGSLRITVLAEEGDAAYDRVGLTSYTESWDRALLALPGNDYAGDQRVRLLLNTRVTQIDRATKSVVTAAGQRHRYDTLVLATGSYAFVPPVPGHDLPACHVYRTFDDLDAIRAGAQRTLDGGHTDGGVVIGGGLLGLEAANALRQFGLQTHVVEMMPRLMAQQIDEAGGALLARMIADLGIAVHVGTGTESIESVKHSDGSVWARVRLSDGEVIDAGVVIFAAGIRPRDELARAAGLAIGDRGGVLTDLSCRTSDPDIYAVGEVAAIDGRCYGLVGPGYTSAEVVADRLLDGSAEFPEADLSTKLKLLGVDVASFGDAMGATENCLEVVINDAVKRTYAKLVLSDDATTLLGGVLVGDASSYGVLRPMVGAELPGDPLALIAPAGSGAGAGALGVGALPDSAQICSCNNVTKGELKCAIADGCGDVPALKSCTAAGTSCGSCVPLLKQLLEAEGVEQSKALCEHFSQSRAELFEIITATEVRTFSGLLDRFGRGKGCDICKPVVASILASTGSDHILDGEQASLQDSNDHFLANIQKNGSYSVVPRVPGGDIKPEHLILIGQIAQDFGLYTKITGGQRIDLFGARVDQLPLIWQRLVDGGMESGHAYGKAVRTVKSCVGSDWCRYGQQDSVQLAIDLELRYRGLRAPHKIKLGVSGCARECAEARGKDVGVIATEKGWNLYVAGNGGMTPKHAQLLASDLDKETLIRYIDRFLIYYIRTADRLQRTAPWVESLGLDHVREVVCEDSLGLAEEFEAAMQRHVANYKCEWKGVLEDPDKLSRFVSFVNAPDAVDSTVTFTERAGRKVPVSIGSRGSDHEVREDKGGTVTLLNDIQVWTTACAYDHLIPGRGVGVLLDDGSQVALFRLDDGSVHAVGNVDPFSGAAVMSRGIVGDRGGRAMVQSPILKQAFALDDGSCLDDPRVSVPVYPARVTPEGRIQV

SEQ ID NO: 62777 - protein, 388 aa, Mycobacterium bovis
MAFPRTLAILAAAAALVVACSHGGTPTGSSTTSGASPATPVAVPVPRSCAEPAGIPALLSPRDKLAQLLVVGVRDAADAQAVVTNYHVGGILIGSDTDLTIFDGALAEIVAGGGPLPLAVSVDEEGGRLSRLRSLIGGTGPSARELAQTRTVQQVRDLARDRGRQMRKLGITIDFAPVVDVTDAPDDTVIGDRSFGSDPATVTAYAGAYAQGLRDAGVLPVLKHFPGHGRGSGDSHNGGVTTPPLDDLVGDDLVPYRTLVTQAPVGVMVGHLQVPGLTGSEPASLSKAAVNLLRTGTGYGAPPFDGPVFSDDLSGMAAISDRFGVSEAVLRTLQAGADIALWVTTKEVPAVLDRLEQALRAGELPMSAVDRSVVRVATMKGPNPGCGR

SEQ ID NO: 62778 - protein, 408 aa, Mycobacterium bovis
MELLRGALRTYAWGSRTAIAEFTGRPVPAAHPEAELWFGAHPGDPAWLQTPHGQTSLLEALVADPEGQLGSASRARFGDVLPFLVKVLAADEPLSLQAHPSAEQAVEGYLREERMGIPVSSPVRNYRDTSHKPELLVALQPFEALAGFREAARTTELLRALAVSDLDPFIDLLSEGSDADGLRALFTTWITAPQPDIDVLVPAVLDGAIQYVSSGATEFGAEAKTVLELGERYPGDAGVLAALLLNRISLAPGEAIFLPAGNLHAYVRGFGVEVMANSDNVLRGGLTPKHVDVPELLRVLDFAPTPKARLRPPIRREGLGLVFETPTDEFAATLLVLDGDHLGHEVDASSGHDGPQILLCTEGSATVHGKCGSLTLQRGTAAWVAADDGPIRLTAGQPAKLFRATVGL

SEQ ID NO: 62779 - protein, 489 aa, Mycobacterium bovis
MKSVEQSIADTDEPTTRLRKDLTWWDLVVFGVSVVIGAGIFTVTASTAGDITGPAIWISFLIAAATCALAALCYAEFASTLPVAGSAYTFSYATFGEFLAWVIGWNLVLELAMGAAVVAKGWSSYLGTVFGFGNGTGHLGSLQLDWGALVIVTLVATLIALGTKLSSRFSAVVTAIKVSVVVLVVVVGAFYIRAANYSPFIPEPEVQHHGGGLDQSVFSLLTGAQGSHYGWYGVLAGASIVFFAFIGFDIVATMAEETKRPQRDVPRGILASLGVVTLLYVAVSVVLSGMVPYTQLRTVPGRGPANLATAFQANGVYWASGIISVGALAGLTTVVMVLMLGQCRVLFAMARDGLVPRQLAKTGSRGTPVRVTVLVAVLVATTASVFPITKLEEMVNVGTLFAFILVSAGVVVLRRTRPDLQRGFTAPWVPLLPIAAVCACLWLMLNLTALTWIRFGIWLVAGTAIYVGYGRRHSAQGLRQARESATRRC

SEQ ID NO: 62780 - protein, 171 aa, Mycobacterium bovis
MIELEVHQADVTKLELDAITNAANTRLRHAGGVAAAIARAGGPELQRESTEKAPIGLGEAVETTAGDMPARYVIHAATMELGGPTSGEIITAATAATLRKADELGCRSLALVAFGTGVGGFPLDDAARLMVGAVRRHRPGSLQRVVFAVHGDAAERAFSAAIQAGEDTARR

SEQ ID NO: 62781 - protein, 651 aa, Mycobacterium bovis [sequence omitted]

SEQ ID NO: 62782 - protein, 1023 aa, Mycobacterium bovis
  MISC_FEATURE (1000)..(1000): X=any amino acid
GGLFDRIGNFVVRWPLIVIGCWIAVAAALTLLLPTLQAQAAKREQAPLPPGAPSMVLQKEMSAAFQEKIETSALLLVLLTNENGLGPADEAVYRKLIENLRADTQDKISVQDFLAVPEMKELLASKDNKAWNLPITFAGDAASPETQAAFKRVAAIVKQTVAGTSLTVHLSGPIATVADLTELGEKDVRIIEIGAAVSVLIILILVYRNLVTMLVPLATIGASVVTAQGTLSGLAEFGLAVNMQAIVFMSAVMIGAGTDYAVFLISRYHDYVRHGEKSDMAVKKALMSIGKVITASAATVAVTFLAMVFTKLEVFSAVGPAIAVAITVSLLGAVTLLPAILTLTGRRGWIKPRRDLTSRMWRRSGVRIVRRPTIHLVGSLIVLVALAGCTLLIRFNYDDLKTVPQHVESVKGYEAMNRHFPMNAMTPMVLFIKSPRDLRTPGALADIEMMSREIAELPNIVMVRGLTRPNGEPLKETKVSFQAGEVGGKLDEATTLLEEHGGELDQLTGGAHQLADALAQIRNEINGAVASSSGIVNTLQAMMDLMGGDKTIRQLENASQYVGRMRALGDNLSGTVTDAEQIATWASPMVNALNSSPVCNSDPACRTSRAQLAAIVQAQDDGLLRSIRALAVTLQQTQEYQTLARTVSTLDGQLKQVVSTLKAVDGLPTKLAQMQQGANALADGSAALAAGVQELVDQVKKMGSGLNEAADFLLGIKRDADKPSMAGFNIPPQIFSRDEFKKGAQIFLSADGHAARYFVQSALNPATTEAMDQVNDILRVADSARPNTELEDATIGLAGVPTALRDIRDYYNSDMKFIVIATIVIVFLILVILLRALVAPIYLIGSVLISYLSALGIGTLVFQLILGQEMHWSLPGLSFILLVAIGADYNMLLISRIRDESPHGIRIGVIRTVGSTGGVITSAGLIFAASMFGLVGANINTMAQAGFTIGIGIVLDTFLVRTVTVPALTTMIGRANWWPSSWDATHPRRRPKPIGGCGGXKATDARPRSRRPSRPTPRSSATP

SEQ ID NO: 62783 - protein, 316 aa, Mycobacterium bovis
MRVLFRQLEYFVAVAQERHFARAAEKCYVSQPALSSAIAKLERELNVTLINRGHSFEGLTREGERLVVWAKRILAEHAAFKAEVDAVRSGITGTLRLGTVPTASTTASLVLSAFCSAHPLAKVQVCSRLAATELYRRLREFELDAVIVHPETQDSDDVDLVPLYEEQYVLLSPADMLPPGTSTLVWRDAAQLPLALLTADMRDRQVIDAAFADHAVSAIPQVETDSVASLFAQVATGNWASIVPHTWLWAMPMSGPTGGEIRAVELVDPVLKAQIALATNALGPGSPVARALITCAQALALNEFFDTQLRGITRRR

SEQ ID NO: 62784 - protein, 156 aa, Mycobacterium bovis
MTDADELAAVAARTFPLACPPAVAPEHIASFVDANLSSARFAEYLTDPRRAILTARHDGRIVGYAMLIRGDDRDVELSKLYLLPGYHGTGAAAALMHKVLATAADWGALRVWLGVNQKNQRAQRFYAKTGFKINGTRTFRLGAHHENDYVMVRELV

SEQ ID NO: 62785 - protein, 471 aa, Mycobacterium bovis
MGSMREYDIVVIGSGPGGQKAAIASAKLGKSVAIVERGRMLGGVCVNTGTIPSKTLREAVLYLTGMNQRELYGASYRVKDRITPADLLARTQHVIGKEVDVVRNQLMRNRVDLIVGHGRFIDPHTILVEDQARREKTTVTGDYIIIATGTRPARPSGVEFDEERVLDSDGILDLKSLPSSMVVVGAGVIGIEYASMFAALGTKVTVVEKRDNMLDFCDPEVVEALKFHLRDLAVTFRFGEEVTAVDVGSAGTVTTLASGKQIPAETVMYSAGRQGQTDHLDLHNAGLEVQGRGRIFVDDRFQTKVDHIYAVGDVIGFPALAATSMEQGRLAAYHAFGEPTDGITELQPIGIYSIPEVSYVGATEVELTKSSIPYEVGVARYRELARGQIAGDSYGMLKLLVSTEDLKLLGVHIFGTSATEMVHIGQAVMGCGGSVEYLVDAVFNYPTFSEAYKNAALDVMNKMRALNQFRR

SEQ ID NO: 62786 - protein, 629 aa, Mycobacterium bovis
MGGGFIGVDAFFVLSGFLITSLLLDELGRTGRIDLSGFWIRRARRLLPALVLMVLTVSAARALFPDQALTGLRSDAIAAFLWTANWRFVAQNTDYFTQGAPPSPLQHTWSLGVEEQYYVVWPLLLIGATLLLAARARRRCRRATVGGVRFAAFLIASLGTMASATAAVAFTSAATRDRIYFGTDTRAQALLIGSAAAALLVRDWPSLNRGWCLIRTRWGRRIARLLPFVGLAGLAVTTHVATGSVGEFRHGLLIVVAGAAVIVVASVAMEQRGAVARILAWRPLVWLGTISYGVYLWHWPIFLALNGQRTGWSGPALFAARCAATVVLAGASWWLIEQPIRRWRPARVPLLPLAAATVASAAAVTMLVVPVGAGPGLREIGLPPGVSAVAAVSPSPPEASQPAPGPRDPNRPFTVSVFGDSIGWTLMHYLPPTPGFRFIDHTVIGCSLVRGTPYRYIGQTLEQRAECDGWPARWSAQVNRDQPDVALLIVGRWETVDRVNEGRWTHIGDPTFDAYLNAELQRALSIVGSTGVRVMVTTVPYSRGGEKPDGRLYPEDQPERVNKWNAMLHNAISQHSNVGMIDLNKKLCPDGVYTAKVDGIKVRSDGVHLTQEGVKWLIPWLEDSVRVAS

SEQ ID NO: 62787 - protein, 507 aa, Mycobacterium bovis
MTVFSRPGSAGALMSYESRYQNFIGGQWVAPVHGRYFENPTPVTGQPFCEVPRSDAADIDKALDAAHAAAPGWGKTAPAERAAILNMIADRIDKNAAALAVAEVWDNGKPVREALAADIPLAVDHFRYFAAAIRAQEGALSQIDEDTVAYHFHEPLGVVGQIIPWNFPILMAAWKLAPALAAGNTAVLKPAEQTPASVLYLMSLIGDLLPPGVVNVVNGFGAEAGKPLASSDRIAKVAFTGETTTGRLIMQYASHNLIPVTLELGGKSPNIFFADVLAAHDDFCDKALEGFTMFALNQGEVCTCPSRSLIQADIYDEFLELAAIRTKAVRQGDPLDTETMLGSQASNDQLEKVLSYIEIGKQEGAVIIAGGERAELGGDLSGGYYMQPTIFTGTNNMRIFKEEIFGPVVAVTSFTDYDDAIGIANDTLYGLGAGVWSRDGNTAYRAGRDIQAGRVWVNCYHLYPAHAAFGGYKQSGIGREGHQMMLQHYQHTKNLLVSYSDKALGFF

SEQ ID NO: 62788 - protein, 237 aa, Mycobacterium bovis
MNRRTLLWLSAIAALALVVAYQTLGSSAGRHADEFARRAGVPTVQPGADVLAGIAVLPKRIHRYDYRRSAFGHPWDDRNVAPVGHNGCDTRDDILDRDLVDNTYVSIKRCRNAVASGTLRDPYTNTTVAFQRGASVGQSVQIDHIVPLSYAWDMGAYRWPNSERMRFANDPANLLAVQGQANQDKGDSPPAQWMPPNKAFACQYAMQFIAVLRGYSLPVDQPSSDVLRQAAATCPTG

SEQ ID NO: 62789 - protein, 282 aa, Mycobacterium bovis
MTGESGAAAAPSITLNDEHTMPVLGLGVAELSDDETERAVSAALEIGCRLIDTAYAYGNEAAVGRAIAASGVAREELFVTTKLATPDQGFTRSQEACRASLDRLGLDYVDLYLIHWPAPPVGKYVDAWGGMIQSRGEGHARSIGVSNFTAEHIENLIDLTFVTPAVNQIELHPLLNQDELRKANAQHTVVTQSYCPLALGRLLDNPTVTSIASEYVKTPAQVLLRWNLQLGNAVVVRSARPERIASNFDVFDFELAAEHMDALGGLNDGTRVREDPLTYAGT

SEQ ID NO: 62790 - protein, 1799 aa, Mycobacterium bovis
MIEEQRTMSVEGADQQSEKLFHYLKKVAVELDETRARLREYEQRATEPVAVVGIGCRFPGGVDGPDGLWDVVSAGRDVVSEFPTDRGWDVEGLYDPDPDAEGKTYTRWGAFLDDATGFDAGFFGIAPSEVLAMDPQQRLMLEVSWEALEHAGIDPLSLRGSATGVYTGIFAASYGNRDTGGLQGYGLTGTSISVASGRVSYVLGLQGPAVSVDTACSSSLVAIHWAMSSLRSGECDLALAGGVTVMGLPSIFVGFSRQRGLAADGRCKAFAAAADGTGWGEGAGVVVLERLSDARRLGHSVLAVVRGSAVNQDGASNGLTAPNGLAQQRVIQAALANAGLSAADVDVVEAHGTATTLGDPIEAQALLSTYGQGRPAEQPLWVGSIKSNMGHTQAAAGVAGVIKMVQAMRHGVMPATLHVDEPSPRVDWTSGAVSVLTEAREWSVDGRPRRAAVSSFGISGTNAHLILEEAPVPAPAEAPVEASESTGGPRPSMVPWVISARSAEALTAQAGRLMAHVQANPGLDPIDVGCSLASRSVFEHRAVVVGASREQLIAGLAGLAAGEPGAGVAVGQPGSVGKTVVVFPGQGAQRIGMGRELYGELSVFAQAFDAVADELDRHLRLPLRDVIWGADADLLDSTEFAQPALFAVEVASFAVLRDWGVLPDFVMGHSVGELAAAHAAGVLTLADAAMLVVARGRLMQALPAGGAMVAVAASEDEVEPLLGEGVGIAAINAPESVVISGAQAAANAIADRFAAQGRRVHQLAVSHAFHSPLMEPMLEEFARVAARVQAREPQLGLVSNVTGELAGPDFGSAQYWVDHVRRPVRFADSARHLQTLGATHFIEAGPGSGLTGSIEQSLAPAEAMVVSMLGKDRPELASALGAAGQVFTTGVPVQWSAVFAGSGGRRVQLPTYAFQRRRFWETPGADGPADAAGLGLGATEHALLGAVVERPDSDEVVLTGRLSLADQPWLADHVVNGVVLFPGAGFVELVIRAGDEVGCALIEELVLAAPLVMHPGVGVQVQVVVGAADESGHRAVSVYSRGDQSQGWLLNAEGMLGVAAAETPMDLSVWPPEGAESVDISDGYAQLAERGYAYGPAFQGLVAIWRRGSELFAEVVAPGEAGVAVDRMGMHPAVLDAVLHALGLAVEKTQASTETRLPFCWRGVSLHAGGAGRVRARFASAGADAISVDVCDATGLPVLTVRSLVTRPITAEQLRAAVTAAGGASDQGPLEVVWSPISVVSGGANGSAPPAPVSWADFCAGSDGDASVVVWELESAGGQASSVVGSVYAATHTALEVLQSWLGADRAATLVVLTHGGVGLAGEDISDLAAAAVWGMARSAQAENPGRIVLIDTDAAVDASVLAGVGEPQLLVRGGTVHAPRLSPAPALLALPAAESAWRLAAGGGGTLEDLVIQPCPEVQAPLQAGQVRVAVAAVGVNFRDVVAALGMYPGQAPPLGAEGAGVVLETGPEVTDLAVGDAVMGFLGGAGPLAVVDQQLVTRVPQGWSFAQAAAVPVVFLTAWYGLADLAEIKAGESVLIHAGTGGVGMAAVQLARQWGVEVFVTASRGKWDTLRAMGFDDDHIGDSRTCEFEEKFLAVTEGRGVDVVLDSLAGEFVDASLRLLVRGGRFLEMGKTDIRDAQEIAANYPGVQYRAFDLSEAGPARMQEMLAEVRELFDTRELHRLPVTTWDVRCAPAAFRFMSQARHIGKVVLTMPSALADRLADGTVVITGATGAVGGVLAPHLVGAYGVRHLVLPSRRGDRAKGPAELAADLTKAGAKGQVAPRNVTDPAAVAGLFANL

SEQ ID NO: 62791 - protein, 218 aa, Mycobacterium bovis
MGRQRDVVVSGRPRAYTPQRDVVAAGALHDMGTYIGLCFGPTNHPYLVGLQPFVFDGVVAVDQPAKWAPQEMDSDDGSGANQGEHQMPGGGQHSDRGRAPKRGSRVQTADVEPLPQDDPAAQESNSRNHVGRHSGGAAVLGGDRVQHEQGSTGRHQSVGAQPSHPRPPLALEPDNGPATHSDGQPESEIGDSQRLHDAESFPIARRPRQPTTRRLTAV

SEQ ID NO: 62792 - protein, 633 aa, Mycobacterium bovis
MTTSLGTHYTWLLVALPLAGAAILLFGGRRTDAWGHLLGCAAALAAFGVGAMLLADMLGRDGLERAIHQQVFTWIPAGGLQVDFGLQIDQLSMCFVLLISGVGSLIHIYSVGYMAEDPDRRRFFGYLNLFLASMLLLVVADNYVLLYVGWEGVGLASYLLIGFWYHKPSAATAAKKAFVMNRVGDAGLAVGMFLTFSTFGTLSYAGVFAGVPAASRAVLTAIGLLMLLGACAKSAQVPLQAWLGDAMEGPTPVSALIHAATMVTAGVYLIVRSGPLYNLAPTAQLAVVIVGAVTLLYGAIIGCAKDDIKRALAASTISQIGYMVLAAGLGPAGYAFAIMHLLTHGFFKAGLFLGSGAVIHAMHEEQDMRRYGGLRAALPVTFATFGLAYLAIIGVPPFAGFFSKDAIIEAALGAGGIRGSLLGGAALLGAGVTAFYMTRVMLMTFFGEKRWTPGAHPHEAPAVMTWPMILLAVGSVFSGGLLAVGGTLRHWLQPVVGSHEEATHALPTWVATTLALGVVAVGIAVAYRMYGTAPIPRVAPVRVSALTAAARADLYGDAFNEEVFMRPGAQLTNAVVAVDDAGVDGSVNALATLVSQTSNRLRQMQTGFARNYALSMLVGAVLVAAALLVVQLW

SEQ ID NO: 62793 - protein, 252 aa, Mycobacterium bovis
MTQPPGQPVFIRLGPPPDEPNQFVVEGAPRSYPPDVLARLEVDAKEIIGRYPDRRSALLPLLHLVQGEDSYLTPAGLRFCADQLGLTGAEVSAVASFYTMYRRRPTGEYLVGVCTNTLCAVMGGDAIFDRLKEHLGVGHDETTSDGVVTLQHIECNAACDYAPVVMVNWEFFDNQTPESARELVDSLRSDTPKAPTRGAPLCGFRQTSRILAGLPDQRPDEGQGGPGAPTLAGLQVARKNDMQAPPTPGADE

SEQ ID NO: 62794 - protein, 445 aa, Mycobacterium bovis
MTTQATPLTPVISRHWDDPESWTLATYQRHDRYRGYQALQKALTMPPDDVISIVKDSGLRGRGGAGFATGTKWSFIPQGDTGAAAKPHYLVVNADESEPGTCKDIPLMLATPHVLIEGVIIAAYAIRAHHAFVYVRGEVVPVLRRLHNAVAEAYAAGFLGRNIGGSGFDLELVVHAGAGAYICGEETALLDSLEGRRGQPRLRPPFPAVAGLYGCPTVINNVETIASVPSIILGGIDWFRSMGSEKSPGFTLYSLSGHVTRPGQYEAPLGITLRELLDYAGGVRAGHRLKFWTPGGSSTPLLTDEHLDVPLDYEGVGAAGSMLGTKALEIFDETTCVVRAVRRWTEFYKHESCGKCTPCREGTFWLDKIYERLETGRGSHEDIDKLLDISDSILGKSFCALGDGAASPVMSSIKHFRDEYLAHVEGGGCPFDPRDSMLVANGVDA

SEQ ID NO: 62795 - protein, 1327 aa, Mycobacterium bovis
MRCGIVVNVTGPPPTIDRRYHDAVIVGLDNVVDKATRVHAAAWTKFLDDYLTRRPQRTGEDHCPLTHDDYRRFLAGKPDSVADFLAARGIRLPPGSPTDLTDDTVYGLQNLERQTFLQLLNTGVPEGKSIASFARRLQVAGVRVAAHTSHRNYGHTLDATGLAEVFAVFVDGAVTAELGLPAEPNPAGLIETAKRLGANPGRCVVIDSCQTGLRAGRNGGFALVIAVDAHGDAENLLSSGADAVVADLAAVTVGSGDAAISTIPDALQVYSQLKRLLTGRRPAVFLDFDGTLSDIVERPEAATLVDGAAEALRALAAQCPVAVISGRDLADVRNRVKVDGLWLAGSHGFELVAPDGSHHQNAAATAAIDGLAEAAAQLADALREIAGAVVEHKRFAVAVHYRNVADDSVDNLIAAVRRLGHAAGLRVTTGRKVVELRPDIAWDKGKALDWIGERLGPAEVGPDLRLPIYIGDDLTDEDAFDAVRFTGVGIVVRHNEHGDRRSAATFRLECPYTVCQFLSQLACDLQEAVQHDDPWTLVFHGYDPGQERLREALCAVGNGYLGSRGCAPESAESEAHYPGTYVAGVYNQLTDHIEGCTVDNESLVNLPNWLSLTFRIDGGAWFNVDTVELLSYRQTFDLRRATLTRSLRFRDAGGRVTTMTQERFASMNRPNLVALQTRIESENWSGTVDFRSLVDGGVHNTLVDRYRQLSSQHLTTAEIEVLADSVLLRTQTSQSGIAIAVAARSTLWRDGQRVDAQYRVARDTNRGGHDIQVTLSAGQSVTLEKVATIFTSRDAATLTAAISAQRCLGEAGRYAELCQQHVRAWARLWERCAIDLTGNTEELRLVRLHLLHLLQTISPHTAELDAGVPARGLNGEAYRGHVFWDALFVAPVLSLRMPKVARSLLDYRYRRLPAARRAAHRAGHLGAMYPWQSGSDGSEVSQQLHLNPRSGRWTPDPSDRAHHVGLAVAYNAWHYYQVTGDRQYLVDCGAELLVEIARFWVGLAKLDDSRGRYLIRGVIGPDEFHSGYPGNEYDGIDNNAYTNVMAVWVILRAMEALDLLPLTDRRHLIEKLGLTTQERDQWDDVSRRMFVPFHDGVISQFEGYSELAELDWDHYRHRYGNIQRLDRILEAEGDSVNNYQASKQADALMLLYLLSSDELIGLLARLGYRFAPTQIPGTVDYYLARTSDGSTLSAVVHAWVLARANRSNAMEYFRQVLRSDIADVQGGTTQEGIHLAAMAGSIDLPQRCYSGLELRDDRLVLSPQWPEALGPLEFPFVYRRHQLSLRISGRSATLTAESGDAEPIEVECRGHVQRLRCGHTIEVGCSR

SEQ ID NO: 62796 - protein, 224 aa, Mycobacterium bovis
MSPIEPAASAIFGPRLGLARRYAEALAGPGVERGLVGPREVGRLWDRHLLNCAVIGELLERGDRVVDIGSGAGLPGVPLAIARPDLQVVLLEPLLRRTEFLREMVTDLGVAVEIVRGRAEESWVQDQLGGSDAAVSRAVAALDKLTKWSMPLIRPNGRMLAIKGERAHDEVREHRRVMIASGAVDVRVVTCGANYLRPPATVVFARRGKQIARGSARMASGGTA

SEQ ID NO: 62797 - protein, 419 aa, Mycobacterium bovis
MIDLKLLRENPDAVRRSQLSRGEDPALVDALLTADAARRAVISTADSLRAEQKAASKSVGGASPEERPPLLRRAKELAEQVKAAEADEVEAEAAFTAAHLAISNVIVDGVPAGGEDDYAVLDVVGEPSYLENPKDHLELGESLGLIDMQRGAKVSGSRFYFLTGRGALLQLGLLQLALKLAVDNGFVPTIPPVLVRPEVMVGTGFLGAHAEEVYRVEGDGLYLVGTSEVPLAGYHSGEILDLSRGPLRYAGWSSCFRREAGSHGKDTRGIIRVHQFDKVEGFVYCTPADAEHEHERLLGWQRQMLARIEVPYRVIDVAAGDLGSSAARKFDCEAWIPTQGAYRELTSTSNCTTFQARRLATRYRDASGKPQIAATLNGTLATTRWLVAILENHQRPDGSVRVPDALVPFVGVEVLEPVA

SEQ ID NO: 62798 - protein, 399 aa, Mycobacterium bovis
MQPMTARFDLFVVGSGFFGLTIAERVATQLDKRVLVLERRPHIGGNAYSEAEPQTGIEVHKYGAHLFHTSNKRVWDYVRQFTDFTDYRHRVFAMHNGQAYQFPMGLGLVSQFFGKYFTPEQARQLIAEQAAEIDTADAQNLEEKAISLIGRPLYEAFVKGYTAKQWQTDPKELPAANITRLPVRYTFDNRYFSDTYEGLPTDGYTAWLQNMAADHRIEVRLNTDWFDVRGQLRPGSPAAPVVYTGPLDRYFDYAEGRLGWRTLDFEVEVLPIGDFQGTAVMNYNDLDVPYTRIHEFRHFHPERDYPTDKTVIMREYSRFAEDDDEPYYPINTEADRALLATYRARAKSETASSKVLFGGRLGTYQYLDMHMAIASALNMYDNVLAPHLRDGVPLLQDGA

SEQ ID NO: 62799 - protein, 259 aa, Mycobacterium bovis
MEPVYGTVIRLARLSWRIQGLKITVTGVDNLPTSGGAVVAINHTSYLDFTFAGLPAYQQGLGRKVRFMAKQEVFDHKITGPIMRSLRHIPVDRQDGSASYDAAVRMLKAGELVGVYPEATISRSFEIKEFKTGAARMAIEAGVPIVPHIVWGAQRIWTKDRPKKLFRPKVPVTIVVGERIEPTLPTAELNGLLHSRMQHLLERAQELYGPHPAGEFWVPHRLGGGAPSLAEAARLDAQEAAVRAARRAQRAHPAGAPEQ

SEQ ID NO: 62800 - protein, 209 aa, Mycobacterium bovis
MSRSTRYSVAVSAQPETGQIAGRARIANLANILTLLRLVMVPVFLLALFYGGGHHSAARVVAWAIFATACITDRFDGLLARNYGMATEFGAFVDPIADKTLIGSALIGLSMLGDLPWWVTVLILTRELGVTVLRLAVIRRGVIPASWGGKLKTFVQAVAIGLFVLPLSGPLHVAAVVVMAAAILLTVITGVDYVARALRDIGGIRQTAS

SEQ ID NO: 62801 - protein, 207 aa, Mycobacterium bovis
MAPVIADNRSLGCNGVGVTTGAIRLAARSMSAPDSENSGELLGLWLSSADTGQWCHAALSQWLAARAHRGQHEHRNLAVRLGLVAGIVRPDRHGALPPDGLLVTEHLAGVVVAGHGAVLQLDPWVLHDVVVPDRIFRRPTQRGDDRVLAVVLDAHQRGLTEFAGLRPDGGEQDDRLSLQLCALGSAGLHIRVGLLARPVERARRIFP

SEQ ID NO: 62802 - protein, 427 aa, Mycobacterium bovis
MLSLSEEFELTTREQELLTTTAVLGQIAGALGGGILANAIGRKKSVVLIVAGYAVFALLGATSVSVPMLVVARLLLGVTIGLSVVVVPVYVAESAPAAVRGSLVTAYQLATLSGIVVGYLVGYLLAGSHGWRAMFGLAAAPATLLLPLLWRMPDTARWYLLKGRIADARSALRRIQPEADIDAELADMAAAVDERGGGIGEMVRRPYLRATLFVIALGFLVQITGINAIIYYSPRLFAAMGFAGYFAMLALPAMVQVAGLAAVCASLFLVDRLGRRPILLSGIATMITADAVLITVFANDSDGGTGLVLGFAGVLLFIIGFNFGFGSLVWVYAAESFPSRLRSMGSSLMLTSTLTANAIVAAFSLTMLRVLGGAGVFAVFGTFAVVAFVVVYRFAPETKGRKLEEIRHFWENGGRWPAERSPAADEP

SEQ ID NO: 62803 - protein, 383 aa, Mycobacterium bovis
MTVLGADAVVIDGRICRPGWVHTADGRILSGGAGAPPMPADAEFPDAIVVPGFVDMHVHGGGGASFADGNAADIARAAEFHLRHGTTTTLASLVTAGPAELLSAVGALAEATRDGVVAGIHLEGPWLSPARCGAHDHTRMRAPDPAEIESVLAAADGAVRMVTLAPELPGSDAAIRRFRDAEVVVAVGHTDATYTQTRHAIDLGATVGTHLFNAMPPLDHRAPGPVLALLCDPRVTVEIIADGVHVHPAVVHAVIEAVGPDRVAVVTDAIAAAGCGDGAFRLGTMPIEVESSVARVAGASTLAGSTTTMDQLFRTVAGLGSKSDSAGDVALAAAVQVTSATPARALGLTGVGRLAAGYAANLVVLDRDLRVTAVMVNDDWRVG

SEQ ID NO: 62804 - protein, 303 aa, Mycobacterium bovis
MMARMPELSRRAVLGLGAGTVLGATSAYAIDMLLQPRTSHAAPAAAIGTNVPLAPTPALDPAPPAQAAPTMSTGSFVSAARAGKMTNWAIARPPGQTQALRPVIALHGLGGSASAVMDGGVEQGLAQAVNAGLPPFAVVSVAGGSSYWHQRASGEDAGAMVLNELIPLLDTQRLDTSRVAFLGWSMGGYGALLLGSRLGPARTAAICAVSPALWLSAGAVAPGSFDGPDDWSANSVFGLPALGSIPIRVDCGNSDPFYAATKQFVAQLPHPPAGGFSPGGHNGGFWSAQLPAELTWFAPLLTG

SEQ ID NO: 62805 - protein, 472 aa, Mycobacterium bovis
MSIPNVLATRYASAEMVAIWSPEAKVVSERRLWLAVLRAQAELGVAVADSVLADYERVVDDVDLASISARERVLRHDVKARIEEFNALAGHEHVHKGMTSRDLTENVEQLQIRRSLEVIFAHGVAAVARLAERAVSYRDLIMAGRSHNVAAQATTLGKRFASAAQEMMIALRRLRELIDRYPLRGIKGPMGTGQDMLDLLGGDRAALADLERRVADFLGFATVFNSVGQVYPRSLDHDVVSALVQLGAGPSSLAHTIRLMAGHELATEGFAPGQVGSSAMPHKMNTRSCERVNGLQVVLRGYASMVAELAGAQWNEGDVFCSVVRRVALPDSFFAVDGQIETFLTVLDEFGAYPAVIGRELDRYLPFLATTKVLMAAVRAGMGRESAHRLISEHAVATALAMREHGAEPDLLDRLAADPRLPLGRDALEAALADKKAFAGAAGDQVDDVVAMVDALVSRYPDAAKYTPGAIL

SEQ ID NO: 62806 - protein, 463 aa, Mycobacterium bovis
MTQDGTWVDESDWQLDDSEIAESGAAPVVAVVGRPNVGKSTLVNRILGRREAVVQDIPGVTRDRVCYDALWTGRRFVVQDTGGWEPNAKGLQRLVAEQASVAMRTADAVILVVDAGVGATAADEAAARILLRSGKPVFLAANKVDSEKGESDAAALWSLGLGEPHAISAMHGRGVADLLDGVLAALPEVGESASASGGPRRVALVGKPNVGKSSLLNKLAGDQRSVVHEAAGTTVDPVDSLIELGGDVWRFVDTAGLRRKVGQASGHEFYASVRTHAAIDSAEVAIVLIDASQPLTEQDLRVISMVIEAGRALVLAYNKWDLVDEDRRELLQREIDRELVQVRWAQRVNISAKTGRAVHKLVPAMEDALASWDTRIATGPLNTWLTEVTAATPPPVRGGKQPRILFATQATARPPTFVLFTTGFLEAGYRRFLERRLRETFGFDGSPIRVNVRVREKRAGKRR

SEQ ID NO: 62807 - protein, 307 aa, Mycobacterium bovis
MTAHRSVLLVVHTGRDEATETARRVEKVLGDNKIALRVLSAEAVDRGSLHLAPDDMRAMGVEIEVVDADQHAADGCELVLVLGGDGTFLRAAELARNASIPVLGVNLGRIGFLAEAEAEAIDAVLEHVVAQDYRVEDRLTLDVVVRQGGRIVNRGWALNEVSLEKGPRLGVLGVVVEIDGRPVSAFGCDGVLVSTPTGSTAYAFSAGGPVLWPDLEAILVVPNNAHALFGRPMVTSPEATIAIEIEADGHDALVFCDGRREMLIPAGSRLEVTRCVTSVKWARLDSAPFTDRLVRKFRLPVTGWRGK

SEQ ID NO: 62808 - protein, 543 aa, Mycobacterium bovis
MQKLDPYLNVDPGTMNPFQHGEVFVTEDGAETDLDVGHYERFLDRNLPGSANVTTGQVYSTVIAKERRGEYLGDTVQVIPHITDEIKRRILAMAQPDADGNRPDVVITEIGGTVGDIESQPFLEAARQVRHYLGREDVFFLHVSLVPYLAPSGELKTKPTQHSVAALRSIGITPDALILRCDRDVPEALKNKIALMCDVDIDGVISTPDAPSIYDIPKVLHREELDAFVVRRLNLPFRDVDWTEWDDLLRRVHEPHETVRIALVGKYVELSDAYLSVAEALRAGGFKHRAKVEICWVASDGCETTSGAAAALGDVHGVLIPGGFGIRGIEGKIGAIAYARARGLPVLGLCLGLQCIVIEAARSVGLTNANSAEFDPDTPDPVIATMPDQEEIVAGEADLGGTMRLGSYPAVLEPDSVVAQAYQTTQVSERHRHRYEVNNAYRDKIAESGLRFSGTSPDGHLVEFVEYPPDRHPFVVGTQAHPELKSRPTRPHPLFVAFVGAAIDYKAGELLPVEIPEIPEHTPNGSSHRDGVGQPLPEPASRG

SEQ ID NO: 62809 - protein, 311 aa, Mycobacterium bovis
MKTLALQLQGYLDHLTIERGVAANTLSSYRRDLRRYSKHLEERGITDLAKVGEHDVSEFLVALRRGDPDSGTAALSAVSAARALIAVRGLHRFAAAEGLAELDVARAVRPPTPSRRLPKSLTIDEVLSLLEGAGGDKPSDGPLTLRNRAVLELLYSTGARISEAVGLDLDDIDTHARSVLLRGKGGKQRLVPVGRPAVHALDAYLVRGRPDLARRGRGTAAIFLNARGGRLSRQSAWQVLQDAAERAGITAGVSPHMLRHSFATHLLEGGADVRVVQELLGHASVTTTQIYTLVTVHALREVWAGAHPRAR

SEQ ID NO: 62810 - protein, 223 aa, Mycobacterium bovis
MPAALLTSAFFAICSVLLEGKAEGPQQRSAFVVGRRGSDDVDVHATDPVNLVHVDLVEYRLLGQPEGVVAHTVELFGRKPTEVTDAWQCDRREPVKELPHPVTAQRDSDAHRHALTQFELRDGLARPADFRLLPGDQRQIVDRPVDQLGVPGGLADTHVDDDFRHRRDLHDIAVAELLAQRIPNLTAVALLEARLNLLCSGHQMSLPLRLEIRTRLPVSSSTR

SEQ ID NO: 62811 - protein, 486 aa, Mycobacterium bovis
MLQRIARELLSGVAVAIVALPLAIAFGITATGTSQGALIGLYGAIFAGFFAAVFGGTPGQVTGPTGPITVVATATIAEHGLEGAFFAFILAGVFQILFGACRLGSLIRYVPHPVISGFMGGIAILIIMTQLDQVRSSSLLVLVTVVLLLASGRFIKAIPPSLLVLVLVSSVLPLAAPWLRDLRAGPVSINRTVDYIGEIPQAMPSFDFPQVANSTMLQVLLSAVAIALLGSLDSLLTSLVMDNIRGTRHRSNKELIGQGIGNIAAGLFGGLAGAGATVRSVVNVRNGGQTALSAATHSVVLFVFVAGLGAVVQYIPLAVLSGILILVAVGMFDWHAMRKAHVSPRGDVIVMFTTMIITVVVDLTIAVMVGIALSLLVHRLRSRQRKAKVTQDDTGTYRIDGPLSFLSVDGVFGSLRDGREDVSLDLQHVTYLDTSGAQALLYFIDHSEKDGVAVSIKRIPPRLESQLTALADNEQRDKLRTVLESA

SEQ ID NO: 62812 - protein, 254 aa, Mycobacterium bovis
MMAEPEESREPRGIRLQKVLSQAGIASRRAAEKMIVDGRVEVDGHVVTELGTRVDPQVAVVRVDGARVVLDDSLVYLALNKPRGMHSTMSDDRGRPCIGDLIERKVRGTKKLFHVGRLDADTEGLMLLTNDGELAHRLMHPSHEVPKTYLATVTGSVPRGLGRTLRAGIELDDGPAFVDDFAVVDAIPGKTLVRVTLHEGRNRIVRRLLAAAGFPVEALVRTDIGAVSLGKQRPGSVRALRSNEIGQLYQAVGL

SEQ ID NO: 62813 - protein, 230 aa, Mycobacterium bovis
MSRLSAAVVAIDGPAGTGKSSVSRRLARELGARFLDTGAMYRIVTLAVLRAGADPSDIAAVETIASTVQMSLGYDPDGDSCYLAGEDVSVEIRGDAVTRAVSAVSSVPAVRTRLVELQRTMAEGPGSIVVEGRDIGTVVFPDAPVKIFLTASAETRARRRNAQNVAAGLADDYDGVLADVRRRDHLDSTRAVSPLQAAGDAVIVDTSDMTEAEVVAHLLELVTRRSEAVR

SEQ ID NO: 62814 - protein, 529 aa, Mycobacterium bovis
MAPRSYRRWPPAVVGISALGGIAYLADFAIGANVGITWGTANALCGIAIFALVVFVTGLPLAYYAARYNIDLDLITRGSGFGYYGSVVTNVIFATFTFIFFALEGSIMAQGLKLGLHIPLWAGYACSTLIIFPLVVYGMKVLSQLQLWTTPLWLILMAAPFGYLVVSHPDSIGQFFSYAGKDGHGGLSFGSVLLAAGVCLSLIAQIAEQIDYLRFMPPRTPENANRWWTWTLLAGPGWVAFGATKQIIGLFLAVYLMANIPGSSTIANQPVHQFMQIYRTFVPGWLALTLAVILVILSQIKINVTNAYSGSLAWTNSFTRLTKHYPGRVVFLGVNLAIALILMEANMFDFLNTILGCYANCGMAWVVAVASDIGFNKYLLGLSPKTPEFRRGMLYAINPVGFGSLLLAAGLSIVTFFGGLGAALQPYSPLVAIVTALVMPPILAAATKGKYYLRRTHDGIDLPMYDEHGNPSAAVLTCHVCHQDFERPDMLACQTHGAHVCSLCLSTDKQAEHVLPGLARAHIPGDQVP

SEQ ID NO: 62815 - protein, 495 aa, Mycobacterium bovis
MSRITTDQLRHAVLDRGSFVSWDSEPLAVPVADSYARELAAARAATGADESVQTGEGRVFGRRVAVVACEFDFLGGSIGVAAAERITAAVERATAERLPLLASPSSGGTRMQEGTVAFLQMVKIAAAIQLHNQARLPYLVYLRHPTTGGVFASWGSLGHLTVAEPGALIGFLGPRVYELLYGDPFPSGVQTAENLRRHGIIDGVVALDRLRPMLDRALTVLIDAPEPLPAPQTPAPVPDVPTWDSVVASRRPDRPGVRQLLRHGATDRVLLSGTDQGEAATTLLALARFGGQPTVVLGQQRAVGGGGSTVGPAALREARRGMALAAELCLPLVLVIDAAGPALSAAAEQGGLAGQIAHCLAELVTLDTPTVSILLGQGSGGPALAMLPADRVLAALHGWLAPLPPEGASAIVFRDTAHAAELAAAQGIRSADLLKSGIVDTIVPEYPDAADEPIEFALRLSNAIAAEVHALRKIPAPERLATRLQRYRRIGLPRD

SEQ ID NO: 62816 - protein, 538 aa, Mycobacterium bovis
MRIAGVGLGQLLLALDATVVSLVDAPRGLDLPVASTALIDSDDVRLGLAAAAGSADVFFLIGVTDDEAVRWVDDQARQRAPVAIFVKHPSDSVVAGAVRAGSAVVAVEPRARWERLYHLVNHVLEHHGDRADPTDDSGTDLFGLAQSLADRIHGMISIEDAQSHVLAYSASNDEADELRRLSILGRAGPPEHLQWIGQWGIFDALRAGREVVRVAERPELGLRPRLAIGIHQPGVGALRPPVFAGTIWVQQGSQPLADDAEEMLRGAAVLAARIMSRLATQPNTHALRVQQLLGLAELNATTAPVDVSTIARELGVAAEGNATLIGFDTAENRDTAVRHVRLVDVMALSASAFRHDAQVAANGSRIYVLLPQTTTGRAVTSWVRGTISALRAELGVALRAAIAGPVAGLAEVNPARVEVDRVLESAERHPILGQVTSLAEARTTVLLDEIVTLVGTDQRLVDPRIRDLGAQDPVLAQTLRAYLDAFGDIGAAARSLQVHPNTVRYRIRRIEQLLSTSLGDPDVRLLFSLGLRAMERTA

SEQ ID NO: 62817 - protein, 247 aa, Mycobacterium bovis
MASLLNARTAVITGGAQGLGLAIGQRFVAEGARVVLGDVNLEATEVAAKRLGGDDVALAVRCDVTQADDVDILIRTAVERFGGLDVMVNNAGITRDATMRTMTEEQFDQVIAVHLKGTWNGTRLAAAIMRERKRGAIVNMSSVSGKVGMVGQTNYSAAKAGIVGMTKAAAKELAHLGIRVNAIAPGLIRSAMTEAMPQRIWDQKLAEVPMGRAGEPSEVASVAVFLASDLSSYMTGTVLDVTGGRFI

SEQ ID NO: 62818 - protein, 563 aa, Mycobacterium bovis
MAFPEYSPAASAATFADLQIHPRVLRAIGDVGYESPTAIQAATIPALMAGSDVVGLAQTGTGKTAAFAIPMLSKIDITSKVPQALVLVPTRELALQVAEAFGRYGAYLSQLNVLPIYGGSSYAVQLAGLRRGAQVVVGTPGRVIDHLERATLDLSRVDFLVLDEADEMLTMGFADDVERILSETPEYKQVALFSATMPPAIRKLSAKYLHDPFEVTCKAKTAVAENISQSYIQVARKMDALTRVLEVEPFEAMIVFVRTKQATEEIAEKLRARGFSAAAISGDVPQAQRERTITALRDGDIDILVATDVAARGLDVERISHVLNYDIPHDTESYVHRIGRTGRAGRSGAALIFVSPRELHLLKAIEKATRQTLTEAQLPTVEDVNTQRVAKFADSITNALGGPGIELFRRLVEEYEREHDVPMADIAAALAVQCRGGEAFLMAPDPPLSRRNRDQRRDRPQRPKRRPDLTTYRVAVGKRHKIGPGAIVGAIANEGGLHRSDFGQIRIGPDFSLVELPAKLPRATLKKLAQTRISGVLIDLRPYRPPDAARRHNGGKPRRKHVG

SEQ ID NO: 62819 - protein, 371 aa, Mycobacterium bovis
MGGDRKRGGAGCGGSARFGLGGDRKRGGAGCGGSARFGLGGDRKRGGAGCGGSARMVTQALLPSGLVASAVVAASSANLGPGFDSVGLALSLYDEIIVETTDSGLTVTVDGEGGDQVPLGPEHLVVRAVQHGLQAAGVSAAGLAVRCRNAIPHSRGLGSSAAAVVGGLAAVNGLVVQTDSSPSSDAELIQLASEFEGHPDNAAAAVLGGAVVSWTDHSGDRPNYSAVSLRLHPDIRLFTAIPEQRSSTAETRVLLPAQVSHDDARFNVSRAALLVVALTERPDLLMAATEDLLHQPQRAAAMTASAEYLRLLRRHNVAAALSGAGPSLIALSTDSELPTDAVEFGAAKGFAVTELTVGEAVRWSPTVRVPG

SEQ ID NO: 62820 - protein, 602 aa, Mycobacterium bovis
MTDTDLITAGESTDGKPSDAAATDPPDLNADEPAGSLATMVLPELRALANRAGVKGTSGMRKNELIAAIEEIRRQANGAPAVDRSAQEHDKGDRPPSSEAPATQGEQTPTEQIDSQSQQVRPERRSATREAGPSGSGERAGTAADDTDNRQGGQQDAKTEERGTDAGGDQGGDQQASGGQQARGDEDGEARQGRRGRRFRDRRRRGERSGDGAEAELREDDVVQPVAGILDVLDNYAFVRTSGYLPGPHDVYVSMNMVRKNGMRRGDAVTGAVRVPKEGEQPNQRQKFNPLVRLDSINGGSVEDAKKRPEFGKLTPLYPNQRLRLETSTERLTTRVIDLIMPIGKGQRALIVSPPKAGKTTILQDIANAITRNNPECHLMVVLVDERPEEVTDMQRSVKGEVIASTFDRPPSDHTSVAELAIERAKRLVEQGKDVVVLLDSITRLGRAYNNASPASGRILSGGVDSTALYPPKRFLGAARNIEEGGSLTIIATAMVETGSTGDTVIFEEFKGTGNAELKLDRKIAERRVFPAVDVNPSGTRKDELLLSPDEFAIVHKLRRVLSGLDSHQAIDLLMSQLRKTKNNYEFLVQVSKTTPGSMDSD

SEQ ID NO: 62821 - protein, 80 aa, Mycobacterium bovis
MKSDIHPAYEETTVVCGCGNTFQTRSTKPGGRIVVEVCSQCHPFYTGKQKILDSGGRVARFEKRYGKRKVGADKAVSTGK

SEQ ID NO: 62822 - protein, 357 aa, Mycobacterium bovis
MTQPVQTIDVLLAEHAELELALADPALHSNPAEARRVGRRFARLAPIVATHRKLTSARDDLETARELVASDESFAAEVAALEARVGELDGQLTDMLAPRDPHDADDIVLEVKSGEGGEESALFAADLARMYIRYAERHGWAVTVLDETTSDLGGYKDATLAIASKADTPDGVWSRMKFEGGVHRVQRVPVTESQGRVHTSAAGVLVYPEPEEVGQVQIDESDLRIDVFRSSGKGGQGVNTTDSAVRITHLPTGIVVTCQNERSQLQNKTRALQVLAARLQAMAEEQALADASADRASQIRTVDRSERIRTYNFPENRITDHRIGYKSHNLDQVLDGDLDALFDALSAADKQSRLRQS

SEQ ID NO: 62823 - protein, 325 aa, Mycobacterium bovis
MTSAPATMRWGNLPLAGESGTMTLRQAIDLAAALLAEAGVDSARCDAEQLAAHLAGTDRGRLPLFEPPGDEFFGRYRDIVTARARRVPLQHLIGTVSFGPVVLHVGPGVFVPRPETEAILAWATAQSLPARPLIVDACTGSGALAVALAQHRANLGLKARIIGIDDSDCALDYARRNAAGTPVELVRADVTTPCLLPELDGQVDLMVSNPPYIPDAAVLEPEVAQHDPHHALFGGPDGMTVISAVVGLAGRWLRPGGLFAVEHDDTTSSSTVDLVSSTKLFVDVQARKDLAGRPRFVTAMRWGHLPLAGENGAIDPRQRRCRAKR

SEQ ID NO: 62824 - protein, 405 aa, Mycobacterium bovis
MVQYGLEVSSDVAGVAGGLLALSYRGAGVPLRELALVGLTAAIITYFATGPVRMLASRLGAVAYPRERDVHVTPTPRMGGLAMFLGIVGAVFLASQLPALTRGFVYSTGMPAVLVAGAVIMGIGLIDDRWGLDALTKFAGQITAASVLVTMGVAWSVLYIPVGGVGTIVLDQASSILLTLALTVSIVNAMNFVDGLDGLAAGLGLITALAICMFSVGLLRDHGGDVLYYPPAVISVVLAGACLGFLPHNFHRAKIFMGDSGSMLIGLMLAAASTTAAGPISQNAYGARDVFALLSPFLLVVAVMFVPMLDLLLAIVRRTRAGRSAFSPDKMHLHHRLLQIGHSHRRVVLIIYLWVGIGAFGAASSIFFNPRDTAAVMLGAIVVAGVATLIPLLRRGDDYYDPDLD

SEQ ID NO: 62825 - protein, 250 aa, Mycobacterium bovis
MTETILAAQIEVGEHHTATWLGMTVNTDTVLSTAIAGLIVIALAFYLRAKVTSTDVPGGVQLFFEAITIQMRNQVESAIGMRIAPFVLPLAVTIFVFILISNWLAVLPVQYTDKHGHTTELLKSAAADINYVLALALFVFVCYHTAGIWRRGIVGHPIKLLKGHVTLLAPINLVEEVAKPISLSLRLFGNIFAGGILVALIALFPPYIMWAPNAIWKAFDLFVGAIQAFIFALLTILYFSQAMELEEEHH

SEQ ID NO: 62826 - protein, 95 aa, Mycobacterium bovis
MLVTATRAIKEDKEMDPTIAAGALIGGGLIMAGGAIGAGIGDGVAGNALISGVARQPEAQGRLFTPFFITVGLVEAAYFINLAFMALFVFATPVK

SEQ ID NO: 62827 - protein, 446 aa, Mycobacterium bovis
MSTFIGQLFGFAVIVYLVWRFIVPLVGRLMSARQDTVRQQLADAAAAADRLAEASQAHTKALEDAKSEAHRVVEEARTDAERIAEQLEAQADVEAERIKMQGARQVDLIRAQLTRQLRLELGHESVRQARELVRNHVADQAQQSATVDRFLDQLDAMAPATADVDYPLLAKMRSASRRALTSLVDWFGTMAQDLDHQGLTTLAGELVSVARLLDREAVVTRYLTVPAEDATPRIRLIERLVSGKVGAPTLEVLRTAVSKRWSANSDLIDAIEHVSRQALLELAERAGQVDEVEDQLFRFSRILDVQPRLAILLGDCAVPAEGRVRLLRKVLERADSTVNPVVVALLSHTVELLRGQAVEEAVLFLAEVAVARRGEIVAQVGAAAELSDAQRTRLTEVLSRIYGHPVTVQLHIDAALLGGLSIAVGDEVIDGTLSSRLAAAEARLPD

SEQ ID NO: 62828 - protein, 549 aa, Mycobacterium bovis
MAELTIPADDIQSAIEEYVSSFTADTSREEVGTVVDAGDGIAHVEGLPSVMTQELLEFPGGILGVALNLDEHSVGAVILGDFENIEEGQQVKRTGEVLSVPVGDGFLGRVVNPLGQPIDGRGDVDSDTRRALELQAPSVVHRQGVKEPLQTGIKAIDAMTPIGRGQRQLIIGDRKTGKTAVCVDTILNQRQNWESGDPKKQVRCVYVAIGQKGTTIAAVRRTLEEGGAMDYTTIVAAAASESAGFKWLAPYTGSAIAQHWMYEGKHVLIIFDDLTKQAEAYRAISLLLRRPPGREAYPGDVFYLHSRLLERCAKLSDDLGGGSLTGLPIIETKANDISAYIPTNVISITDGQCFLETDLFNQGVRPAINVGVSVSRVGGAAQIKAMKEVAGSLRLDLSQYRELEAFAAFASDLDAASKAQLERGARLVELLKQPQSQPMPVEEQVVSIFLGTGGHLDSVPVEDVRRFETELLDHMRASEEEILTEIRDSQKLTEEAADKLTEVIKNFKKGFAATGGGSVVPDEHVEALDEDKLAKEAVKVKKPAPKKKK

SEQ ID NO: 62829 - protein, 875 aa, Mycobacterium bovis
MKLHRLALTNYRGIAHRDVEFPDHGVVVVCGANEIGKSSMVEALDLLLEYKDRSTKKEVKQVKPTNADVGSEVIAEISSGPYRFVYRKRFHKRCETELTVLAPRREQLTGDEAHERVRTMLAETVDTELWHAQRVLQAASTAAVDLSGCDALSRALDLAAGDDAALSGTESLLIERIEAEYARYFTPTGRPTGEWSAAVSRLAAAEAAVADCAAAVAEVDDGVRRHTELTEQVAELSQQLLAHQLRLEAARVAAEKIAAITDDAREAKLIATAAAATSGASTAAHAGRLGLLTEIDTRTAAVVAAEAKARQAADEQATARAEAEACDAALTEATQVLTAVRLRAESARRTLDQLADCEEADRLAARLARIDDIEGDRDRVCAELSAVTLTEELLSRIERAAAAVDRGGAQLASISAAVEFTAAVDIELGVGDQRVSLSAGQSWSVTATGPTEVKVPGVLTARIVPGATALDFQAKYAAAQQELADALAAGEVADLAAARSADLCRRELLSRRDQLTATLAGLCGDEQVDQLRSRLEQLCAGQPAELDLVSTDTATARAELDAVEAARIAAEKDCETRRQIAAGAARRLAETSTRATVLQNAAAAESAELGAAMTRLACERASVGDDELAAKAEADLRVLQTAEQRVIDLADELAATAPDAVAAELAEAADAVELLRERHDEAIRALHEVGVELSVFGTQGRKGKLDAAETEREHAASHHARVGRRARAARLLRSVMARHRDTTRLRYVEPYRAELHRLGRPVFGPSFEVEVDTDLRIRSRTLDDRTVPYECLSGGAKEQLGILARLAGAALVAKEDAVPVLIDDALGFTDPERLAKMGEVFDTIGADGQVIVLTCSPTRYGGVKGAHRIDLDAIQ

SEQ ID NO: 62830 - protein, 528 aa, Mycobacterium bovis
MDTQSDYVVVGTGSAGAVVASRLSTDPATTVVALEAGPRDKNRFIGVPAAFSKLFRSEIDWDYLTEPQPELDGREIYWPRGKVLGGSSSMNAMMWVRGFASDYDEWAARAGPRWSYADVLGYFRRIENVTAAWHFVSGDDSGVTGPLHISRQRSPRSVTAAWLAAARECGFAAARPNSPRPEGFCETVVTQRRGARFSTADAYLKPAMRRKNLRVLTGATATRVVIDGDRAVGVEYQSDGQTRIVYARREVVLCAGAVNSPQLLMLSGIGDRDHLAEHDIDTVYHAPEVGCNLLDHLVTVLGFDVEKDSLFAAEKPGQLISYLLRRRGMLTSNVGEAYGFVRSRPELKLPDLELIFAPAPFYDEALVPPAGHGVVFGPILVAPQSRGQITLRSADPHAKPVIEPRYLSDLGGVDRAAMMAGLRICARIAQARPLRDLLGSIARPRNSTELDEATLELALATCSHTLYHPMGTCRMGSDEASVVDPQLRVRGVDGLRVADASVMPSTVRGHTHAPSVLIGEKAADLIRS

SEQ ID NO: 62831 - protein, 612 aa, Mycobacterium bovis
MSPLLEVTDLAVTFRTDGDPVTAVRGISYRVEPGEVVAMVGESGSGKSAAAMAVVGLLPEYAQVRGSVRLQGTELLGLADNAMSRFRGKAIGTVFQDPMSALTPVYTVGDQIAEAIEVHQPRVGKKAARRRAVELLDLVGISQPQRRSRAFPHELSGGERQRVVIAIAIANDPDLLICDEPTTALDVTVQAQILDVLKAARDVTGAGVLIITHDLGVVAEFADRALVMYAGRVVESAGVNDLYRDRRMPYTVGLLGSVPRLDAAQGTRLVPIPGAPPSLAGLAPGCPFAPRCPLVIDECLTAEPELLDVATDHRAACIRTELVTGRSAADIYRVKTEARPAALGDASVVVRVRHLVKTYRLAKGVVLRRAIGEVRAVDGISLELRQGRTLGIVGESGSGKSTTLHEILELAAPQSGSIEVLGTDVATLGTAERRSLRRDIQVVFQDPVASLDPRLPVFDLIAEPLQANGFGKNETHARVAELLDIVGLRHGDASRYPAEFSGGQKQRIGIARALALQPKILALDEPVSALDVSIQAGIINLLLDLQEQFGLSYLFVSHDLSVVKHLAHQVAVMLAGTVVEQGDSEEVFGNPKHEYTRRLLGAVPQPDPARRG

SEQ ID NO: 62832 - protein, 161 aa, Mycobacterium bovis
MRMSAKAEYAVRAMVQLATAASGTVVKTDDLAAAQGIPPQFLVDILTNLRTDRLVRSHRGREGGYELARPGTEISIADVLRCIDGPLASVRDIGLGDLPYSGPTTALTDVWRALRASMRSVLEETTLADVAGGALPEHVAQLADDYRAQESTRHGASRHGD

SEQ ID NO: 62833 - protein, 550 aa, Mycobacterium bovis
MTPADLAELLKATAAAVLAERGLDASALPQMVTVERPRIPEHGDYASNLAMQLAKKVGTNPRELAGWLAEALTKVDGIASAEVAGPGFINMRLETAAQAKVVTSVIDAGHSYGHSLLLAGRKVNLEFVSANPTGPIHIGGTRWAAVGDALGRLLTTQGADVVREYYFNDHGAQIDRFANSLIAAAKGEPTPQDGYAGSYITNIAEQVLQKAPDALSLPDAELRETFRAIGVDLMFDHIKQSLHEFGTDFDVYTHEDSMHTGGRVENAIARLRETGNIYEKDGATWLRTSAFGDDKDRVVIKSDGKPAYIAGDLAYYLDKRQRGFDLCIYMLGADHHGYIARLKAAAAAFGDDPATVEVLIGQMVNLVRDGQPVRMSKRAGTVLTLDDLVEAIGVDAARYSLIRSSVDTAIDIDLALWSSASNENPVYYVQYAHARLSALARNAAELALIPDTNHLELLNHDKEGTLLRTLGEFPRVLETAASLREPHRVCRYLEDLAGDYHRFYDSCRVLPQGDEQPTDLHTARLALCQATRQVIANGLAIIGVTAPERM

SEQ ID NO: 62834 - protein, 314 aa, Mycobacterium bovis
MLFAGRAHPELAEQVAKELDVHVTSQDAREFANGEIFVRFHESVRGCDAFVLQSCPAPVNRWLMEQLIMIDALKRGSAKRITAVMPFYPYARQDKKHRGREPISARLIADLLKTAGADRIVTVDLHTDQIQGFFDGPVDHMRGQNLLTGYIRDNYPDGNMVVVSPDSGRVRIAEKWADALGGVPLAFIHKTRDPRVPNQVVSNRVVGDVAGRTCVLIDDMIDTGGTIAGAVALLHNDGAGDVIIAATHGVLSDPAAQRLASCGAREVIVTNTLPIGEDKRFPQLTVLSIAPLLASTIRAVFENGSVTGLFDGDA

SEQ ID NO: 62835 - protein, 215 aa, Mycobacterium bovis
MAKSASNQLRVTVRTETGKGASRRARRAGKIPAVLYGHGAEPQHLELPGHDYAAVLRHSGTNAVLTLDIAGKEQLALTKALHIHPIRRTIQHADLLVVRRGEKVVVEVSVVVEGQAGPDTLVTQETNSIEIEAEALSIPEQLTVSIEGAEPGTQLTAGQIALPAGVSLISDPDLLVVNVVKAPTAEELEGEVAGAEEAEEAAVEAGEAEAAGESE

SEQ ID NO: 62836 - protein, 341 aa, Mycobacterium bovis
MCAHQFFGLVHNPVVAAAIGKPEPPPVDSDIGLPTTVPFEPWSVADFSRYLSTLGLPAAGDAVTLHRILSSMERAGLLLPLGWDPRLPVMGQKYISQGTISKGQRGGNLWLSEVFGAELIIPSYNAVTVQLAGHDDAGNPVDSWGTGLVVDHNHVITNKHVVTGLAGTSAGLSVYPSSNHAEAELVNFSGTAHPHPTLDVAVIKFEMPEGKYIPRLGGMAFRDPDWADEVYVFGYPRVPMTAEMAITVQRGEVVNPAATTIPCRQKIFLYSAIARPGNSGGPIVAQDGRVIGLVVEDSAEAPSTGTGPNAAPFYRGIPSSEVIRALDELDFGGIVEMDTLP

SEQ ID NO: 62837 - protein, 157 aa, Mycobacterium bovis
MAPGNQQVYGGRWHRWNTPAVARNFHNVGDVSGEAMGAQGYLRRLTRRLTEDLEQRDVEELSDEVLNAGAQRAIDCQRGQEVTVVGTLRSVETNGKGCSGGVSAELFDGSDTVTLVWLGQRRIPGIDTGRTLRVRGRLGKLENGTKAIYNPHYEIQR

SEQ ID NO: 62838 - protein, 871 aa, Mycobacterium bovis
MVVAEPPRNTTVTLLFADLCAIFTPYRWMIEHVTTKRGQLRIYLGAAPGVGKTYAMLGEAHRRLERGTDVVAAVVETHGRNKTAKLLEGIEMIPPRYVEYRGARFPELDVEAVLRRHPQVVLVDELAHTNTPGSKNPKRWQDVQEILDAGITVISTVNIQHLEGLNDVVEQITGIEQKEKIPDEIVRAADQVELVDITPEALRRRLAHGNVYAAERVDAALSNYFRTGNLTALREIALLWLADQVDAALEKYRADKKITATWEARERVVVAVTGGPESETLVRRASRIASKSSAELMVVHVIRGDDLAGVSAPQLGRVRELATSLGATMHTVVGDDVPTALLDFAREMNATQLVVGTSRRSRWARLFDEGIGARTVQESGGIDVHMVTHPAASRASGWSRVSPRERHIASWLAALVVPSVICAITVAWLDRFMGIGGESALFFIGVLIVALLGGVAPAALSALLSGMLLNYFLTEPRYTWTIAEPDAAVTEFVLLAMAVAVAVLVDGAASRTREARRASQEAELLALFAGSVLRGADLATLLQRVRETYSQRAVTMLRVRQGASTGETVACVGTNPCRDVDSADTAIEVGDDEFWMLMAGRKLAARDRRVLTAVATQAAGLVKQRELAEEAGQAEAIARADELRRSLLSAVSHDLRTPLAAAKVAVSSLRTEDVAFSPEDTAELLATIEESIDQLTALVANLLDSSRLAAGVIRPQLRRAYLEEAVQRALVSIGKGATGFYRSGIDRVKVDVGDAVAMADAGLLERVLANLIDNALRYAPDCVVRVNAGRVRERVLINVIDEGPGVPRGTEEQLFAPFQRPGDHDNTTGVGLGMSVARGFVEAMGGTISATDTPGGGLTVVIDLAAPEDRP

SEQ ID NO: 62839 - protein, 325 aa, Mycobacterium bovis
MIVVLVDPRRPTLVPVEAIEFLRGEVQYTEEMPVAVPWSLPAARSAHAGNDAPVLLSSDPNHPAVITRLAAGARLISAPDSQRGERLVDAVAMMDKLRTAGPWESEQTHDSLRRYLLEETYELLDAVRSGSVDQLREELGDLLLQVLFHARIAEDASQSPFTIDDVADTLMRKLGNRAPGVLAGESISLEDQLAQWEAAKASEKARKSVADDVHTGQPALALAQKVIQRAQKAGLPAHLIPDEITSVSVSADVDAENTLRTAVLDFIDRLRCAERAIAVARRGSNVAEQLDVTPLGVITEQEWLAHWPTAVNDSRGGSKKRKGMR

SEQ ID NO: 62840 - protein, 495 aa, Mycobacterium bovis
MTFPGDTAVLVLAAGPGTRMRSDTPKVLHTLAGRSMLSHVLHAIAKLAPQRLIVVLGHDHQRIAPLVGELADTLGRTIDVALQDRPLGTGHAVLCGLSALPDDYAGNVVVTSGDTPLLDADTLADLIATHRAVSAAVTVLTTTLDDPFGYGRILRTQDHGVMAIVEQTDATPSQREIREVNAGVYAFDIAALRSALSRLSSNNAQQELYLTDVIAILRSDGQTVHASHVDDSALVAGVNNRVQLAQLASELNRRVVAAHQLAGVTVVDPATTWIDVDVTIGRDTVIHPGTQLLGRTQIGGRCVVGPDTTLTDVAVGDGASVVRTHGSSSSIGDGAAVGPFTYLRPGTALGADGKLGAFVEVKNSTIGTGTKVPHLTYVGDADIGEYSNIGASSVFVNYDGTSKRRTTVGSHVRTGSDTMFVAPVTIGDGAYTGAGTVVREDVPPGALAVSAGPQRNIENWVQRKRPGSPAAQASKRASEMACQQPTQPPDADQTP

SEQ ID NO: 62841 - protein, 523 aa, Mycobacterium bovis
MNRTQLLTLIATGLGLFMIFLDALIVNVALPDIQRSFAVGEDGLQWVVASYSLGMAVFIMSAATLADLYGRRRWYLIGVSLFTLGSIACGLAPSIAVLTTARGAQGLGAAAVSVTSLALVSAAFPEAKEKARAIGIWTAIASIGTTTGPTLGGLLVDQWGWRSIFYVNLPMGALVLFLTLCYVEESCNERARRFDLSGQLLFIVAVGALVYAVIEGPQIGWTSVQTIVMLWTAAVGCALFVWLERRSSNPMMDLTLFRDTSYALAIATICTVFFAVYGMLLLTTQFLQNVRGYTPSVTGLMILPFSAAVAIVSPLVGHLVGRIGARVPILAGLCMLMLGLLMLIFSEHRSSALVLVGLGLCGSGVALCLTPITTVAMTAVPAERAGMASGIMSAQRAIGSTIGFAVLGSVLAAWLSATLEPHLERAVPDPVQRHVLAEIIIDSANPRAHVGGIVPRRHIEHRDPVAIAEEDFIEGIRVALLVATATLAVVFLAGWRWFPRDVQTAGSDAKREAAYSDDRRVRG

SEQ ID NO: 62842 - protein, 282 aa, Mycobacterium bovis
MTTTSAPARNGTRRPSRPIVLLIPVPGSSVIHDLWAGTKLLVVFGISVLLTFYPGWVTIGMMAALVLAAARIAHIPRGALPSVPRWLWIVLAIGFLTAALAGGTPVVAVGGVQLGLGGALHFLRITALSVVLLALGAMVSWTTNVAEISPAVATLGRPFRVLRIPVDEWAVALALALRAFPMLIDEFQVLYAARRLRPKRMPPSRKARRQRHARELIDLLAAAITVTLRRADEMGDAITARGGTGQLSAHPGRPKLADWVTLAITAMASGTAVAIESLILHS

SEQ ID NO: 62843 - protein, 639 aa, Mycobacterium bovis
MSGRISDRDIAAIREGARIEDVVGDYVQLRRAGADSLKGLCPFHNEKSPSFHVRPNHGHFHCFGCGEGGDVYAFIQKIEHVSFVEAVELLADRIGHTISYTGAATSVQRDRGSRSRLLAANAAAAAFYAQALQSDEAAPARQYLTERSFDAAAARKFGCGFAPSGWDSLTKHLQRKGFEFEELEAAGLSRQGRHGPMDRFHRRLLWPIRTSAGEVVGFGARRLFDDDAMEAKYVNTPETLLYKKSSVMFGIDLAKRDIAKGHQAVVVEGYTDVMAMHLAGVTTAVASCGTAFGGEHLAMLRRLMMDDSFFRGELIYVFDGDEAGRAAALKAFDGEQKLAGQSFVAVAPDGMDPCDLRLKCGDAALRDLVARRTPLFEFAIRAAIAEMDLDSAEGRVAALRRCVPMVGQIKDPTLRDEYARQLAGWVGWADVAQVIGRVRGEAKRTKHPRLGRLGSTTIARAAQRPTAGPPTELAVRPDPRDPTLWPQREALKSALQYPALAGPVFDALTVEGFTHPEYAAVRAAIDTAGGTSAGLSGAQWLDMVRQQTTSTVTSALISELGVEAIQVDDDKLPRYIAGVLARLQEVWLGRQIAEVKSKLQRMSPIEQGDEYHALFGDLVAMEAYRRSLLEQASGDDLTA

SEQ ID NO: 62844 - protein, 532 aa, Mycobacterium bovis
MQITPFLAGTAGLSLLFSSTQANVAGMLIGMALRAGARRQPVIGCAAALVFGGLPALAFPAPSWWWLAWFGLVPLLLVVRAAPTSWEGALRAWTGMGGFVLATQYWLVTSAGPMLVLLAAGLGVLWLPAGWLAHRLLSVPVTTCRVGAALVVVPSAWVAAEAVRSWQSLGGPWALLGASQWSQPVTLASASLGGVWLTSFLLVATNTAIASVLVCRATGGRLVALGCVIGCAGLGPASYLLGSVPVGGPTVRVALVQAGDIADAAARLAAGEEFTAAVADQRPDLVVWGESSVGQDLTRHPDVLARLAELSQRVGADLLVNVDAPAPDGGIYKSAVLVGAHEAVGSYRKTRLVPFGEYVPLRPLFGWITRYSKAAAKDRQRGAGPVVLAVNSLHIAPLISYEMTFSDLTRHAARLGAALLVYQSSTSTFQGSWAQPQLAAQPAVRAVEAGIPAVHASLSGDSSAFDTRGRRLAWCSAEFNGAIVVNVPLASNVTLYLRLGDWVPVTAFVVMGAGFAVFLRRSLARVSDCADK

SEQ ID NO: 62845 - protein, 647 aa, Mycobacterium bovis
MNAHVEQLEFQAEARQLLDLMVHSVYSNKDAFLRELISNASDALDKLRIEALRNKDLEVDTSDLHIEIDADKAARTLTVRDNGIGMAREEVVDLIGTLAKSGTAELRAQLREAKNAAASEELIGQFGIGFYSSFMVADKVQLLTRKAGESAATRWESSGEGTYTIESVEDAPQGTSVTLHLKPEDAEDDLHDYTSEWKIRNLVKKYSDFIAWPIRMDVERRTPASQEEGGEGGEETVTIETETLNSMKALWARPKEEVSEQEYKEFYKHVAHAWDDPLEIIAMKAEGTFEYQALLFIPSHAPFDLFDRDAHVGIQLYVKRVFIMGDCDQLMPEYLRFVKGVVDAQDMSLNVSREILQQDRQIKAIRRRLTKKVLSTIKDVQSSRPEDYRTFWTQFGRVLKEGLLSDIDNRETLLGISSFVSTYSEEEPTTLAEYVERMKDGQQQIFYATGETRQQLLKSPHLEAFKAKGYEVLLLTDPVDEVWVGMVPEFDGKPLQSVAKGEVDLSSEEDTSEAEREERQKEFADLLTWLQETLSDHVKEVRLSTRLTESPACLITDAFGMTPALARIYRASGQEVPVGKRILELNPSHPLVTGLRQAHQDRADDAEKSLAETAELLYGTALLAEGGALEDPARFAELLAERLARTL

SEQ ID NO: 62846 - protein, 203 aa, Mycobacterium bovis
MFEGPVQDLIDELGKLPGIGPKSAQRIAFHLLSVEPSDIDRLTGVLAKVRDGVRFCAVCGNVSDNERCRICSDIRRDASVVCIVEEPKDIQAVERTREFRGRYHVLGGALDPLSGIGPDQLRIRELLSRIGERVDDVDVTEVIIATDPNTEGEATATYLVRMLRDIPGLTVTRIASGLPMGGDLEFADELTLGRALAGRRVLA

SEQ ID NO: 62847 - protein, 231 aa, Mycobacterium bovis
MVRIGLVLPDVMGTYGDGGNAVVLRQRLLLRGIAAEIVEITLADPVPDSLDLYTLGGAEDYAQRLATRHLRRYPGLQRAAGRGAPVLAICAAIQVLGHWYETSSGDRVDGVGLLDVTTSPQDARTIGELVSKPLLAGLTQPLTGFENHRGGTVLGPGTSPLGAVVKGAGNRAGDGFDGAVAGSVVATYMHGPCLARNPELADLLLSKVVGELAPLDLPEVDLLRRERLSAR

SEQ ID NO: 62848 - protein, 535 aa, Mycobacterium bovis
ADVALYRKYRPASFAEVVGQEHVTAPLSVALDAGRINHAYLFSGPRGCGKTSSARILARSLNCAQGPTANPCGVCESCVSLAPNAPGSIDVVELDAASHGGVDDTRELRDRAFYAPVQSRYRVFIVDEAHMVTTAGFNALLKIVEEPPEHLIFIFATTEPEKVLPTIRSRTHHYPFRLLPPRTMRALLARICEQEGVVVDDAVYPLVIRAGGGSPRDTLSVLDQLLAGAADTHVTYTRALGLLGVTDVALIDDAVDALAACDAAALFGAIESVIDGGHDPRRFATDLLERFRDLIVLQSVPDAASRGVVDAPEDALDRMREQAARIGRATLTRYAEVVQAGLGEMRGATAPRLLLEVVCARLLLPSASDAESALLQRVERIETRLDMSIPAPQAVPRPSAAAAEPKHQPAREPRPGAGPHTGLERTHRGRGSVHVADGARQGAPAQPYHRGDAGGCHRPCARGQHAGADPRIGAAGAAAVRTAQTPMSSPRRLKTRWESTGGCGVRPVNPAAAASPVGGGANVATAKAVNPAPTA

SEQ ID NO: 62849 - protein, 376 aa, Mycobacterium bovis
MICFDDVSKVYAHGATAVDRLTLEVPNGMLTVFVGPSGCGKTTALRMINRMVDPTSGTITVDGTDVSTVNAVKLRLGIGYVIQNAGLMPHQRVIDNVATVPVLKGQPRRAARKAGYEVLERVGLDPKVATRYPAQLSGGEQQRVGVARALAADPPILLMDEPFSAVDPVVRHELQNEILRLQAELHKTIVFVTHDIDEALKLADLVAVFAPGGALAQYDETARLLSSPANDFVSKFIGLGRGYRWLQLFDAAGLPVRDIEQVSVNGLSDARDRQVRDGWVLVVDGAGAPLGWIDADGRRRHRGGAALSDAMTVGGSVFRPNGNLSQALDAALSSPSGVGVAVDGGGKVIGGILAADVLAEFQKGKKAGGGAKPCTT

SEQ ID NO: 62850 - protein, 133 aa, Mycobacterium bovis
MQPGGDMSALLAQAQQMQQKLLEAQQQLANSEVHGQAGGGLVKVVVKGSGEVIGVTIDPKVVDPDDIETLQDLIVGAMRDASQQVTKMAQERLGALAGAMRPPAPPAAPPGAPGMPGMPGMPGAPGAPPVPGI

SEQ ID NO: 62851 - protein, 352 aa, Mycobacterium bovis
MKLVSAGQLCNGCPARVTTYILARRARFGSSRPWPVAVPGCPWACRVRGVSVVNVLSLGSSSGVVWGRVPITAPAGAATGVTSRADAHSQMRRYAQTGPTAKLSSAPMTTMWGAPLHRRWRGSRLRDPRQAKFLTLASLKWVLANRAYTPWYLVRYWRLLRFKLANPHIITRGMVFLGKGVEIHATPELAQLEIGRWVHIGDKNTIRAHEGSLRFGDKVVLGRDNVINTYLDIEIGDSVLMADWCYICDFDHRMDDITLPIKDQGIIKSPVRIGPDTWIGVKVSVLRGTTIGRGCVLGSHAVVRGAIPDYSIAVGAPAKVVKNRQLSWEASAAQRAELAAALADIERKKAAR

SEQ ID NO: 62852 - protein, 378 aa, Mycobacterium bovis
MPVTLAAVDPDRQADIAALDCTLTTVERVLDVEGLRSRIEKLEHEASDPHLWDDQTRAQRVTSELSHTQGELRRVEELRRRLDDLPVLYELAAEEAGAAAADAVAEADAELKSLRADIEATEVRTLLSGEYDEREALVTIRSGAGGVDAADWAEMLMRMYIRWAEQHKYPVEVFDTSYAEEAGIKSATFAVHAPFAYGTLSVEQGTHRLVRISPFDNQSRRQTSFAEVEVLPVVETTDHIDIPEGDVRVDVYRSSGPGGQSVNTTDSAVRLTHIPSGIVVTCQNEKSQLQNKIAAMRVLQAKLLERKRLEERAELDALKADGGSSWGNQMRSYVLHPYQMVKDLRTEYEVGNPAAVLDGDLDGFLEAGIRWRNRRNDD

SEQ ID NO: 62853 - protein, 308 aa, Mycobacterium bovis
MTTSGTVLATSIAQHWHNFWRGEIGDWILNRGLRIVMLLIAAVLAARFVTWLANRVTRRLDLGFTESDALVRSEATKHRQAVASVISWVSIVLIYVVVVYEVIDVLPVPVGALVGPAAVLGAALGFGAQRLVQDLLAGFFIIVEKQYGFGDLVELSMVGSPENAAGTVEDVTLRVTKLRSSEGEVFTVPNGNIVKSVNLSKDWARAVVDIPVPTSADLGRVNEVLHQECEHARHDSLLGELLLDEPTVMGVERIEVDTVTLRLVARTLPGKQFEAGRQLRVLVIRALTRAGIVTAADARAAVAESPEQ

SEQ ID NO: 62854 - protein, 160 aa, Mycobacterium bovis
MSKSSRGGRQIVASNRKARHNYSIIEVFEAGVALQGTEVKSLREGQASLADSFATIDDGEVWLRNAHIPEYRHGSWTNHEPRRNRKLLLHRRQIDTLVGKIREGNFALVPLSLYFAEGKVKVELALARGKQARDKRQDMARRDAQREVLRELGRRAKGMT

SEQ ID NO: 62855 - protein, 150 aa, Mycobacterium bovis
MDIAGRSLVYFSSVSENTHRFVQKLGIPATRIPLHGRIEVDEPYVLILPTYGGGRANPGLDAGGYVPKQVIAFLNNDHNRAQLRGVIAAGNTNFGAEFCYAGDVVSRKCSVPYLYRFELMGTEDDVAAVRTGLAEFWKEQTCHQPSLQSL

SEQ ID NO: 62856 - protein, 725 aa, Mycobacterium bovis
MPPTVIAEPVASGAHASYSGGPGETDYHALNAMLNLYDADGKIQFDKDREAAHQYFLQHVNQNTVFFHNQDEKLDYLIRENYYEREVLDQYSRNFVKTLLDRAYAKKFRFPTFLGAFKYYTSYTLKTFDGKRYLERFEDRVVMVALTLAAGDTALAELLVDEIIDGRFQPATPTFLNSGKKQRGEPVSCFLLRVEDNMESIGRSINSALQLSKRGGGVALLLTNIREHGAPIKNIENQSSGVIPIMKLLEDAFSYANQLGARQGAGAVYLHAHHPDIYRFLDTKRENADEKIRIKTLSLGVVIPDITFELAKRNDDMYLFSPYDVERVYGVPFADISVTEKYYEMVDDARIRKTKIKAREFFQTLAELQFESGYPYIMFEDTVNRANPIDGKITHSNLCSEILQVSTPSLFNEDLSYAKVGKDISCNLGSLNIAKTMDSPDFAQTIEVAIRALTAVSDQTHIKSVPSIEQGNNDSHAIGLGQMNLHGYLARERIFYGSDEGIDFTNIYFYTVLYHALRASNRIAIERGTHFKGFERSKYASGEFFDKYTDQIWEPKTQKVRQLFADAGIRIPTQDDWRRLKESVQAHGIYNQNLQAVPPTGSISYINHSTSSIHPIVSKVEIRKEGKIGRVYYPAPYMTNDNLEYYEDAYEIGYEKIIDTYAAATQHVDQGLSLTLFFKDTATTRDVNKAQIYAWRKGIKTLYYIRLRQMALEGTEVEGCVSCML

SEQ ID NO: 62857 - protein, 367 aa, Mycobacterium bovis
MKVLAAMSGGVDSSVAAARMVDAGHEVVGVHMALSTAPGTLRTGSRGCCSKEDAADARRVADVLGIPFYVWDFAEKFKEDVINDFVSSYARGETPNPCVRCNQQIKFAALSARAVALGFDTVATGHYARLSGGRLRRAVDRDKDQSYVLAVLTAQQLRHAAFPIGDTPKRQIRAEAARRGLAVANKPDSHDICFIPSGNTKAFLGERIGVRRGVVVDADGVVLASHDGVHGFTIGQRRGLGIAGPGPNGRPRYVTAIDADTATVHVGDVTDLDVQTLTGRAPVFTAGAAPSGPVDCVVQVRAHGETVSAVAELIGDALFVQLHAPLRGVARGQTLVLYRPDPAGDEVLGSATIAGASGLSTGGNPGA

SEQ ID NO: 62858 - protein, 573 aa, Mycobacterium bovis
MTAEAPPLGELEAIRPYPARTGPKGSLVYKLITTTDHKMIGIMYCVACISFFFIGGLLALLMRTELAAPGLQFLSNEQFNQLFTMHGTIMLLFYATPIVFGFANLVLPLQIGAPDVAFPRLNAFSFWLFVFGATIGAAGFITPGGAADFGWTAYTPLTDAIHSPGAGGDLWIMGLIVAGLGTILGAVNMITTVVCMRAPGMTMFRMPIFTWNIMVTSILILIAFPLLTAALFGLAADRHLGAHIYDAANGGVLLWQHLFWFFGHPEVYIIALPFFGIVSEIFPVFSRKPIFGYTTLVYATLSIAALSVAVWAHHMFATGAVLLPFFSFMTYLIAVPTGIKFFNWIGTMWKGQLTFETPMLFSVGFMVTFLLGGLTGVLLASPPLDFHVTDSYFVVAHFHYVLFGTIVFATFAGIYFWFPKMTGRLLDERLGKLHFWLTFIGFHTTFLVQHWLGDEGMPRRYADYLPTDGFQGLNVVSTIGAFILGASMFPFVWNVFKSWRYGEVVTVDDPWGYGNSLEWATSCPPPRHNFTELPRIRSERPAFELHYPHMVERLRAEAHVGRHHDEPAMVTSS

SEQ ID NO: 62859 - protein, 253 aa, Mycobacterium bovis
MRNGTLRYRQPSYKSHGVRYPLAVAQLGFQRARTEENKRQRAAALVEAARSLALETGVASVTLTAVAGRAGIHYSAVRRYFTSHKEVLLHLAAEGWARWSGTVCEQLGEPGPMSAPRVAEALANGLAADPLFCDLLANLHLHLEQEVDVDRVIEVKRTSIAAVIALVDAIESALPALGRSGAFDILLAAYSLAATLWQIANPPERLTDAYAEEPELLPPEWNLDFAAALTRLLTATLLGLLAGSPCECRSPTR

SEQ ID NO: 62860 - protein, 392 aa, Mycobacterium bovis
MIRACRPITVPLTQAQGLVLGGDVVAPLSLPVFDNSAMDGYAVRAEDTSGATPQNPVMLPVAEDIPAGRADMLTLQPVTAHRIMTGAPVPTGATAIVPVEATDGGVDSVAIRQQATPGKHIRRSGEDVAAGTTVLHNGQIVTPAVLGLAAALGLAELPVLPRQRVLVISTGSELASPGTPLQPGQIYESNSIMLAAAVRDAGAAVVATATAGDDVAQFGAILDRYAVDADLIITSGGVSAGAYEVVKDAFGSADYRGGDHGVEFVKVAMQPGMPQGVGRVAGTPIVTLPGNPVSALVSFEVFIRPPLRMAMGLPDPYRPHRSAVLTASLTSPRGKRQFRRAILDHQAGTVISYGPPASHHLRWLASANGLLDIPEDVVEVAAGTQLQVWDLT

SEQ ID NO: 62861 - protein, 222 aa, Mycobacterium bovis
MHESRLASARLYLCTDARRERGDLAQFAEAALAGGVDIIQLRDKGSPGELRFGPLQARDELAACEILADAAHRYGALFAVNDRADIARAAGADVLHLGQRDLPVNVARQILAPDTLIGRSTHDPDQVAAAAAGDADYFCVGPCWPTPTKPGRAAPGLGLVRVAAELGGDDKPWFAIGGINAQRLPAVLDAGARRIVVVRAITSADDPRAAAEQLRSALTAAN

SEQ ID NO: 62862 - protein, 428 aa, Mycobacterium bovis
MHARAPVDVWRSVRSLPDFWRLLQVRVASQFGDGLFQAGLAGALLFNPDRAADPMAIAGAFAVLFLPYSLLGPFAGALMDRWDRRWVLVGANTGRLALIAGVGTILAVGAGDVPLLVGALVANGLARFVASGLSAALPHVVPREQVVTMNSVAIASGAVSAFLGANFMLLPRWLLGSGDEGASAIVFLVAIPVSIALLWSLRFGPRVLGPDDTERAIHGSAVYAVVTGWLHGARTVVQLPTVAAGLSGLAAHRMVVGINSLLILLLVRHVTARAVGGLGTALLFFAATGLGAFLANVLTPTAIRRWGRYATANGALAAAATIQVAAAGLLVPVMVVCGFLLGVAGQVVKLCADSAMQMDVDDALRGHVFAVQDALFWVSYILSITVAAALIPEHGHAPVFVLFGSAIYLAGLVVHTIVGRRGQPVIGR

SEQ ID NO: 62863 - protein, 480 aa, Mycobacterium bovis
MPEAVQEADLLTAAAVALNRHAALLRELGSVFAAAGHELYLVGGSVRDALLGRLSPDLDFTTDARPERVQEIVRPWADAVWDTGIEFGTVGVGKSDHRMEITTFRADSYDRVSRHPEVRFGDCLEGDLVRRDFTTNAMAVRVTATGPGEFLDPLGGLAALRAKVLDTPAAPSGSFGDDPLRMLRAARFVSQLGFAVAPRVRAAIEEMAPQLARISAERVAAELDKLLVGEDPAAGIDLMVQSGMGAVVLPEIGGMRMAIDEHHQHKDVYQHSLTVLRQAIALEDDGPDLVLRWAALLHDIGKPATRRHEPDGGVSFHHHEVVGAKMVRKRMRALKYSKQMIDDISQLVYLHLRFHGYGDGKWTDSAVRRYVTDAGALLPRLHKLVRADCTTRNKRRAARLQASYDRLEERIAELAAQEDLDRVRPDLDGNQIMAVLDIPAGPQVGEAWRYLKELRLERGPLSTEEATTELLSWWKSRGNR

SEQ ID NO: 62864 - protein, 744 aa, Mycobacterium bovis
MSITRPTGSYARQMLDPGGWVEADEDTFYDRAQEYSQVLQRVTDVLDTCRQQKGHVFEGGLWSGGAANAANGALGANINQLMTLQDYLATVITWHRHIAGLIEQAKSDIGNNVDGAQREIDILENDPSLDADERHTAINSLVTATHGANVSLVAETAERVLESKNWKPPKNALEDLLQQKSPPPPDVPTLVVPSPGTPGTPGTPGTPITPGTPITPGTPITPGTPITPGTPITPIPGAPVTPITPTPGTPVTPVTPGKPVTPVTPVKPGTPGEPTPITPVTPPVAPATPATPATPVTPAPAPHPQPAPAPAPSPGPQPVTPATPGPSGPATPGTPGGEPAPHVKPAALAEQPGVPGQHAGGGTQSGPAHADESAASVTPAAASGVPGARAAAAAPSGTAVGAGARSSVGTAAASGAGSHAATGRAPVATSDKAAAPSTRAASARTAPPARPPSTDHIDKPDRSESADDGTPVSMIPVSAARAARDAATAAASARQRGRGDALRLARRIAAALNASDNNAGDYGFFWITAVTTDGSIVVANSYGLAYIPDGMELPNKVYLASADHAIPVDEIARCATYPVLAVQAWAAFHDMTLRAVIGTAEQLASSDPGVAKIVLEPDDIPESGKMTGRSRLEVVDPSAAAQLADTTDQRLLDLLPPAPVDVNPPGDERHMLWFELMKPMTSTATGREAAHLRAFRAYAAHSQEIALHQAHTATDAAVQRVAVADWLYWQYVTGLLDRALAAAS

SEQ ID NO: 62865 - protein, 425 aa, Mycobacterium bovis
MNTLNDSLTAFDPDIAALIDGELRRQESGLEMIASENYAPLAVMQAQGSVLTNKYAEGYPGRRYYGGCEFVDGVEQLAIDRVKALFGAEYANVQPHSGATANAATMHALLNPGDTILGLSLAHGGHLTHGMRINFSGKLYHATAYEVSKEDYLVDMDAVAEAARTHRPKMIIAGWSAYPRQLDFARFRAIADEVDAVLMVDMAHFAGLVAAGVHPSPVPHAHVVTSTTHKTLGGPRGGIILCNDPAIAKKINSAVFPGQQGGPLGHVIAAKATAFKMAAQPEFAQRQQRCLDGARILAGRLTQPDVAERGIAVLTGGTDVHLVLVDLRDAELDGQQAEDRLAAVDITVNRNAVPFDPRPPMITSGLRIGTPALAARGFSHNDFRAVADLIAAALTATNDDQLGPLRAQVQRLAARYPLYPELHRT

SEQ ID NO: 62866 - protein, 461 aa, Mycobacterium bovis
MTISVFDLFTIGIGPSSSHTVGPMRAANQFVVALRRRGHLDDLEAMRVDLFGSLAATGAGHGTMSAILLGLEGCQPETITTEHKERRLAEIAASGVTRIGGVIPVPLTERDIDLHPDIVLPTHPNGMTFTAAGPHGRVLATETYFSVGGGFIVTEQTSGNSGQHPCSVALPYVSAQELLDICDRLDVSISEAALRNETCCRTENEVRAALLHLRDVMVECEQRSIAREGLLPGGLRVRRRAKVWYDRLNAEDPTRKPEFAEDWVNLVALAVNEENASGGRVVTAPTNGAAGIVPAVLHYAIHYTSAGAGDPDDVTVRFLLTAGAIGSLFKERASISGAEVGCQGEVGSAAAMAAAGLAEILGGTPRQVENAAEIAMEHSLGLTCDPIAGLVQIPCIERNAISAGKAINAARMALRGDGIHRVTLDQVIDTMRATGADMHTKYKETSAGGLAINVAVNIVEC

SEQ ID NO: 62867 - protein, 874 aa, Mycobacterium bovis
MAVVDDLAPGMDSSPPSEDYGRQPPQDLAAEQSVLGGMLLSKDAIADVLERLRPGDFYRPAHQNVYDAILDLYGRGEPADAVTVAAELDRRGLLRRIGGAPYLHTLISTVPTAANAGYYASIVAEKALLRRLVEAGTRVVQYGYAGAEGADVAEVVDRAQAEIYDVADRRLSEDFVALEDLLQPTMDEIDAIASSGGLARGVATGFTELDEVTNGLHPGQMVIVAARPGVGKSTLGLDFMRSCSIRHRMASVIFSLEMSKSEIVMRLLSAEAKIKLSDMRSGRMSDDDWTRLARRMSEISEAPLFIDDSPNLTMMEIRAKARRLRQKANLKLIVVDYLQLMTSGKKYESRQVEVSEFSRHLKLLAKELEVPVVAISQLNRGPEQRTDKKPMLADLRESGCLTASTRILRADTGAEVAFGELMRSGERPMVWSLDERLRMVARPMINVFPSGRKEVFRLRLASGREVEATGSHPFMKFEGWTPLAQLKVGDRIAAPRRVPEPIDTQRMPESELISLARMIGDGSCLKNQPIRYEPVDEANLAAVTVSAAHSDGAAIRDDYLAARVPSLRPARQRLPRGRCTPIAAWLAGLGLFTKRSHEKCVPEAVFRAPNDQVALFLRHLWSAGGSVRWDPTNGQGRVYYGSTSRRLIDDVAQLLLRVGIFSWITHAPKLGGHDSWRLHIHGAKDQVRFLRHVGVHGAEAVAAQEMLRQLKGPVRNPNLDSAPKKVWAQVRNRLSAKQMMDIQLHEPTMWKHSPSRSRPHRAEARIEDRAIHELARGDAYWDTVVEITSIGDQHVFDGTVSGTHNFVANGISLHNSLEQDADVVILLHRPDAFDRDDPRGGEADFILAKHRNGPTKTVTVAHQLHLSRFANMAR

SEQ ID NO: 62868 - protein, 626 aa, Mycobacterium bovis
MTTPSHLSDRYELGEILGFGGMSEVHLARDLRLHRDVAVKVLRADLARDPSFYLRFRREAQNAAALNHPAIVAVYDTGEAETPAGPLPYIVMEYVDGVTLRDIVHTEGPMTPKRAIEVIADACQALNFSHQNGIIHRDVKPANIMISATNAVKVMDFGIARAIADSGNSVTQTAAVIGTAQYLSPEQARGDSVDARSDVYSLGCVLYEVLTGEPPFTGDSPVSVAYQHVREDPIPPSARHEGLSADLDAVVLKALAKNPENRYQTAAEMRADLVRVHNGEPPEAPKVLTDAERTSLLSSAAGNLSGPRTDPLPRQDLDDTDRDRSIGSVGRWVAVVAVLAVLTVVVTIAINTFGGITRDVQVPDVRGQSSADAIATLQNRGFKIRTLQKPDSTIPPDHVIGTDPAANTSVSAGDEITVNVSTGPEQREIPDVSTLTYAEAVKKLTAAGFGRFKQANSPSTPELVGKVIGTNPPANQTSAITNVVIIIVGSGPATKDIPDVAGQTVDVAQKNLNVYGFTKFSQASVDSPRPAGEVTGTNPPAGTTVPVDSVIELQVSKGNQFVMPDLSGMFWVDAEPRLRALGWTGMLDKGADVDAGGSQHNRVVYQNPPAGTGVNRDGIITLRFGQ

SEQ ID NO: 62869 - protein, 84 aa, Mycobacterium bovis
MAKSSKRRPAPEKPVKTRKCVFCAKKDQAIDYKDTALLRTYISERGKIRARRVTGNCVQHQRDIALAVKNAREVALLPFTSSVR

SEQ ID NO: 62870 - protein, 164 aa, Mycobacterium bovis
MAGDTTITIVGNLTADPELRFTPSGAAVANFTVASTPRIYDRQTGEWKDGEALFLRCNIWREAAENVAESLTRGARVIVSGRLKQRSFETREGEKRTVIEVEVDEIGPSLRYATAKVNKASRSGGFGSGSRPAPAQTSSASGDDPWGSAPASGSFGGGDDEPPF

SEQ ID NO: 62871 - protein, 298 aa, Mycobacterium bovis
MLSDDELTGLDEFALLAENAEQAGVNGPLPEVERVQAGAISALRWGGSAPRVIFLHGGGQNAHTWDTVIVGLGEPALAVDLPGHGHSAWREDGNYSPQLNSETLAPVLRELAPGAEFVVGMSLGGLTAIRLAAMAPDLVGELVLVDVTPSALQRHAELTAEQRGTVALMHGEREFPSFQAMLDLTIAAAPHRDVKSLRRGVFHNSRRLDNGNWVWRYDAIRTFGDFAGLWDDVDALSAPITLVRGGSSGFVTDQDTAELHRRATHFRGVHIVEKSGHSVQSDQPRALIEIVRGVLDTR

SEQ ID NO: 62872 - protein, 366 aa, Mycobacterium bovis
MSLLFDFFSLDFIYYPVSWIMWVWYRLFAFVLGPSNFFAWALSVMFLVFTLRALLYKPFVRQIRTTRQMQELQPQIKALQKKYGKDRQRMALEMQKLQREHGFNPILGCLPMLAQIPVFLGLYHVLRSFNRTTGGFGQPHLSVIENRLTGNYVFSPVDVGHFLDANLFGAPIGAYMTQRSGLDAFVDFSRPALIAVGVPVMILAGIATYFNSRASIARQSAEAAANPQTAMMNKLALYVFPLGVVVGGPFLPLAIILYWFSNNIWTFGQQHYVFGMIEKEEEAKKQEAVRRRAANAPAPGAKPKRSPKTAPATNAAAPTEAGDTDDGAESDASTERPADTSNPARRNSGPSARTPRPGVRPKKRKR

SEQ ID NO: 62873 - protein, 347 aa, Mycobacterium bovis
MSAPWGPVAAGPSALVRSGQASTIEPFQREMTPPTPTPEAAHNPTMNVSRETSTEFDTPIGAAAERAMRVLHTTHEPLQRPGRRRVLTIANQKGGVGKTTTAVNIAAALAVQGLKTLVIDLDPQGNASTALGITDRQSGTPSSYEMLIGEVSLHTALRRSPHSERLFCIPATIDLAGAEIELVSMVARENRLRTALAALDNFDFDYVFVDCPPSLGLLTINALVAAPEVMIPIQCEYYALEGVSQLMRNIEMVKAHLNPQLEVTTVILTMYDGRTKLADQVADEVRQYFGSKVLRTVIPRSVKVSEAPGYSMTIIDYDPGSRGAMSYLDASRELAERDRPPSAKGRP

SEQ ID NO: 62874 - protein, 446 aa, Moraxella catarrhalis
MSIQSVVKKIEKNYAHQPEFIQAVQEVAMTIEEAYENNPKFAELKVFERLCEPDRIISFRVNWENDQGKVEINRGWRVQFSNAIGPYKGGLRFHPTVNESVLKFLGFEQIFKNALTGLPMGGGKGGSDFDPKGKSDAEIRRFCYAFMRELHKNIGKDMDVPAGDIGVGSREVNYMFAMYKNLTRKHEGVLTGKGVGFGGSLIRNEATGYGLVYFLDNMLKANDDTLEGKTVLVSGAGNVAQHAAEKALHLGGKVITFSDSQGTLHDDEGFTQEKIDWVKAQKDARKPLSDYVEKFGGEWLPDTKPWQFAADIALPCATQNEVCEQEAKQLVESGVKYVVEGANMPLDAQAIDIVRSHGITYAPGKAANAGGVAVSGLEMSQNSVRQYKSFSELDEKLQGIMKNIHDDLLSAAKEYGKTKDVVDYMTGANVAGFLKVANALVAYGIL

SEQ ID NO: 62875 - protein, 197 aa, Moraxella catarrhalis
MNLTELKSKSVGELLAIAEHMGLDNMARSRKQDIIFAILKTHARYGEAIYGNGVLEILPDGFGFLRSSEGSYLAGPDDIYVSPSQIRRFNLQTGDSIAGQIRPPKDSERYFALLKVSEINFDTPDRSRHKLIFENLTPLFPTQQLVLEAGNGTTEDLTGRIIDLIAPIGKGQRSIIVAPSKAGKTVLLQTIVQAITK

SEQ ID NO: 62876 - protein, 540 aa, Moraxella catarrhalis
  MISC_FEATURE (536)..(536): X=any amino acid
PPCACEDKAIGDIIHLPIGEAWQYYQNLKITGAKGEVADKIFKEIKERLGFLTKVGLEYLTLARSAETLSGGEAQRIRLASQIGAGLMGVMYVLDEPSIGLHQRDNDRLLSTLIQLRDLGNTVVVVEHDEDAIRQADYIIDIGVGAGVHGGRVVASGSAEQVANTTGSLTGEYLSGKRRIEVPTTRQLPKTIEIIKGKKTIQEPLWIHLEGATGNNLKNVHLSIPIGVMTCITGVSGSGKSTLINRTLMPLAATTLNNATTLAPEKYEKISGLEHLDKMVDIDQSPIGRTPRSNPATYTGVFTLIRDLFTQTPEARARGYKAGRFSFNVKGGRCEVCQGDGLIKVEMHFLPDMYVPCDVCHGKRYNRETLEVKYKGKSISDVLDMTVEEAMGFFEPIPAIHRRLEALHEVGLDYIRLGQSATTLSGGEAQRVKLAKELAKRDTGKTLYILDEPTTGLHFHDIAKLLHILHTLRDRGNTVVVIEHNLDVIKTADWIVDLGPEGGSGGGEIVATGTPETVAKNSRSHTGRFLKPMLKXSLLA

SEQ ID NO: 62877 - protein, 137 aa, Moraxella catarrhalis
MLQPKRTKFRKMHKGRNTGLAQRGNTVAFGEIGLKSIGRGRMTARQIEAARRTITRRIKRGGKIWIRVFPDKPITEKPLEVRMGKGKGPVEYWVAEIKPGKMLYEIQGVSEDLAREALTLAAAKLPFKTTIVKRTIM

SEQ ID NO: 62878 - protein, 250 aa, Moraxella catarrhalis
MFFAVISILPEMFSAIKDYGIVGRAVKNGQVNIQVINPRNFTTDNYKRIDERPFGGGPGMVMMAEPLEKAILYAKELAGRAGCDIQNGRCPVVYLSPQGKTLSEPLVATMPNLDGMILLCGRYEGIDERLITCYVDQEISIGDYVLTGGELPAMVLMDSVIRRLPKIMGDDLSAEQDSFVDGLLDCPHYTKPLDFHGQTVPPVLLSGHHTNINKWRFLEQVKRTKARRPELWQNFIPNKQQAKWLKDLED

SEQ ID NO: 62879 - protein, 175 aa, Moraxella catarrhalis
MSVSNIDFDLLEAADIQALSDRGVTLPLHYNQIKHYLPHRYPFMLIDRVTACKPNEWITGYKNISINEELFNGHFPDNPIMPGVLQVEAMAQLSGILGFISAGQTADDGYLYLFAGVDKVRFKKVVTSGDQLVIRSKVLMNKRDIYKFECTAHVDGQLTCSAEIMIARQKVDGVK

SEQ ID NO: 62880 - protein, 83 aa, Moraxella catarrhalis
MLILTRRVGETLMIGDEVSVTVLGVKGNQVRLGVNAPKDIAVHREEIYQRIQHERSMQMHMSHLEQGGNFAPPSFDDDDYFNR

SEQ ID NO: 62881 - protein, 285 aa, Moraxella catarrhalis
MIHPHFDSTNPQKSAPIGIFDSGVGGLSVYRHLSELMPKERYVYYADTQNLPYGNKSGDEILFLTLQAVDWLCRQGCKLIVIACNSASAYSLTTLRIRCRIPIVGLVPAVKPACEMSQTRQIALLATQATLQGQLLAQVIHKVATSKGITVHKHFEPMLVPWVESGMPINHHVADLLIKQTQAWYQQGVDILVLGCTHYPFFRQFLQDWIDEQHITMTLLDSGAAIAQRVKSLLDCFGISADGDVLDEPLTFYASDLTDNVPATARRLSQVPISFVDGNFLPINV

SEQ ID NO: 62882 - protein, 83 aa, Moraxella catarrhalis
MALKITEECINCDVCEPVCPNEAISAGDDIYVINPALCTECVGHYDTPQCVDICPVDCIPKDPKFPETEDELLVKYQKLTSDL

SEQ ID NO: 62883 - protein, 211 aa, Moraxella catarrhalis
MNYQDKFARIVVYCGSNFGDTPAYYHAAQSLGKTLAEHDITLVYGGGNVGLMGTIADSIIAHGGKSIGIIPRFLKDKEVAHHGLSELIITEDMASRKLKMISLADAFIALPGGIGTYEELFEVMSLAQLRQHAKPIGVLNVDGFFNPFLKLLEQTAKAGFMPVSNINLICVADNIPTLLTKMATYRFTESQKWVKPSWMDETSAYTVPKFT

SEQ ID NO: 62884 - protein, 310 aa, Moraxella catarrhalis
MSMATQEGKMWLDGALVEQPDAKVHVLTHSLHYGLAVFEGVRAYQTPDGRTAIFRLQAHTERLLNSAKIFQLNCTYGFDELVQAQKDVVRLNNLASAYIRPLIWVGSEKLGIAAKDNTIHAAIAAWHWGAYLGEEGIKKGIRVKTSSYTHHHPNITMCKAKAASNYPVSILANQEVTRNGYDEAILMDPQGFVCQGSGENLFLVKNGELHTPDLSGGALDGITRRTIIEFAKDLGIKVIERRITRDEFYLADEVFMTGTAAEVTPIREYDDRMIGNGGRGELTEQLQTLYFDVVQGRSDKYQHWLSYIDE

SEQ ID NO: 62885 - protein, 480 aa, Moraxella catarrhalis
RESWSARSGFILAAIGSAVGLGNIWRFPYVSYENGGGAFFLPYLIALATAGFPLLFLDYVMGQKYKGAPPTAYRRFIKSAEGIGWWQVAVCTIIGIYYASVLSWAGNYTLFAVGQQWGEDTEGFFFNTYLQNASELTMAYSSQLLIGLVVVWVMVLLILYGGIKKGVELSNKIFIPLLIVMFGVLVARAVTLPGATVGLDTFFAPNWEKMADPKVWLAAYGHVFFSMSIGFGIMVTYASYLKRNANLTGSGLVVGFANSSFELLAGIGIFSVLGFMAQASGVPVSEVVSGGIGLAFIALPKIISTMGDAGNLVGILFFGSLFIAGVTSMVSILQVPISAVQDKFGWSKNQSVTVIGLGSAIISIALFGSQNAITFVDVIDNFVNNIGIVFGAILSIIWVTWFNRNKLRGLINHINAISSVKVGAIWSFMLTIVTPIALIVTLGLTLKSLLTEGYGGYPANVQLIFGWGVIIICAILALIL

SEQ ID NO: 62886 - protein, 363 aa, Moraxella catarrhalis
MGFNCGIVGLPNVGKSTLFNALTKAGIAAENFPFCTKDPNTGIVPVPDPRLKALAAIVNPERTIPTSMEFVDIAGLVAGASKGEGMGNQFLANIRETDAIAHVVRCFDDDNVIHVDGRVNPLSDIETINTELALADLEAVTRAITNLNKKAKGGDKDAQAALGVFQKIEPLLADGKPARLADLDADEKKLIKSYGLITLKPVMYIANVAEDGFDNNPHLDAVREFANNENAIVVALCNQIEAEIAQLDEEEKAEFLEGMGMSEAGLDRVIRAGYELLNLQTYFTAGVKEVRAWTVPVGATAPEAAGVIHTDFERGFIRAEVIGYDDFIEYGGEKGAAAAGKSRLEGKTYIVQDGDVMHFRFNV

SEQ ID NO: 62887 - protein, 128 aa, Moraxella catarrhalis
MERNYGTGRRKTSTARVFLSKGTGNIVVNGKSLDEYFGRETSRMVVRQPLELLELTDSVDLYITVVGGGINGQAGAIRHGITRALIESDESHKPALKAAGFVTRDAREVERKKLGLRKARKRPQFSKR

SEQ ID NO: 62888 - protein, 165 aa, Moraxella catarrhalis
MGVFSFAKDIGDKLFHRNKKQDAAQPTAAPAATPAEEPTAQEIANLLLARIQAQNVNISGLKVNYNGDTDTVTLSGVAKTQADRERARLAVGNVQYVETVVDNIEVESAEPESRFYTVKSGDSLSKIAKEMYGNANDYMKIFDANKPMLSDPNKIYPGQVLRIPQ

SEQ ID NO: 62889 - protein, 467 aa, Moraxella catarrhalis
MSLFEDLPVQDSISPNHLGERVWQLCLPDLQFAMADKDYRQWIAPLKAEVNDTELLLLAPNMMWVRHVKDNYLSQITDLAYQHGKGVIKSVRIEMVASTIPNDPATKKAKTNKKTSKKTGVVEGLPIDPGFTFDVFIKGKSNASAYNACNELSRKESKHNYGPIFIYGSSGLGKTHLMHAMAHRYQKYGKQFFYFTKDHFYKITLEAFRTNDIVQMEKEICQADLLIIDDVHMVSGSKAPKVTEILMKLFDAFSAGNTQKQVVLASDRPPSQMTSFGERYISRLSSCLQLSIEPPDMEMRIQILEKKAQMLNLLLPRECALYMAQNLPPDVRGLEGALKRVQLSATILRNEPVSLPLVKDAIKDQVQARARALNAENIRDLVAEYYEISPKDLMSKKRARYIARPRQMAMALIRELTRDSFPEIGQVFGGRDHTTVMHACEKIEELRTQDAKIQKDYHSLKMMLEYV

SEQ ID NO: 62890 - protein, 101 aa, Moraxella catarrhalis
MAKKSMINRELKREKTVAKYAEKRAQLKAIISDTNASEEERLDAMLALQALPRNASPVRLRNRCGVTGRPHGYFRKFGLSRNMLRLHVMQGDVPGVRKASW

SEQ ID NO: 62891 - protein, 522 aa, Moraxella catarrhalis
MMILPAILIRQYHSSQTTMSSPIVFHPKTVHPKTNNQNTPLPSEPAYHHKANHNQNRSIDQSGVVATSTLNGTPKIGFVSLGCPKALVDSERIITELTYEGYQVANDYDGADLVVVNTCGFIESAVQESLDAIGEAINKNGKVIVTGCLGKDAEKIRTMHPAVLAVTGAHAYEEVISAVNHHVPKPIKSKEYDPKIDLINDAGIKLTPKHYAYVKISEGCNHRCTFCIIPSLRGDLVSRPIDSVMKEAVALKKSGVKELLVISQDTSAYGVDLKYKTVFWEGWPLKSKFYDMCEAMSKLGIWVRLHYVYPYPHVDAVVQIMADSMTASAGMGGLLPYLDIPFQHASPNVLKAMKRPAMSENTLERIQAWRAICPDIVIRSTFVVGFPGETDEDFEYLLDWLTKARLDRVGCFTYSEIEGAVANDLPNPVPESVKQSRYERLMALQQKISAEKLAEKVGKTLVVLVDEIDTEENIAICRSYADAPEIDGHVYVDNIDATVKAGDMLTVVIDEASDYDLFASFG

SEQ ID NO: 62892 - protein, 852 aa, Moraxella catarrhalis
MNKIYKVKKNAAGHLVACSEFAKGHTKKAVLGSLLIVGALGMATTASAQQKITGSNITNDTSTVGGGDYNEASGTYSTVGGGIDNEAKGDYSTVGGGLTNKAKGNSSTVAGGAKNEANGNYSTVAGGANNKANGDYSTVAGGRKNQATGLNSTVAGGSDNQATGNNSTVAGGYDNRATGTGSFAAGVGNKANANNAVALGNKNTITVQNSVAIGSNNTIDGNDKKDVFILGSNTTDVKSNSVLLGNETAGKVATAVNDATVNGLTLKNFAGVSETSNGTVSVGKQGKERQIVNVGAGQISDTSTDAVNGSQLYALATAVAKNKADITKNTENIKNLEVATLGNHADVQKLKRKQESDIKDVVEMQNAIAEQADINKNHIQDLAKAQLAGVAVMEELDKHVEDLYEATNENLDKISQLDGAVFNNTQNIEDLAAYNELQDAYAKQQTEAIDALNKASDENTQNIAKNQADIANNINNIYELAQQQDQHASDIKTLKNNVEEGLLELSGHLIDQKADLTKDIKALESNVEEGLLDLSGRLIDQKADIAKNQADIAQNQTDIQDLAAYNELQDQYAQKQTEAIDALNKASSENTQNIAKNQADIANNIKNIYELAQQQDQHSSDIKTLAKVSAANTDRIAKNKAEADASFETLTKNQNTLIEQGEALVEQNKAINQELEGFAAHADVQDKQILQNQADITTNKTAIEQNINRTVANGFEIEKNKAGIATNKQELILQHDRLNRINETNNHQDQKIDQLGYALKEQGQHFNNRISAVERQTAGGIANAIAIATLPSPSRAGEHHVLFGSGYHNGQAAVSLGAAGLSDTGKSTYKIGLSWSDAGGLSGGVGGSYRWK

SEQ ID NO: 62893 - protein, 808 aa, Moraxella catarrhalis
MKVGIMGKHFLPIGAIKRILMTNTTTDTDIQIDHQAIYAKLAATHAIKSTQVEAFARLYDEGASVPFIARYRKEHTGGLDDEILRELEKSLIIERDLAARRQKILGLLAAQNVMTDELAERVNTASTKLELEEIYQPYRPRRRSVAARAKLAGLEPIAHAVLAGQSPAEALEGYVSPETLTDDKGETFEADFGDFDKQIVGIQAIILDEWATALDLLDKVRTGFNATASIRSELIGEEKREVGEKFKDYFEHTEPFAKLSNHRLLAMLRGRQQNVLVLHVDGEDEPFIEMIMRHFEIDPKAANGEFLTETAKKLWLVKWRSQIEHRLLTERRLAAEADAIAVFAENLKHLLMVAPTGRKAILGVDPGYSHGVKMAVIDGMGEVLATDTVYPFKPHHKLAEAKDRIETLIKTHQVELVAIGNGTASRESEELVKSIIREASLSTQALVVSEAGASVYSASEIASQELPDLDVSVRGAVSIARRLQDPLSELVKVEPKAIGVGQYQHDVNQTELESSLDKVTEDCVNAVGVDVNTASPAILAHISGLNKNVAQQIVEYRRAHGAFTNREALKNVPRLGVKTFEQAAGFLRIKEGDEPLDATGVHPESYGLVYEILTQHGKSLDEVLGNESLTKALNDSSDNFSQLATVLNELAKPAHDPRGEFRTAKFRDDVNEIKDLKVGMTLEGVVTNVTAFGCFVDVGVHQDGLVHISELSDGFVTNPADVVKPQDIVTVRVISVDEVRGRIGFSMKSEKSAKANQSAKADKADKSANHKPKADRKPARQDKPKSTAKPAKTMGSFGALLQQAGLGK

SEQ ID NO: 62894 - protein, 359 aa, Moraxella catarrhalis
MKESLRHRLDQMVDRFEEVTALLSDPDTISDNKKFRELSMEHSDLSEITTTWQDFVQAEADLQTANELLSDPEMKEMALDEIEGARANIETLEERLNVMMLPKDPNDKATAFLEIRAGTGGDEAAIFSGDLFRMYQKYTQSQGWQVEVLSANEGEHGGYKEIIARVSGIGVYGRLKFESGAHRVQRVPATESQGRVHTSACTVAVMPEVEIDDTVEINPSDLRIDTYRSSGAGGQHVNTTDSAVRITHIPTGVVAECQQERSQHANKEKAMKMLVARIQQAKVQAQIDATSDMRRNLVGSGDRSERIRTYNFPQGRMTDHRINLTLYKLDAIMEGDLTELLDSLLREHHADLMASVGAE

SEQ ID NO: 62895 - protein, 230 aa, Moraxella catarrhalis
MKPAKKATLAKLTLASGIGLASFSAYAAVTVPTYDIEAGKAIVEANCAACHGLDGMSPVPTQPNLGGQNIKYLYKQLVDFKTKARRNGIMEAQLAGLTQQDLANLAGYYASRTPWTPGYGNKATVAEATKLYLGGDKTRGVIPCSGCHDPKGAGNAYAGFPRLGGQHAAYLATQLKLFRAAGREDDVSSDTEVRTNDSAKAGDKGMMQMVASRLSDRDIKILSEYLSALH

SEQ ID NO: 62896 - protein, 146 aa, Moraxella catarrhalis
MGLKLNELSPALGAKKKAFRRGRGIGSGLGKTGGRGVKGQTSRSGSSIPAGFEGGQMPIYRRLPKFGFTSKMAMTTAEVRLSELNKIDGDTVSLDTLKAANIIRGDMKRARIILSGEVGRALTFKGVKVTKGAKQAIEAAGGSVEE

SEQ ID NO: 62897 - protein, 441 aa, Moraxella catarrhalis
MSRQSVSRSSIPLNPFTFVRKYDELWTRMLFLFGALIVYRLGSHIPVPGMNPVSLANFFQSNSNTFLGMFNVFSGGSLERMSIMALGIMPYISASIVVQMMSAIIPSLEALKKEGESGRRTLNKYTRQGTLALAFVQAVGMSTGLIAGGLTLTTGLSFYIPAVTSLVAGSMFLMWLGEQITERGVGNGISMLILASIIASAPGMISQAFSQNLNLIVMLLFVVLGITVIAAIVFIERAQRRVPVNYAQKQQLGRKIYAQQQSHLPLKINMAGVIPAIFASSLLLLPASLGQWTTVSENPTLTQEIIQNITLVLQPGQPLYLLLFGVMIIFFCYFYTALMFNPKEVAENLKRSGAYIPGIRPGQQTKRYLDFVLNRLTFIGAMYMTIICLMPMIIQSVFNVPIPLGGASLLIMVVVLMDFIAQLQAHLMTHQYHDQTIIKSS

SEQ ID NO: 62898 - protein, 198 aa, Moraxella catarrhalis
MLTPKLDKLIKELQVLPSVGQKSAQRMALQLLTKKRTQGLSLAAALETAMHDIKECLQCHSFSDDEICPICLDHRRDDGLLCVVENASDVMAIEQSGAYRGKYFVLGGHLSPIDGINANDLHIDQLIHRIRHEAIHEVILATGATVEGQTTAFFIHDAICTHVPKITRLAQGIPMGGELGYVDSITLHQALQNRSNIS

SEQ ID NO: 62899 - protein, 122 aa, Moraxella catarrhalis
MIQTETMLEVADNSGARRVQCIKVLGGSHRRYASVGDIIKVTVKEAIPRGRVKKGDVMNAVVVRTKKGVRRPDGSVLRFDDNAAVLLNNNKAPIATRIFGPVTRELRSEQFMKIVSLAPEVL

SEQ ID NO: 62900 - protein, 105 aa, Moraxella catarrhalis
MAKLRKGDTVVVIAGKDKGKQGTILAVKADRVKVEGINIVTKHQKPNQMLGKEGGIVKQEAFLHISNVAIYNANTQKADRIAYQVNEDGKKERIYRSTGEVVATA

SEQ ID NO: 62901 - protein, 178 aa, Moraxella catarrhalis
MARLKSLYNDKLKQQIKEELGLENVMQVPKITKITLNMGVGGAAQDKKLLEGALADMTAIAGQKPVVTKARKSVAGFKIREEWPIGCKVTLRGEQMYEFLDRLVAIAIPRIRDFRGFSAKAFDGRGNYSLGIKEQIVFPEVDFDKIDRIRGLDVTITTTAANDDQGRALLKAFGFPFR

SEQ ID NO: 62902 - protein, 132 aa, Moraxella catarrhalis
MSMQDPVADMLTRIRNAQARNKPSVQMPASKLRKSIADLLVAEGYLTSAEVSEAENGKKVLDIELKYYQGKGVIEQLKRYSRPGLRQYRGKDELPSVQKGLGVAIISTSRGIMSDRAAREAGIGGEIIALVA

SEQ ID NO: 62903 - protein, 177 aa, Moraxella catarrhalis
MSRVAKAPVTLPEGTNVTLNDRQVEVKGKNGTLSLSLHELVELKQEDGIVVLSPVVDTKEAWMHTGTVRALLNNMVKGVSEGFERRLQLIGVGYRAQVAGNKVNLSLGFSHPIEYTLPEGVTAESPSQTEILLKSSDKQKLGQAAAKIRSFRPPEPYKGKGVRYSDEVVLRKEAKKK

SEQ ID NO: 62904 - protein, 116 aa, Moraxella catarrhalis
MFDKKSARLRRAKKTRAHIRHLGVDRLTVTRTPRHIYAQIISPTGGVVVAQASTLDATLRSGATGNVEAAKAVGALIAERAKAAGITKVAFDRSGFKYHGRVKALADAARENGLEF

SEQ ID NO: 62905 - protein, 165 aa, Moraxella catarrhalis
MAKVEQTDGLVEKLVAVDRVAKVVKGGRIFSFTALTVVGDGNGRVGFGRGKAREVPAAIQKALEAAKRNMITVDLAGHTLQHPINARHGASKVYMQPASEGTGVIAGGAMRAVLEVAGVQNVLAKCYGSTNAANVVQATFKGLRDMTSPEQVAAKRGKSVEEILG

SEQ ID NO: 62906 - protein, 396 aa, Moraxella catarrhalis
MAKAKFERVKPHVNVGTIGHVDHGKTTLTAAIATVAAKHHGGEAKDYAAIDSAPEEKARGITINTSHIEYDTAARHYAHVDCPGHADYVKNMITGAAQMDGAILVVSATDGPMPQTREHILLSRQVGVPYIMVFMNKCDMVDDEELLELVEMEVRELLSDYDFPGDDTPIIKGSALEALNGSDGKYGEPAVLELLDTLDSYIPEPERDIDKSFLMPIEDVFSISGRGTVVTGRVESGIIKVGDEIEIIGIKPTAKTTCTGVEMFRKLLDEGRAGENCGILLRGTKREEVQRGQVLAKPGSITPHTKFDAEVYVLSKEEGGRHTPFLNGYRPQFYFRTTDVTGAITLQEGTEMVMPGDNVEMSVELIHPIAMDKGLRFAIREGGRTVGAGVVANVKD

SEQ ID NO: 62907 - protein, 191 aa, Moraxella catarrhalis
MTNEILNIIHQRRSIGNLSLPMPNDAELKSVLEAAMVAPDHKQLKPWRFWVLTGETLIEFGQVLLSAAEHEAASCGEILDEVAIKKILNMPLRAPMIIVIATEYQYHKKVPPFEQLLSAGAVAQNMLLALESLGYRSVWRTGPLCNTPEVKDYFGVTKQNTICGLIYTGSSSVQMPDRETVDLSDYVEYRQ

SEQ ID NO: 62908 - protein, 442 aa, Moraxella catarrhalis
MKLRKPNVKNQKVQKIVDAASIGIDDAVSAIKESGLPNKPLISSIAELTGLKKKKSAQLVESMQATEQIASDIHQMSFAFLGGGSFGTAMANLAAKNGCDATLWVRDKRTVKSLHKTRINKKYLPNHKLDERLKFSHDLKTAVAGVDVIFVAVPSSAFREMLTNIKPFITHQAVVSLTKGMEKETFAMMSDIIQEVLPEVNFGVMSGPNLAVEIMDNMPTATVIASASEPLRKAVQTALHSAFFRVFASSDIKGVELGGALKNIYAIAMGMAAAYDVGENTKAMLLTRALAEMSRFGVAVGADPLTFLGLSGVGDLYATCSSVLSRNYRIGYMLGQGISLEHAIKKLGQTAEGVNTILQVHSRAKALGIYMPITHALHAVLYENKSALGVALNLMETGFRSDVEFVLPHDESNVRLSHEFSEVLKTSANAKPKDEIQSSDMP

SEQ ID NO: 62909 - protein, 255 aa, Moraxella catarrhalis
WQSVQLARHAKRPLFLDYVDSLFDEFDELHGDRAFADDRAIIGGLARFNGQPVLVVGQHRGRSTRERIAHNFGMANPEGYRKIIRLVQLADRFGLPVFTFIDTQGAYPGVGAEERGQAEAIAKSIAVFSSLKTPIIATVIGEGGSGGALAIGVADRVNMLENSIYSVISPEGCASILWKTAEKASDASEALKLNATNLYQLQLIDEIVSEGVGAHEAPEPVMAALKNLLTVQLAELHALPIDELLEQRYQRLMQF

SEQ ID NO: 62910 - protein, 346 aa, Moraxella catarrhalis
MLLMTTTIPTLDQPLITLNEQDFLAFADNAIAVIETATDERTLQELRVSLSGKKSALTALSKQMGALDADTKKQYGVYLHELRTHINQALETKAKQLATAAMNAKLASEQIDIGLPARGILSGGLHPITQTTERMKQFFVQAGFSVATGPEIESDYYNFEALNISSHHPARAMHDTFYFDAHYLLRTHTSSVQIRTMENSEPPIRIICPGRVYRCDSDQTHSPMFHQMEGLMISKSSNFAELKGLIHEFLDAFFGKKMTARFRPSFFPFTEPSAEVDILSDNGKWLEVLGCGMVHPQVLKNCGINPDEYTGFAFGMGIERFAMLYYGIDDLRLFFQNDLRFLKQFS

SEQ ID NO: 62911 - protein, 798 aa, Moraxella catarrhalis
MKISENWLRQWANPSINSELLGEQLTMAGLELDGVETVAPPFNGVVIGVVTECQQHPDADRLRVTKVDIGSGEHLQIVCGAPNVCVGLKVAVATIGAVLPSDDNKGFKIKKGKLRGVESQGMLCGASELGLEDEIDGLMELPKDAPIGMDVRDYLNLDAKIFEIAITPNRGDCLSVLGLAREIAAINQMPLNRPVIQPTKVVTDTAPSVQVLDAKACPRYLAQRIDDIDRTWPTPQWMTDALIASGVRSHNFLVDVTNFVLLELGQPLHAFDADKIQGDIIVRMAHSGETLELLNEQIITLSGDELVIADDAGVLALAGIMGGARSAVSDETTSIILESAHFDRLTISGRARRFGLHTDASQRFERGVDFALPKLAIDRAVGLIVSVAGGKVSQMTTAENLDALPVRHKIIVPVGKVSQLLGVDIPSDQMVDMLNRLEIVTTMQQDSLVCQVPSHRFDLTIYQDIVEEIARMYGYANICATLPELSVDMRYDDTADLVQLVKRSLASSGYYEAVSFSFSDAKIEALFDDQSLGTVLPLANPISSDLAVMRRTLMSSLLPIVSYNLNRQQPRVRLFETGLSFVGGDVEHVVQTPSLAMIATGELTTEQSHGTRKMDFYDLKRDIESLLPNTLDKSKVTYERTTLTFLHPGQSAHLMIDGEDLGFFGQLHPSICKALDLPTVWVAQMDLDKLITLNRKSSPIIAPSKFPSVRRDLAVLVDQDVAWQALEKDIRKAAGKYLQDVWLFDIYVGETLPKGKKSLAFAMVFQDQNATLEDEQIKAAVDKVIQNLADKHAAHLRD

SEQ ID NO: 62912 - protein, 553 aa, Moraxella catarrhalis
MAQYIYTMNKVSKLVPPKREILKDISLSFFPGAKIGVLGLNGAGKSTLLRIMAGVDTEFSGEARAATGIKIGYLPQEPQLDPAKDVRGNVEDGVREALDALERLNQIYAEYAEPDADFDKLAAEQGKMEDIIQAWDAHNLNTQLEKAADALRLPPWDADVSKLSGGEKRRVALCRLLLSKPDMLLLDEPTNHLDAESVAWLERFLKDYSGTIVAITHDRYFLDNVAEWILELDRGYGYPYQGNYTEWLEQKNKRLEQEQKQEEAFAKALKQELEWVRKNQKGQQAKSKSRLERFEEMNSREFQQRNETAEIYIPPGPRLGNKVIEVNNISKSFDGRLLYENLSFTVPPMAIVGIVGPNGAGKTTLFNMITGKDTPNTGTVEVGESVKVAYVGQVRDELDDKKTVWEEVSDGLDMITVGEYTTPSRAYIGRFNFKGQDQQKLVGNLSGGERNRLQLAKTLKQGANVILLDEPSNDLDVETLRALEDAVQVFPGTVMVVSHDRWFLDRICTHILSFENEAPEFFDGNYSEYEKWRKERLGADATPKRMKYKKIGG

SEQ ID NO: 62913 - protein, 450 aa, Moraxella catarrhalis
ISVFELFKIGIGPSSSHTVGPMVAANRFLVLLGDRMDSVRQITIELYGSLSSTGKGHATDTAILLGLSGHEPPTIDTTRTEEYLKPIYQEGRLMLGGTHQIAFDANEHLLWDDTPLPEHPNGMKLIAILDDGEQLAQTYYSVGGGFIKDEQQIHLAPSQDTQSAYPYDFDSAEELAALCQAHDLSIADLMLANETALRDIDDVKAYLNDVWDTMQACVTQGCKVDGILPGGLNVKRRAKDLYEQLSKEYGYSGNGGLLAMDWVNLYALAVNEENAAGGKVVTAPTNGAAGIIPAVLHYYRGFIPAFSYQGVREFLLVAGAIGALIKQNASISGAEVGCQGEVGSACAMAAAGLAHVLGGSVAQCLNAAEIGLEHNLGLTCDPIAGLVQVPCIERNAMASVKAINVARLALRGDGSHHVSLDKAIATMKETGMDMMDKYKETAKGGLAIHA

SEQ ID NO: 62914 - protein, 286 aa, Moraxella catarrhalis
MTFALIFAAFSMGLLGSPHCLGMCGGIVAAFGISMKNTSPAKRTLLMLGYHMGRLGSYTILGLLVAALGKHILAPLMANSALPKYLLGGALVFAALLMLGLPVLNRLEKAGLRFWNTLAPLRTKVLPMDSLPKALIAGLLWGFLPCGLVYGALGVALGLASDSQVGLTATTFMVFFWFGTLPMLLATGTVIAWLKSKIHAFNLRKFSGVVMLISGLAIAFSIPIMHKLHGDHAEHGHHHHHHYHTSDEHIHDQVGHHSHQHHGEAPAHNHDHSSHSDRSHSHSYHH

SEQ ID NO: 62915 - protein, 276 aa, Moraxella catarrhalis
MELISCHKMFDGEHRRYRHVSKAVQSEMTFAVYLPKQALKGACLPVLYYLSGLTCNDENFSTKSGAQQYAAKYGIILVIPDTSPRGETVPDDEAYDLGQGAGFYVNATASPWSVHYQMYDYIVDELPRLIEKNFNVGQKAICGHSMGGHGALQIGLKNPDAYASISAFAPIVNPSKTPWGQKAFTAYLGEKESDWCEYDSTYLVAKATKAPPIYIDQGLADDFYPNQLQPEQFVAAAQENGINVELNLHDGYDHSYFFVASFIEVHIKFHANHLNA

SEQ ID NO: 62916 - protein, 123 aa, Moraxella catarrhalis
MSNKHPLVQVVENAQLKDHPSFAPGDTVVVQVKVREGDRERQQAFEGVVIAKRNRGLNSAFTVRKISSGVGVERAFQLHSPLIASIEVKRRGDVRRAKLYYLRERSGKSARIKEKLGVRKTAE

SEQ ID NO: 62917 - protein, 472 aa, Moraxella catarrhalis
MAGKTLYDKLWDDHLVRQRDDGSSLIYIDRQLLHEVTSPQAFEGLALNGRTPWRLSANIATPDHNVPTSLMERKQGMAGIADDTSRIQVKTLDDNCKSFNVMQFGINDIRQGIVHVVGPEQGLTLPGMTVVCGDSHTATHGALGCLAHGIGTSEVEHVLATQCLVAKKMKNMLVRVDGKLGKGVTPKDVVLAIIAKIGTAGGTGYAIEFGGQVFCDMSIEGRMTVCNMAIEGGARVGLVAVDDKTIDYVKDRPYAPTGDDWERAVTYWNTLHSDDDAHFDAVVVLNGDEIEPQVSWGTSPEMVIAVSQNVPTLDMARDDVQRNDWMRAYQYMGLTAGQPLSDIVLDRVFIGSCTNSRIEDIRAAAEVVKGHKVAPSIKQAMVVAGSGLVKAQAEQEGLDKIFMDAGFEWREPGCSMCLAMNADKLQAGEHCASTSNRNFEGRQGNGGRTHLVSPIMAAAAAIAGHFVDVRTF

SEQ ID NO: 62918 - protein, 389 aa, Moraxella catarrhalis
MQVYLVGGAVRDAVLGLPITDKDFMVVGATPQVLLDLGFIQVGVDFPVFLHPKTQAEYALARIERKSGVGHTAFQVHADPSVRLEEDLIRRDLTINALAIEVKGLFDETPMTGKVIDFYGGLTDIQNRTLRHVSPAFSEDPLRVLRVARFFARFAPLGFSIHDSTAKLMQDIAKSGEMSSLSRERLYSEFVKAMRQPQGDQFIACLHQLDILPFILPTLAQHFNTPQNRQRTFTRLALACTLNLPIFSHFAMLLSDLPKDDLSDCLNRLNAPKSIRQFIQTFNHFHDTFIALPNISGNALLELLERTQAHKDSTKLIQLYDACHAYQGSPLSYPKQWLFDAITCYQSIGIADIDPTLTKKAIGDALSYLRCQALHKLLSNFQKTSVAGL

SEQ ID NO: 62919 - protein, 124 aa, Moraxella catarrhalis
MATTNQLIRKGRTTIKEKSKVPALQACPQRRGVCTRVYTTTPKKPNSAMRKVCRVRLTSGYEVSSYIGGEGHNLQEHSVVLIRGGRVKDLPGVRYHTVRGALDCAGVKDRKQGRSKYGAKRPKA

SEQ ID NO: 62920 - protein, 157 aa, Moraxella catarrhalis
MPRRRVVAAREILPDPKFGSQTIAKFINHVMVDGKKSVAEKIVYGALEAVVAKKNIQDPVAFFEEVLENVRPTVEVKARRVGGATYQVPMEVRPSRRTALAMRWLADAASKRSEKSMALRLAGELNDASEGKGAAIKKRDDVHRMADANKAFSHYRF

SEQ ID NO: 62921 - protein, 708 aa, Moraxella catarrhalis
MARTTPISRYRNIGISAHIDAGKTTTSERILFYTGVSHKIGEVHDGAATMDWMEQEQERGITITSAATTAFWSGMGNQFKEHRINVIDTPGHVDFTVEVERSMRVLDGACMVYCAVGGVQPQSETVWRQANKYKVPRLAFVNKMDRTGANFFRVVEQMKTRLGASPVPIVIPIGSEENFTGVVDLIEMKSIIWDEASQGMKFEYGEIPADLVDTAEEWRTNMIEAAAEASEELMDKYLEEGELSKEDIVAGLRIRTLASEIQPMLCGSAFKNKGVQRMLDAVIEFLPAPDDVEAIKGILDDKAETEASREASDEAPFSALAFKIMNDKYVGNLTFVRVYSGVVKQGDSVYNPVKMKRERIGRIVQMHANEQKEVEEIRAGDIAALVGMKDVTTGDTLCDNDNIITLERMEFPEPVISLAVEPKTKADQEKMSVALGRLAKEDPSFRVRTDEESGQTIISGMGELHLDIIVDRMKREFNVEANIGAPQVAYRETIRQSVEVEGKFVRQTGGRGKFGHVWLRLEPLDPTGDVEYEFNEEIVGGVVPKEYHAAVDKGIQERMKNGVIAGYPVVGIKATLYDGSYHDVDSDELSFKMAGSMAFKKGFLQANPALLEPIMKVEVETPEDYMGDIMGDLNRRRGMVQGMDDLPGGTKSIRAEVPLAEMFGYATQMRSMSQGRATYSMEFLKYQETPKNVADEIIKKFTAKDDDE

SEQ ID NO: 62922 - protein, 375 aa, Moraxella catarrhalis
MPALRKDIDPEGLLEFSVVYTDRALNHMSVQFQQVMKDLSFELKSLFQADALAIVPGSGTAGMEAVARALATDQDAVIIRNGWFSYRWTQILEAIGVAKSSHVFKACLQEGKNGQFVPADINEVTAYIKEHRPGVVFAPHVETASGMMLSDDYIRALAEAVHLVGGLLVIDCIASGCIWLDMKALGIDVLLSAPQKGLSSTPCAGLVMLSQAAKEAVLSSTPSSFSLDLKAWLNIMMAYENGGHAYHATMPTDGLKQLRDTLLEAKQIGYDNLKQAQIKLGQEILATLHKKGVHSVADPSAQAYGVIVCHALSDEIHKGAAFAKAGVQIAAGTPLQVGEPSDYKSFRIGLFGLDKLTDIEGTIERFKRAVDQVFV

SEQ ID NO: 62923 - protein, 212 aa, Moraxella catarrhalis
MVIGLVGKKCGMTRVFTEAGVSIPVTVVEVDANRISQIKTVDTDGYNAIQITTGERRDSRVTAAQKGHFAKAGVAAGRGVWEFRAEESDLEGREIGGNILADIFEVGQLVDVTGQSKGKGFQGGVKRHNFRTQDATHGNSVSHRVLGSTGQNQTPGRVFKGKKMPGQMGNKRVTVQGLEIVSVDAEKGVLVIKGAVPGANGGDVIVRPSVKA

SEQ ID NO: 62924 - protein, 200 aa, Moraxella catarrhalis
MNLKTVTGAAVELSEITFGREFNEALVHQVVTAYLAGARQGTRAQKTRGEVSGGGKKPWRQKGTGRARAGSIRSPIWVGGGRAFAAKPQDWSQKVNRKMYRGAMQCILAELVRQERLVLVDDIAVSAPKTKELIAKLAELNAPRALIVTHEVDENLYLAARNIPYVNVLGTREVDPVSLVSFDKVIMTVEAAKQFEETLA

SEQ ID NO: 62925 - protein, 109 aa, Moraxella catarrhalis
MSNARLYQVLKAPVFSEKSQRLGDTLGVQVFKVDSTATKREIKQAVELMFEGVEVVKVNTLNTKGKTKRFGRVVGKRSDVKKAYVTLKAGSDVQIGAGEEATGETATNE

SEQ ID NO: 62926 - protein, 275 aa, Moraxella catarrhalis
MPIVKAKPTSPGRRFVEKVVHPHLYKGRPYAPLVESKAKTGGRNNNGRITTRHIGGGHKQHYRLIDFKRNKDGIPAVVERIEYDPNRTAHIALLKYADGERRYIIAPKKLSVGDQVQSGEGSPIRPGNCLPLKNIPVGTVIHNIELKIGKGAQIARSAGAAVQLLGRDGAYVIVRLRSGETRRIHANCRAVIGEVSNTENNLKSLGKAGAARWRGVRPTVRGTAMNPIDHPHGGGEGRNFGKHPTSPWGQKAKGLKTRSNKRTDSMIIRRRRAKK

SEQ ID NO: 62927 - protein, 91 aa, Moraxella catarrhalis
MPRSLKKGPFIDAHLFAKVENALESNSRKPIKTWSRRSMILPQMVGLTISVHNGRTHVPVIVSEQMVGHKLGEFAPTRSYRGHGVDKKSKR

SEQ ID NO: 62928 - protein, 109 aa, Moraxella catarrhalis
MEVTAKLRGAAISAQKVRLVADEVRGKPIERALDILTFSNKKGAKLVKKCLDSAIANAEHNNGLDIDKLRVTTIYVDEGITLKRIMPRAKGRADRISKRTCHITVKVGE

SEQ ID NO: 62929 - protein, 240 aa, Moraxella catarrhalis
MGQKVHPIGIRLGVIKKHNANWYANPKQYSEYLLNDFQVRNFLRKKLEGAMVSHIYIERPTGAAKITIHSARPGIIIGKKGEDIESLQKELTKLMGVPAQVNIQEISQPDLDARLVAEGIASQLERRVMFRRAMKRAVQNSMRSGAQGIKVELSGRLGGAEIARTEWYREGRVPLHTLRADIDYASVRAETTYGTIGVKVWIFRSEVLDGMNSAYNPVVEDKTRAPKRRGRSNRRNTDRG

SEQ ID NO: 62930 - protein, 95 aa, Moraxella catarrhalis
MTITTEDILDCANLSRLALDEKTAQNYAGNLDKILAMMDILDGVNTDNIKPLANIHEACNELRADIANSDIDRDGFQAVAPMVQDGLYLVPQVIE

SEQ ID NO: 62931 - protein, 492 aa, Moraxella catarrhalis
MTDLHHLSVHELADGLKNKQFSSHELVEHFANRINRLDGQINSFITKDFDNALAQAELADKLRAKGDNRPLLGVPMAHKDNLCTKGVLTTAGSKMLYNFVSPYHATVVDNIANSGFVSLGKLNMDEFAMGSDNESSYFGAVHNPWDTTRVPGGSSGGSAAAVAAGFVPVATGSDTGGSIRQPASFCGITGIKPTYGRVSRYGMIAYASSLDQAGAFGKSALDCAYLLAPMTGYDPKDATSISRPSEDYVADILATATDGKPLAGKKIGIAQAYFGAGLDDEVEKSIRAALATYEALGAKIVEVDITDPAITLATYYLLAPAEASSNLSRYDGVRFGYRYENPKDLHDLYTRSRSDGFGEEVQRRIIMGTYALSAGYFDAYYTKAQKVRRLIVDDFKKAFEKCDIIASPTAPTAAYKLGESLDPASIYLGDVYTIGVNLAGLPALSHPVGQANGLPVGLQLIGKHWAESELLKTAHIYQANTEFHQEMADLVK

SEQ ID NO: 62932 - protein, 73 aa, Moraxella catarrhalis
MAKKDDIIEFEGEVIDTLPNTLFKVRLDNGHEIIAHISGKMRKHYIRILTGDKVKVEMTPYDLTKGRITYRGK

SEQ ID NO: 62933 - protein, 224 aa, Moraxella catarrhalis
MMTHPFLTMITREWQIKRQGTVQWLYPLVLFLLIITLFPLAIGNEPKLLLRLAPSAVWIAALLALVIGVDDLFRSEFDNGTLAQMVVAKSPLIIWVLARLLVHWLFSAGVVAILSLLVIILFEMPFGEAGILMVSIFVGSPILLGLSAIASSLTLTLKNGAVLVPLIALPMQLPVLIFATGAVDLYATELNGLPTLALLAAGSIITVLVTPWVVASVLKMAWAD

SEQ ID NO: 62934 - protein, 274 aa, Moraxella catarrhalis
MLLKGQRFVVTGIASKLSIAWAIAESLHREGAQLILTYPNDKIKKRVDMAAEAFDAVAVIECDVGSDESIQVCFDEIAKHWGVGDDKGIDGIVHAIGFAPADQLDGDFTQATTREGSQIAHDISSYSFVALAKAGRELLAARQGSLLTLTYEGSISVLPNYNVMGMAKASLEASVRYLASSLGGEGIRVNAISAGPIRTLAASGIKSFRRMLDVSEKIAPLGRNVSQEEVGNAALFLLSPWASGITGEILFVDAGFNTVAISEKIMMMAGDGEQ

SEQ ID NO: 62935 - protein, 534 aa, Moraxella catarrhalis
MITEHLVDISRLQFATTALFHFLFVPLTLGMTWLLVIMEAVYLITGKQIWKDMTRFWGKLFGINFVLGVTTGITMEFQFGTNWAYYSHYVGDVFGAPLAIEGLMAFFLESTMVGLFFFGWDKMSRLQHFTTTLLMALGTSLSALWILVANGWMQNPVGAEFNYDTMRMEMVSFAEIFLNPDAQNKFVHTVSAGYVTGASFVLGISAWYLLKGRDVALAKRSFHVAAAFGFAAICSAIVLGDESGYSIGQAQQTKLATMEAMWETEPAPAGFNLIADINEAEQKNNWSLHIPYVMGVIGTRSIDTEILGIQDIKKLNADRIINGVTAVSALDLMRQNKLNGIKNPQALIDIFEEHKKDLGFGLLLKKYTDDMAKITPQMLSKAVDDSIPRVTPMFWSFRLMVGMGVLMLILYGLCLFFSLKGSFIHKPWLLKFAMIMIPAPWIAIEAGWFVAEYGRQPWTVYGILPTHLSVSNIDAGHVILSLAGFVLFYTILGIVEVFLMVKYVRLGPASLGTGRYDGEKTQVHLICPSDEQGV

SEQ ID NO: 62936 - protein, 259 aa, Moraxella catarrhalis
MRLTKTIKEAIHAHAKICYPAECCGLIIDGQFYPCDNITPNPYEHFEIDPKDFARAESMGQIQAIVHSHPDGNAEPSEVDRVQMGIHGIDWVICAFGYHADGKEYFDVKCHKPKAYQAPLLGREYHHGVQDCYSLVRDYYSRELDIHLPDFHRTDGWWEDENHEPLYENNFTKAGFIKMQDKNDLQKHDVILCRVGRTHHVNHALIYVGDGKLKSETTPDCVGNALILHHPHGGLSVREIYGDNWQRRTAMVVRHQSLG

SEQ ID NO: 62937 - protein, 323 aa, Moraxella catarrhalis
MQIIFLDSHHLPTLPPLALTIGNYDGVHLGHQALLSALADDAKAMGLLPAVMVFEPQPREYFSPDNPPARLTNLTEKAEQITQLGVQYLIVASFDDAFRSLSAAAFVDLLHSLNVSHLVLGDDFRFGQDRVGDKAFLQAAGFSVDNLPSITQNGVRISSSLVRQALAVGDLNAAKSMLGRSYGITGVVEHGDKIGRTLDFPTANVSLGRLKPALHGIFAADVIAYQNGVRLDWASLGQGGVMGLKQGSLFGAVSIGLRPSVGGKQWRLEVHLPDFNGELYGVTLWVVFTHFLHGERHYDGVDALKAGITNDVVALLAWRDDQG

SEQ ID NO: 62938 - protein, 380 aa, Moraxella catarrhalis
MRSTSITIHPNALTHNLQIIKSQLDRTTKVLAMVKADAYGHGIDATIPALIHADGFGVACLSEAMAVKQVLDGMNHKKPIVLIEGAFSLDEWKVAIDHDFGCLIHHENQLIWALSHRPKQDQFCHTIWLKYNTGMSRLGFNDDHIITAAKSLADAGYRLILTSHFACADDKSHPLNAQQISKFDQALACIRSFAPDTLASLCNSAGIFNFKHQHHDWVRAGIALYGSKPITDQSAKALNLMPAMTLSAQVMAIHTLAAGDSIGYSALWAAQKPHQIAVVSIGYGDGYPRVVMGAKVSVTDTSGNRHLCDIIGRVAMDMFMIDIDGLDIAINTPVVLWGDSPTIDEVAMCAGTIGYELMCRLTTRPKRCIMDTYLPKNEFK

SEQ ID NO: 62939 - protein, 505 aa, Moraxella catarrhalis
MVQFKFFYGIFSSRILSLFIAITKHKSYLYDLLHKPNTDMTNTNDKKDSLLTLQPPHSIEMERSLLASLMSINDSFEDIENIINANDFYGERHKKIFDAISHLARVNEPYDSIMVHDYLSRIGQLVSAGGEDYLITINQSTANYFNLINYAEKVREMSVYRQLISSANHMLNLAYHPKKQTITEILDTIESDIFRIGESFAKGSSKTGPQRIDDVMANVVTQLNDIRLRPNGLIGLDTGFIELNNKTLGFQNGNLIILAARPAMGKTALALNFAQSALMSNKAVAIFSMEMPAESIAMRMLAAWGSIDMKRLMSANMNEDEWGRFMNGVTLLQDKHLYIDDRSDLSPSEIRATCRRIAKNHPDGLGFVLIDYMQLMRVPGMGDNKVNEMGEISRSLKALARELNCPVVALSQLNRKVEDRPNKRPLISDIRESGQIEQDADLILFVYRHHYYHQDKDDIKHLAEVIIGKNRQGERGKVPLKFIGEYVRFDDLIPGDMPEDYDIDE

SEQ ID NO: 62940 - protein, 337 aa, Moraxella catarrhalis
MPSLHEMMTAIEKYQSVLNKDDIDGSIKITGVANLSAATKHQVAFLAKAKYLDELNQTNAGVVLLSEQFINEARTINPKCLYVLVKDAYLAYACVSTLFTPSCVTGIHRTAIVADSAVIGNQVSIGANAVIGEKVVLADGVVVGAGVIIGERTQIGAGSQIDAATVIHHDCIIGEQTRIHSHANIGSEGFGFAPVATKDGRQWQRIAQLGRVIIGNHVRIGSHTCIDRGAVDDTVISDDVIIDNLVQIAHNVHIGCGTAIAANCGIAGSTKIGKNCLIGGAVGISGHLTITDDVTITSMSMVIANIQKSGSYSSGTVAMPSLKWRRAAARFRQMGEK

SEQ ID NO: 62941 - protein, 440 aa, Moraxella catarrhalis
MFSSLWQALSEHPEFIAMLTIPPVTAFVTWAHVWMALEMLFYPIKFWGIRIFGLPFSLKGVGWQGIVPAKAGKISGIIVDQTLSKLGSLDEFFQAMEPEEMAEFITATVDKNLESLIDEIMLERSYTLWTHTPYAIRRRIYAHAHSHLAAIMKSLVMDLTYNVESLVDMREMIVTKMENDRKLMVDMFLRVGKKEINFIWKISALIGFGFGVLQMAIFYFVPQHWTVPFFAMIWGALTNWIAIWMVFNPVEPKTVPFVRLFRYEMVDHQKRIVWMHPHWHKYSWQGGFMKRQDEVSTVFAEIVVNELVTLENIMNEMMYGRRADKTRELVKSHLYEMLEDPIVATSLKVGMDKRSLDTFKDTIIDKSIDATMVPIRDPKLNVSRANKIFGLFESRIRALTPKEFQNLLRPAFQEDEITLIILGGITGFLAGWLHLVIVFF

SEQ ID NO: 62942 - protein, 575 aa, Moraxella catarrhalis
MNIQAILNDEIKKAMIAAGAGSEVEALVRQSNKIQFGDYQANGIMGAAKKLGMNPREFAQTVLDHLSIDDIAEKLEIAGPGFINIFLKNEWISRHANQANISRTLGVNTAQNDTVVVDYSSPNVAKEMHVGHLRSTIIGDSVVRTLEFLGNTVIRANHVGDWGTQFGMLIAYLEKVQNDDVKDLDLSDLEAFYRAAKHAYDSDEAFAKKSRNYVVKLQSGDEYCLTMWRKLVDITMAQCQHTYDRLNVTLTRDDTMGESLYNPMLPSIVQTLKDKGLAVEDDGAVVVFLDEFTNKAGDPMGVIIQKKDGGYLYTTTDIAAAAYRYHTLHADRVILFTDARQTLHAQQAWLITRKAGFVPDEFVMEHFTFGMMLGKDGKPFKTRTGGTVKLADLLDEAIERATTLIKQKNPDLSAEEKRAVVEAVAIGAVKYSDLSKNRNTDYVFDWDNMLSFEGNTAPYMQYAYTRIRSIFARAGLDMADIGGEIVIHEDKERALAVKLLQFEEVLLLVAKDGMPHLLCQYLFELAGIFSSFYEAYPILSSDDKTKTSRLRLAALTAKTLKQGLQLLGIKTVEKM

SEQ ID NO: 62943 - protein, 392 aa, Moraxella catarrhalis
MNAYRLSDIAQSYGKAPKDIKVIVGMSGGVDSSVSAVLLQQAGFHVEGLFMKNWEEDDGSEYCTAMTDLADAQAVADKIGIKLHTANFAMEYWDNVFEHFLAEYQAGRTPNPDILCNKEIKFKAFLDYASGPQFGLGADFIATGHYARRGFSQDGKAQLLRGLDTNKDQSYFLHAVGGDKIAKTLFPIGELEKPQVRAIAQKYDLITANKKDSTGICFIGERKFKDFLQQYLPAQKGDIYTDDGIKIGTHDGLMYYTIGQRGGIGIGGVANRPEEPWFVLHKDLTNNRLIVGQGHDHAMLQSDELTAYKLDWGIAPPAQIFGKQGFRCTAKTRYRQSDQDCTVFALDETGDTVKVVFGDAQRAVTQGQSVVFYDGDICLGGGVIDGTNAKIY

SEQ ID NO: 62944 - protein, 442 aa, Moraxella catarrhalis
MILLLFFVKIISHLSKFIIPMLHQNPPKYSFNHQKIIIIALAYVGVITGAGLSSGQEIFQYFASFGKMGMIGVVILGILHAIFGGIILALGSFYRANEHSQVLDNIAGPWVKKLLDWSLIISGFTLGFVMIAGAGANLNQEFGAPTWLGAALCSLLVIGISMLNFEKVTAVIGIFTPIVVFIIFALTLYTFVGKSYDWDYLDRIALSEPQIFPNAWLSLINYYALCIMTGASMAFVLGGKTMYVGEAARGGFLGGALIGLISACTAFTIFANIDLILDADLPMQLLVANVHPWLGTLMSFIIFAMIFNTAISLYYSLAKRFSGDDNQRFKWILIGLVLVGFILSFAGFKKLVSIMFPIIGYIGMLLLVVLLLAWIKNHKKIKTERINRRHIYALMQKKLDDSQSFNKTDEKQLNKLIENSVINDQEIKQDMTQLVKDNLDKS

SEQ ID NO: 62945 - protein, 276 aa, Moraxella catarrhalis
MAMAKFYQYFNRTLVASDDRMDDRAFAFGDGFFSTIGVRQGQILFAQLHHIRITHGLTIFKLNLDVDEMMTCLSKLAHQMTEGIIKIIITRPRQSMRGYGFLSVQPAQVLIKVMPLAIYQGVSFIKGVPIQPTIPRQMVCLTHKLSHRPPHLAGIKLIGATEQIFAHAELLYHQSMDDGILDGLVGNVHGEWICATMGNVFYRLGQNWYTPLVDKSGVLGVMRCAVIQSGLLGDVKERLFTNADLDFVNGLITTNAVRGITAMSMLNGRQLTHLFG

SEQ ID NO: 62946 - protein, 462 aa, Moraxella catarrhalis
MNTSPTSNVARLQRNLGLWHVIIIGLAYIQPMTLLDTFGVVSRDSSGHVPMSYIFALIAILLTSVSYGHMIRAYPSSGSAYTYTQKSINPSMGFMVGWSSWLDYLLSPLVNIILAVIYLEALFPAVNHWVWVIGLTALMTGVNLFGSKAVAYFNSWIVFVQLAVIAVFVFLTYNALSAGQNADGIISPENAYHLWSMAPFWDSMTSVAALITGATILCFSFTGFDALSTLAEETKDAKNTLPKAMILTTLIAGVVFIISTYFMQLYFPNHPETYFKLIDETQPEILEAVGGAVFKAVVLGFAIVTVMASGISAHAGVSRLMYVMGRDGVISKNIFGKIHPTLFTPVNNILIAGVVALTAGFVTFESVINLISFGALTAFSFVNISVLFHYVFRNKYVHNAKDVLSYIIVPIAGFISVFLMWLKVDKLTFEVGLFWAAIGFIWLGIKTRGFKAPVPQFKEEDV

SEQ ID NO: 62947 - protein, 1946 aa, Moraxella catarrhalis
MPNPTARGGDSCATGQVGSVCTLSFARIAALAVLVIGATLSGSAYAQGIAIGQQNNNSKGDAEATGNQSVALGEKAVASGSQAIAIGGSQNKSNNSKVSGANAKGEESIAIGGDVLAQGPASIAIGSDDLYLESKGLYTLPEEIKKLIEKHSELNRIRKLDPNSNQKYLHTKAQGHASIAVGTMAQAEGHFANAFGTRAIAKGNYSLAVGLTAKADTESSIALGSNAQASKFAAIAIGGNTKSELGRGVALGYNSQITANDNNLNGAYKPDGETLHKDHEATKNGQPKNTVDIFSIGNSDLRRRIIHVGAGVDATDAVNVAQLEAVVNWAKKRKITFKGDDSTGVQKGFDEELTIKGGRANAGELTDNNIGVVKDNDNGGGLKVKLAKNLTDLEAVNTQNLTATGAITVNNNSTTNTATLLAGGLTVKDIHNKQIQVSADGIKFTDMNGGTSAPVAAGTTRITRDTIGFAKEGGTVDDNSPYLDNAKLKVGNVEINKDTGINAGNQKITGLTDGADDADAVTIKQLKNAKPNLTPGNGIEINNTNSLLVDAANGNVTPPSYTIGVKTTTLTNNGPSDSKFAVKDSNTHNNSLVTAKDLAGYLNEVNRTADSALQSFTVKGGDAASNNSITLDKTSNSLTVAGDNGITVKTDTTQKKVTVGIDQANGLTTPKLTVGSNSKTQLVIEQMVIGNDTKNIIKGLSSTLTDITNTDNTHTTEQDNDAQGKESNAASIKDVLNAGFNLQGNGKPVDFVSTYDTVNFANGDGTTATVTYNYNEGKPTSTVVYNVNVDDTTIHLANNNGNKKLSVKTTTLTKTNGANGNATKFSANNGDALVNAKGIADNLNILAEEIHTTKGTADTALQTFKVKKDGATNDDDTITVGKNAVDTLTFKGENGLTVATKKDGTVTFGINTQSGLKAGDNTTLNKDGLSIKNPTGNEQIQVGADGVKFAKVNNNGVVGAGIDGTSRITQDKIGFAGANGSLDTTKPHLSKDGINAGGKKITNIQSGEIAKNSHDAVTGGQIYDLETELKNKISSTAKTAQNSLHEFSVADEHGNNFTVSNPYSSYDTSKTSDVITFAGENGITTKVNKGVVRVGIDQTKGLTTPKLTVGNNNGKGIVIDSKDGQNTITGLSNTLANVTNDGAGHALSQGLADNTDKTRAASIGDVLNAGFNLQGNGTAVDFVSTYDTVNFADGNATTAKVTYDDTSKTSQVVYDVNVDDTTIEVKDKKLGVKTTTLTSTGTGANKFALSNQATGDALVKASDIVAHLNTLSGDIQTAKGASQANNSAGYVDADGNKVIYDSTDNKYYQAKNDGTVDKTKEVAKDKLVAQAQTPDGTLAQMNVKSVINKEQVNDANKKQGINEDNAFVKGLEKAASDNKTKNAAVTVGDLNAVAQTPLTFAGDTGTTAKKLGETLTIKGGQTDTNKLTDNNIGVVAGTDGFTVKLAKDLTNLNSVNAGGTKIDDKGVSFVDSSGQAKANTPVLSANGLDLGGKVISNVGKGTKDTDAANVQQLNEVRNLLGLGNAGNDNADGNQVNIADIKKDPNSGSSSNRTVIKAGTVLGGKGNNDTEKLATGGIQVGVDKDGNANGDLSNVWVKTQKDGSKKALLATYNAAGQTNYLTNNPAEAIDRINEQGIRFFHVNDGNQEPVVQGRNGIDSSAAGKHSVAIGFQAKADGEAAVAIGRQTQAGSQSIAIGDKAQATGDQSIAIGTGNVVAGKHSGAIGDPSTVKADNSYSVGNNNQFTDATQTDVFGVGNNITVTESNSVALGSNSAISAGTHAGTQAKKSDGTAGTTTTAGATGTVKGFAGQTAVGAVSVGASGAERRIQNVAAGEVSATSTDAVNGSQLYKATQSIANATNELDHRIHQNENKANAGISSAMAMASMPQAYIPGRSMVTGGIATHNGQGAVAVGLSKLSDNGQWVFKINGSADTQGHVGAAVGAGFHF

SEQ ID NO: 62948 - protein, 345 aa, Moraxella catarrhalis
MALVSLRQLLDHAGEHSYGLPAFNVNNLEQMRAIMMAADKTDSPVIVQASAGARKYAGAPFLRHLILSAIEEWPHIPVVMHQDHGTSPAVCQRSIQLGFSSVMMDGSLREDGKTPADYEYNVAVTREVVKMAHACGVSVEGEIGVLGSLETGMAGEEDGVGAEGVLDHSQLLTSVEEARQFVADTNVDALAIAVGTSHGAYKFTRPPTGDILAIDRIKEIHEALPNTHIVMHGSSSVPQEWLKIINENGGNIGETYGVPVEQLVEAIKHGVRKINIDTDLRLASTGAVRKFLNDHPAEFDPRKYLTASMKAMEEICVARYEAFGAAGNASKIRPISLEKMVDYYQ

SEQ ID NO: 62949 - protein, 717 aa, Moraxella catarrhalis
MIYQGKNIQVDFFDQTQGIVQFHFNATDESVNKFDRKTTQEYQEAVTVLENRDDIQGLIATSGKSVFIAGADITEFTEYFSRSKDEIEAWLLDINHIFNRFEDLPFPKVAAINGAALGGGCEMALVCDYRVAGISAQIGLPETKLGIFPGFGGSVRLPRLIGIDNALEAIATGKAYRPDEALKLGLVDAVVADELLEQAAADLVKKCLLGKFDWQAKRQEKQVPVKLNQLEQAMAFNSAKGVIFAKANPKHYPAVAIALETIEKHANLNRDDAIALEAKGFTKAATTPQAAALVGLFLNDQTVKKLAKKHSQNAQTIKQAAVLGAGIMGGGIAYQVAVKGLPIIMKDIQAKQLDLGMNEAGKLLSKEVLRGKSTPAKMAQTLSHIRPTLNYGDFGEVDIVIEAVVENPTIKEAVLSEVESLVKQETILASNTSTISITRLANALKRPENFVGMHFFNPVHRMPLVEVIRGEKTSDIAIATTVALAQKMGKTPIVVNDCPGFLVNRVLFPYFGAFDLLVKEGADFVSIDKTMEKFGWPMGPAYLLDVVGMDTGVHAAKVMAEGFPDRMKPDYKGATQLMFEHERLGQKNGVGFYQYETDKRGKPKKIADSTTYELLNLVQTGDQTFDEQEIIDRMMIAFCNETVRCLEDNIVASPAEADMAMIMGVGFPPFRGGPCRYIDQIGVANYVALCDKYAYLGKAYEAPAKLRDMAQNGETLY

SEQ ID NO: 62950 - protein, 390 aa, Moraxella catarrhalis
MTTLSPKDVVIVDGVRTAMGKTKNGMFRHVRADDLSAKLILALIVRNDIDPSELEDVIWGCVNQTLEQGWNIARYAALLAGVPKTVAAQTVNRLCGSSMQALHTAAAQIMTNQGDMFIIGGVEHMGHVSMMHGVDPNPKASKHYAKASNMMGLTAEMLGRLNGITREEQDTFGVHSHKKAWAATQAGRFDNEIVGVEGHDSEGNLQLCTVDEVIRPDANLEAFQALRPVFDPKNGTVTAGTASALSDGASAMLIMSAQKAKDLGLKPRARIRGMAVAGCDAAIMGYGPVPATQKSLKRAGLNLSDIQTIELNEAFAAQGLSVLKGLDLLDKQDIVNHNGGAIALGHPLGCSGARITTTLLNVMEQQDTQLGLATMCIGLGQGISTIIERI

SEQ ID NO: 62951 - protein, 440 aa, Moraxella catarrhalis
MINEFDTAHLWHPYTSMTNPLPALPVACAKGCQIHLQDGTVLIDGMSSWWCAIHGYNHPVLNAAITEQLTKMSHIMFGGLTHEPAIKLGQLLLSIVPKPLQHIFYADSGSVAVEVALKMAVQYQHALGKTTKNNIMTTRSGYHGDTWNAMSVCDPITGMHQIFGDALPSRIFVDAPTIKIDDPWDDAAMDDIRLAFKRHHKNLAAFIIEPIVQGAGGMRFYHTNYLRQLRKLCDEYGVLLIFDEIATGFGRTGRLFACQHAKVVPDIMCLGKALTGGYMTLSAVLTTTKVAHTISHGKVGAFMHGPTFMANPLACAVALASVQLLLQSPWQYHVRRIARTCRMTLTHLKQLPHVADVRILGAIAVVEMTDPVDMAIIQQECVARGIWIRPFGRLVYLMPPFIISDDELATLLHEFTDLICTTLSPNFKKQSMNPIINEDE

SEQ ID NO: 62952 - protein, 400 aa, Moraxella catarrhalis
MMNDQLLNFYAEQLSALKASHNHRQLQRLKHQGQRIGVNDSKPLLNLASNDYLGIASQTSLYEEFLELLHEQRWPFSASSSRLLTGNFENFERLETKMASLFGRPCLLFNSGYHANIGILPAICDDKTVILADKLVHASIIDGMQLAAKHGTKTIRYQHQNLPQLEGLIQKYQSDNGICRIIVVTESIFSMDGDITNLSHLSHLKAQYPKVMLYVDEAHAIGVRGGRGLGCVEEYGVINQVDFIVGAFGKALASVGGYCICHPILRDYLINKMRPLIFSTALPPINIAWSCFILEQIPLMNQRRKHLMKLSDDLSKVVHLAKLPCPSASQIIPIILGDNARTLNAAADLGRQGYHVLAVRPPTVPKGQSRLRICLNSTINDDTMTKFTQVLTQIVRGESK

SEQ ID NO: 62953 - protein, 569 aa, Moraxella catarrhalis
MNIQALLPRWVLQLIQHPRTALSDIPAGLMMAVLVIPQSLGYATLAGLPPIMGLYAAITPVIVYAWIGASSVSSIGPVAITAIMTASALSGYATGSLQYISLAIVLAFMVGGILLIAGLVRLGWIMQFVSRGVASGFISGAAVLIIFSQLKHIIGIPLNTDSLINLFLSIYTSNQPIHLPTALLGIGATLLFIISRYGEAMIWGWLPAQWRGFGNRFFVILIVATSIWLSHHIGFEQMQIRLLQPLPTGLPKITLPNFSVTTLLDLLPSALLIALIAFISSSTISAQQARIRGESYDANKELGGLGLANITSGLFGGFAVSGGISRTSLNLSVGAKTPLASIICALGVLLILLVFGQYLTGLPYAILAAVIISSVISMIDTKTLINAWQLDKSDAICFGITFFTSILFGLNSGLVVGLLASFAMMIYRTHQVHIAIVGRVGDSEHFRNIERHTATTFDGLLLLRIDESLYFGNAQSVHANLMRLSDDTNIHDIVLIMTAVNHIDLSAQEMLCAFNQSCIKRGQHLHLAEVKGPMMDILKTSPVIENLSGCIFLSANQAVQSLTKPSTDL

SEQ ID NO: 62954 - protein, 89 aa, Moraxella catarrhalis
MMLTNKDREAVIAKYQRGENDTGSPEVQVALLTARINDLQDHFKAHKADHHSRRGLIRMVNQRRKLLDYLKGKDLNRYTDLIGSLGLRR

SEQ ID NO: 62955 - protein, 695 aa, Moraxella catarrhalis
MFNPIRQEFQYGNQQVVLETGRIARQANSVLVHMGGVSVLVAVVVRPEAIAGQNFFPLTVNYQEKMYASGKIPGGYGKREGRASEFETLTSRLIDRPIRPLFPEGYFNEIQVTATVISSDKTQDADIAAMIGASAALAISPAPFNGPIGAARVGFINGEYVLNPTLAEMKQSDLDLVVAGTKSAVLMVESEAKELSEDQMLGAVLYGHGQQQVVIDNINTFAQAVGNTKQEFVAPAINEELNTQLKEQFTAKVSEAYTITVKQDRYARLDELAAEALVLAGDETSDDYADKVAQIKELFETLKYRTVRDNILSGKPRIDGRDLETVRALDIQVGVLPYTHGSALFTRGETQALVVTTLGTTRDVNLVDTLAGTKQDHFMLHYNFPHYSVGETGREGAPKRREIGHGRLARRGVQAMLPAAERFPYTIRVVSEITESNGSSSMASVCGASLSLMDAGVPLKAPVAGIAMGLVKEGERFAVLSDILGDEDHLGDMDFKVAGSVNGITALQMDIKIEGITADIMEQALKQAHAGRIHILNAMNEVIATSRTEINAHAPNYATITINPEKIRDVIGKGGATIRQLTEDTGATIDIDDNGTIRIFGTDKASTRAAITQIEAITAEVEVGTVYEGTVARIVDFGAFVTILPGTDGLVHISQISDERVENVSDYLKEGQTVKVQVQDIDNRGRIKLTMKGVE

SEQ ID NO: 62956 - protein, 223 aa, Moraxella catarrhalis
MSQFTLNGVARAESQQGKGASRRLRKDNLVPAIIYGGNDEAVAICVKTNEIVKALSNESFFSSVITINLDGAEHEVIIKALQRHPSKGFPLHIDFQRIVRGQTMNFNVPVNIINEDSSVGKKEGGILTILVNDIEVNCLPRNLPEAIEVDVANLAIGDSIHLSDVTLPNEVTLVTHDEADLNRTIATMQPPAVIETADDAEASTEETTEAEVAPADAEETTEE

SEQ ID NO: 62957 - protein, 395 aa, Moraxella catarrhalis
MNKMLPNLADRAIFNLGFRIFFASAAVYAVISMVLWLFVYRGGVFSAHMSIAPQYWHGHEMVFGYSMAVVAGFLLTAVGNWTGKTMPSGQQLYLIWLPWLFARIIFIVLPQFLWLGVLADIVFTILFLISITKPVIKTKQWRQMGILSKIILMLIANLFCLAATLGWHIGWYYALYLGAFVIIGLVLTIGRRVTPFFISRGVGYAFEPRNNHYIDRISLISFVIFFLLEVFASQQLLASLCALVCALVQAWRLQGWYTQGIWKKPLLWSMFISMACIVFGQLMYFLRIFQFGITNSLAMHMMAVGGIGILSLSMMARVSLGHSGRSIHQPPKTVPWAISLLSVATVFRVILPWLMPQHLVIWIIHAQILWLIAFFLLSVSYMNIWRTPRIDGRAG

SEQ ID NO: 62958 - protein, 736 aa, Moraxella catarrhalis
MSDKSPNPHFSPEQVHEITEQFAISGMTCQSCATRIEKVLSKKSAIHQATVNFATEVLHISYDANQTNRDEVMAWVAKTGFEAVPMADRQDQHKMPWDLMILWGLSLPFWVGMLGMLFGSHALMMPVWIQFILASVVQVVFGARFYLGAWASIRGGLANMDVLVALGTTAIWAYSSYVWLTDLHAMHMVYFEASVMVIAFVRLGKYLEHRTKTQSLNSLGLLTQLIPTEVNRRIDDKWVKTNIEHIKVGDVLLANTGDKIAVDGVVQGGFGVCNESHLTGESLLIDKNIGDTVYAGSSVEDGSIHYQAAATGTKTQLGDMMSALQDAQGTKADIARFADKVAAVFVPVVVALAMMSFLVNYLLGAEFDIALMRGVAVLVIACPCALGLATPAAIMAGMGTAARHGVWFKDAVSLESAGGIDTIIFDKTGTLTLGHPSVQKIQCLSSKINKSQALELTASIEQYASHPLANALVEAAKDKNLPLYEVSDIQSTTGQGLMGYVDGIGQLKVGTPKFIGLETWQADDQWSDTSLVGLAIDDEPMAVFGLSDTLKADAHSIISRIHHDGIKTYLMSGDRQSVVDGVANQLGITAAFGQMSPRDKMSAIETLKTQGKRVVMVGDGVNDAPAMAASHASFAVGSATGVAKHTASARLLGDSLNHIFYAYRIARMTLTNIKQNFFFALVYNCIGIPLAAIGLLNPMMAAAAMALSSISVLLNAMRLKRVQLTPNDMHSDKSVG

SEQ ID NO: 62959 - protein, 322 aa, Moraxella catarrhalis
MSQTVNTTTQQTAPKKLVEVKDLEISFGEGKKRFVAVKNANFFINKGETFSLVGESGSGKTTIGRAIIGLNNITGGQIIYDGKVISNQPKDAELICKIQMIFQDPAASLNERATVNYIISEGLYNFKLYKDDADRLAKIKQMMAEVGLLPEHLTRYPHEFSGGQRQRIGIARALVMDPEFVIADEPISALDVSVRAQVLNLLKKMQREKHLTYLFIAHDLSVVRFISDRIAVIYKGVIVEIAETEELFKNPIHPYTKSLLSAVPIPDPILERKKQLIVYDPTQHDYSSDEPGMVEIKPNHFVWANKQELERYQQHISNQTVV

SEQ ID NO: 62960 - protein, 301 aa, Moraxella catarrhalis
MTKLYQRTVAKAITATGIGLHSGKKVTLTLSPAKPNTGIIFERTDIGATVPMAAELVQDTMMSSNLVLGDARIGTVEHLLSAIAAYGLDNLIIQVDAAEIPIMDGSAAPFLYLIDQAGITEQDELKKFIKIISPIEVNDGDKWARLEPYDKGFLLDFEIDFNHAAIAATEQTTQLDFNTANFAAEVGQARTFGFLKDIEYLQKNNLALGGSLDNAVVLDENSVVNQDGLRYPNEFVRHKMLDAVGDLFVIGHPLLAKFSAYKSGHALNNALIREVLVDKSCYEIVTFYDKKSCPINYVAAV

SEQ ID NO: 62961 - protein, 118 aa, Moraxella catarrhalis
MARIAGVNIPDNKHAVISLTYIFGIGRTTAKQILAAVGIEETTKIGSLDDSQLDAVRAEVANYTVEGDLRREVSMNIKRLVDLGCYRGLRHRRGLPVNGQRTKTNARTRKGPRKAIKK

SEQ ID NO: 62962 - protein, 130 aa, Moraxella catarrhalis
MAKDTRSRKKVARRSVSEGIAHIHASFNNTIVTITDRQGNALAWATSGGQGFRGSRKSTPFAAQVAAEVAGKTAQETYGVKNVDVLVKGPGPGRESAVRALGALGYKINSISDVTPIPHNGCRPPKKRRV

SEQ ID NO: 62963 - protein, 213 aa, Moraxella catarrhalis
MARYIGPKLKLSRREGTDLQLKSGVKPYDVKTKKAGRVPGQHGNSQNKTSEYASQLREKQKVKRMYGVLERQFSNYYKEAARERGATGENLLVTLERRLDNVVYRMGFGATRAEARQLVSHRAIMLKKAGRDEFVRVNIPSIQVQDGDVIAVHEKSKEQLRIKNAVELATQRGIPAWLEVDHSKLQGTFKSAPERSELPAEINENLIVELYSK

SEQ ID NO: 62964 - protein, 334 aa, Moraxella catarrhalis
MTNATEFLTPSAINVDTVNETTAKVTLEPLERGFGHTLGNALRRILLSSLSGAAVVEAEIEGVDHEYSTLEGLQEDVLDLLLNLKSLAIILHDQNEAYLTLDKRGAGVVTAADLELPHNVEIANPDLVLGTLSERGHLKMRLHVVTGRGYEPANQRREDANSKIIGRLKLDASFSPIIRVAYDVENARVEQRTDLDKLIIELETNGTIDPEEAIRKAATILQQQIAIFVDLEAEEAPEPIKEKEEIDPVLLRPVDDLELTVRSANCLKAENIYYIGDLVQRSETELLKTPNLGKKSLTEIKDVLASKNLELGMRLDNWPPSDLRVDDRFSYRSR

SEQ ID NO: 62965 - protein, 119 aa, Moraxella catarrhalis
MRHRKSGVKLGRTSSHRKAMFQNMTNSLFEHELIKTTLPKAKELRRVAEPLITLAKEDSVANRRLAFSRMRNKDMVGKLFSELGPRYQTRPGGYLRIIKCGFRDGDNAPMAYVELVDRP

SEQ ID NO: 62966 - protein, 240 aa, Moraxella catarrhalis
MTKISMKTMTVKPWHSALMIIVLIAIFGLLTNYLLNNETVKPIVIEPNQLTKSQFGALQQAIEPIGKVQFFGADLVKIHQTISQLTWVESANVQRDWNNGVVVSVIARKPIANFGSDRLLDADGVVYEPAESSQLMNPNLVNLHGQDTESQQIMQKLKRINTWYAPLDVQVQDLILTPRQTWIIRFNNGMRIMVDHEDAEQKLYNLAIQLQSALANDFGRIDSVDLRYKNGFAIAWRNQA

SEQ ID NO: 62967 - protein, 432 aa, Moraxella catarrhalis
MTLQAVIHISSTAVCTVVGYFETKGLEKHLRVSAVGLAHTDAFFGGRVDHREYLLSAIHKSVREASDMAGLQIISPVLCMASAMMNMQNMSNEVNIDTADRMVTPEHIRQATQAMSDQIISQDRAPFQMNRQLIFLEDYHVQDAKGLMTDKICVASHVIDMPTNQLKQMISLVEQDDLQVASCLFDGIAGAEYALSEDEKQAGVCFIDIGAGMTKVCIYKDGILIYSHCLDMGGVTVDMDIAKECGILLADADSFKRQEGTLNRHKYSSGAVVTYKRHTKHEKTMLRRELNQVIEARYRKLFDKVIDEIDASLLVSLDAGIVLAGGGSSMDGLLDFTRNHIGMKVRLITNNPRVKLDPERLSDDNIKLLNKHLCDNTLHTAIGALLFMGSAQYARDQQTQEADELDDSWMTERVSMISQLFGQFNGGIKPGF

SEQ ID NO: 62968 - protein, 907 aa, Moraxella catarrhalis
MSTVKVPHIFYQKRTLSLAIASIFAAVVMTGCRSDDISVNAPNVTQLPQGTVSPIPNTGHDNTNNTNNQGNNTDNSTSTTDPNGDNNQLTQAQKTAAAAGFFVMGKIRDTSEKNDPDYTKDLQGSVHTAGQGLQYLGTKEPRPDGTGTGKNLRQPITADDITPLYFDKFPKISDLHLENSEHVFDAKKANNIKIYGYGALSSPAKNPTYMNYQQEQNIKNKKPGDDYQNIRFGYMELRELDLNKKGADTQSDKNRAIIFTTPTLFYHGENASTHLPKAGKFDYEGNWLYLTDVKKRPFLDKTDDKVGTYFNSTRKSNEGDLVSAAHIYLNSFKYKHTPATYSVDFDQNTLKGKLSYYDNPNKQTADGRYIRSQFDTDKKVNEADVYEIDAKINGNRFTGTAKSLIDDNTNTAPFVKELFSKKANPNNPDPNSDTLEGGFYGESGDELAGKFLSNDNATFVVFGGKRDKTTEPVATKTVYFSTGFEKPSTSFVGNEEIGSIIDGKKLNDEVNNQIEDETVPVSNKEYYEYNYGRPNKQFTKKINASVQKNPAYFGQHDKFYFNGNYYDLSAKEANKLGVSQDTSTNKSILAKYPDAKVSTDNKVTKIVLQQAKDKPYTAIHAKSYDHISFGEVLYNDNKGNPTRSYFVQGGQADVSTQLPSAGKFTYNGLWAGYLTQKKDKGYSKDEDTIKQKGLKDYILTKDFIPQDDDDDDDDDSLTASDDSQDDNTHGDDDLIASDDSQDDDADGDDDSDDLGDGADDDAAGKVYHAGNIRPEFENKYLPINEPTHEKTFALDGKNKAKFDVNFDTNSLTGKLNDERGDIVFDIKNGKIDGTGFTAKADVPNYREEVGNNQGGGFLYNIKDIDVKGQFFGTNGEELAGRLHHDKGDGITDTAEKAGAVFGAVKDK

SEQ ID NO: 62969 - protein, 158 aa, Moraxella catarrhalis
MLKVASIFEPILTGDDRPKLLHDYPVVHVQPIAWGDMDGFNHVNNVAYYRYAESARIAYMRAIGFMAAREDLLTILASSSIQYRRPVTYPDTLLIGVRIKHLGSTSVVQEYAMYSQAQQALVASGEAVIVRTDMNMVKMPWSDEERALIERFENRRFD

SEQ ID NO: 62970 - protein, 1051 aa, Moraxella catarrhalis
MSRFFIHRPIFAWVIAILIMLVGILAINNLPIEQYPKIAPPQVKVRAVYPGADAETVENSVTQIIEQQMKGIDGLMYMSSNSSAAGSASVTLTFENGTDPDTAQVQVQNKLQSAMSSLPETVQRTGLNVEKSASDFLMVTAFVSEDGSMDQSDIADYVATSIVDPISRVEGVGGTNVFGSSYAMRIWLDPAKLRAYNLIPSDVSSAIRSQNVQVSAGQLGTLPTNTDRVVINATVSVQSYLQTPEQFEDILLKTDTAGAQVRIKDVARVELGSENYQFRAQYNGQAASGLAIMLAPGANALEVREAVGVRLDELSQNFPTGLKMVVPYDTTPFVRLSITQVVYTLLEAVVLVFLVMFLFLQNWRATIIPTLAVPVVILGTFAVLSVFGYSINILTMFAMVLAIGLLVDDAIIVVENVERILEENPSIQVMDATIQSMREISKVVIGIALILSVVFVPMIFFGGSSGVIYRQFAVTLMTSMALSAFIALVFTPALCVTILKRQAHKDINIQTGFFGWFNRFFYQTSRRYENFIGKTYASKLAYLAVYTGIVAVMALIFMRLPSSFVPEEDQGAVMTLVQLPAGSTLDKTNAVMDKLANYYHDKETDNIESVFTISGFGFMGSGQNSGMAFIKLKDWDERAGSENTAQSIARRAMVMNMMIPEASLIFPIAPPPIQGFGNTSGFDLQLKDVGGVGHEALLDARNQLMGMAMQNPAIASIRPGGQEDAPKLKVDINQAQAAAYGVPLTAINDTIAQAWGGSYVNDFIDRGRIKKVYIQGEPDSRVVPEDSNRWYVRNQSGEMVSFGAFSGSQWEYGSPSLARYNGVSSMVLTGSAALGVSTGDAMEAMAQMASQLPAGIDFEWTGLSLEQQKSGGQAPILYALSILVVFLCLAALYESWSVPFAVILVIPLGVIGSLLLTKIHGLANDVYLQVALLTVIGLSAKNAILIIEFAKEIQESGQTLKASIMMAARMRLRPIIMTSLAFGVGVVPLYIATGAGSGSQNAVGTGVLGGVLTSTFLGIFFIPMFYVWVRTLFPYKPKAQPVTHAKSHEHV

SEQ ID NO: 62971 - protein, 299 aa, Moraxella catarrhalis
MYFMSYSMTKSIRHRNKVMTFDVPKVMGVLNMTPDSFSDGGRFNHLDAALVHAEQMIAYGVDIIDIGGESTRPHAPKVSTDEELERVIPIIAAIRENFGEDLWLSVDTSDPAVMLQAIGAGADIVNDVRGLSREGACDMVADLECPVVIMHSRGTPDTMTQTMNELTSYNDVLAEISTELQIRIDKAMDAGIRQEKIIIDIGMGFSKNYEHHIQIMQNLQQIIQHFQMPMLFGVSRKRFLGEVLTNSGLEYLKNHQPIERDNLGTLAHFIALQQGVHIVRVHDVKPMAQAVRLWQALYG

SEQ ID NO: 62972 - protein, 246 aa, Moraxella catarrhalis
MPRFFVDTPLTTNLIGQIIALPDHVTHHWCKVLRASVGDCAFLFDGMGGEYTVTLTHIHKKSASVKIDAYHPINRTPPFRASIGLVMSRGDRMDYAIQKATEMGVHCIHLLTSDRCQAHLKYDRDFKKLTHWQSVAVAACEQCGMNIIPNIIAPILLDEWVANCQDELKLVLALSENNPTFNKLVPKNISLLIGAEGGLSPREIDLAIHHGFVPWQIGERVLRTETAPVVALSALTLLASLNQSPL

SEQ ID NO: 62973 - protein, 82 aa, Moraxella catarrhalis
MVVIRLARGGSKKRPFYQVVVADKRASRDGRFIEKIGFFNPMARGQEVETRIDLEAYNAWIAKGAQPTERVASLVKALNKAA

SEQ ID NO: 62974 - protein, 168 aa, Moraxella catarrhalis
MIKIATLKKPYGIKGWLWVFSQTDERASIFQMQPWWMKTATGFKPLTVKDWRIQGQGLVACFNEVPDRNVAETMNGTSIWVCKDHLPKLADDEYYWSDLIGLTVMNEQAENLGVIKEMFETGAHEIISLKPTAQSIDNEPRLIPWHSDVVLSVDLSAGTMLVAWQSDY

SEQ ID NO: 62975 - protein, 498 aa, Moraxella catarrhalis
MNQPTNQSTTQPSSIPLNCPNLLKQACLIDGEWVGADSGETIAVTNPFTGDVLGTIPSLSKQTVLNAVECADAAQESWANTTASERAKLLHAWADLIDTHKEDLALIMTYEQGKPITESQGEIDYANSFIRWFADEGKRIYGDVIPSTNQSLRYVVLKQPVGVCAAITPWNFPSAMIARKAAPALAAGCTMIIKPAVETPFSALALGYLAKQAGIPKGVLQIVTGKSSVVGEVLTKDPRIHKLSFTGSTEVGRVLMEQCASTIKKLSMELGGNAPFIVFDDADLEKAAEGLIASKYRNAGQTCVCANRIYVQSSIKDEFLAKFKQKVEVLKVGNGADEATDIGPLINQQALKKVQALLDDALNKGATLITGGVPHDASQLSFTPTVISDITDEMDLAHEEIFGPIAPIMTFEDEKEVIHRANDTIYGLAAYFYTQSHARAWRVSEALEYGMVGQNTGLLSTEVAPFGGVKQSGFGREGSKYGIEEYITTKYWCMDISE

SEQ ID NO: 62976 - protein, 215 aa, Moraxella catarrhalis
ILTPLLMLFFSFHMMVMGLLVVWGNLPVQNSAFMLWHRLSGGRVTQIWVDYDHIAKSAKQAAIASEDGKFVAHYGFDFDSMQKAMHRNESQGAVSVGGSTISQQLAKNLFLTSHRSYVRKAEEAIIVVMMETLWSKQRILEVYLNVAEFGEGIYGIEAASRHYFGRSAANLSRDQAALLISLLPNPKYYGKRPNAKRLKNKQRIIMRRMNGVQIP

SEQ ID NO: 62977 - protein, 127 aa, Moraxella catarrhalis
MMRSRYSAFVIQNIDYIVQTTLPALQPLLDVAALKAWAEQTWWTYLKIISTTPKIGKRHAQVHFCAYFEELGVQGCHNECSAFVKINENGQNRWYFLDPTLPITLSGKQPCLCGSGEKFKVCCGKFL

SEQ ID NO: 62978 - protein, 368 aa, Moraxella catarrhalis
MAGNTIGQLFTVTTCGESHGTGLMAIVDGVPPGLKLDAKDLQCELDRRKPGTSKFATQRKEEDKVEIISGVFEGHTTGTPIGLLIYNTDQKSKDYGNIANTFRPNHADYTYTMKYGFRDYRGGGRSSARETAMRVAAGAIAKKYLKERLGIVIRGHVTQIGTQKAHALDWDLVNTNPFFCGDKDAIPRFEALVTSLREQGTSCGAKLEIFAENVPVGLGEPVFDRLDADIAHAMMSINAVKAVEIGDGFDVVAQFGHESRDELTPDGFTGNHAGGILGGISSGQRIRVAIALKPTASITTPGKTINLAGEAVDVITKGRHDPCVGVRATPIAEAMLAMVILDHYLRHRAQNADVVPPIEPINKPATSY

SEQ ID NO: 62979 - protein, 302 aa, Moraxella catarrhalis
MMDKITISLDDISVRYNNGHTALYDVSLHLQGGTTCALVGINGSGKSTLFKVLMGLIKPQTGYVKLCDLTIAQALKKNLVAYVPQSEEVDWQFPVSVLDVIMMGRYGHMNFLRRPKPKDYQKIDEAMSRVQINHLANRQISELSGGQKKRVFLARALAQESKILLLDEPFTGVDVKTEKAIMNLLDELRQEGHLILISTHNLGTVPEFCDQVIMINRTILAMGSTKSTFTQANLEKVFGGVLRQLHLVGEDLHDDDDKRTLTILADDEIPAVFYGHHQNRSSYHRKNVKSSENPQAEQEDKS

SEQ ID NO: 62980 - protein, 320 aa, Moraxella catarrhalis
MTTQNSALAARLSRQKRLDGAFVWTTKLSALLVLLTLGGIMLSLVFGAIPSIREFGLNFYTSSNWDPVAGQFGALAPIYGTIVTSIIAVVIAVPVSFGIAVFLTELCPNFLKKPLGIAIELLAGIPSIIYGMWGLFVFAPWFGDTVQPWLINHLAGLPIIGQMFVGAPIGIGLFTAGLVLAIMIIPFIAATMRDVFLVVPDLLKESAYGMGATTWEVVTKVVLPYTKAGVVGGLILGLGRALGETMAVTFLIGNTFNINTSLFTSGVSITSALANEFAEASSEMHLSSLLHLGLILFVISFIVLSASKLMLMKIDKRVEK

SEQ ID NO: 62981 - protein, 279 aa, Moraxella catarrhalis
MNTLNQSLNPTMNTAFTNSNTDDKTLSQTAAKVQVRNLDFYYGDYKALKNINLDILDKKVTAFIGPSGCGKSTLLRTLNRMYDLYSGMRATGEIILDNQNILDSRVDVNLLRARVGMVFQKPTPFAMSIYDNVAFGVKLYENLSKSELDDRVEWALQKSALWNEVKDKLKKSGLSLSGGQQQRLCIARSVATRPEVLLLDEPTSALDPISTGAIEELIHDLKQDYTIAIVTHNMQQAVRCSDFTAYMYLGDMIEMGETSQIFNNPQNQATADYIAGRHG

SEQ ID NO: 62982 - protein, 349 aa, Moraxella catarrhalis
MMKYSAVDFGLLVENLTDGIVVMDMSRLIIEYINPAAKSLLAITSNDTHAPILPSMIFKNSVFKKLYDIYQDQSLPSSFYQNHPTIIGNVLNLSLMRLVDNRCAVIIKDYTHMQQLEQMRTDFVGNVSHELRTPLTVILGYLENFTLTDDIKPAWMRGLKLMHEQAIRMNDLINDLLMLSRLESDETKPMAEVNMPRLLMQVFDQASASNQAGHLIDIHLDTDKNILGIEAYLYSAIINLVLNAIKYTPSGGMIDIIYEEDDGDVHLSVTDNGIGIGGEHLGRLTERFYRVDSGRSRATGGTGLGLAIVKHVLNKHNARLEISSEEGVGSMFRIIFPKIQTISTQTLST

SEQ ID NO: 62983 - protein, 303 aa, Moraxella catarrhalis
MIVRDKSNSFKLLFAWRGTVLPKVLPTILGIMVLSFIAGFVAQFQWYYIATVPAVGFTMFGVIISIFLGFRNNACYDRWWEGRKLWGALVANTRHLSRDSHLLAPNERESLLYQMLLFVAILRDRLRGQNIQRSQFGYTKIDDHYLDWLDQQINAPQRVLEAMQQQLIKLVQQGQMSDVIYMTIQKHVIEMGGIQAGCDRIHSTPLPFPYSALLHRAVYCFCWALPFGLQAVMGFWTPLLVGFISYLLLGLDELARQLEEPFGFDHHDLALDMMVRMIERETLMLMDKPLPKPWEIDKNFNMS

SEQ ID NO: 62984 - protein, 386 aa, Moraxella catarrhalis
MNYSVFTSESVSEGHPDKMADQISDALLDAILTQDKDARVACETLVKTGAVVLAGEISTHANIDVETIVRNTVNKIGYNHSDLGFDGSTCAVINMIGKQSPEIAQGVDRQRPEDQGAGDQGLMFGYATNETDVLMPAPIQLSHRLMERQAQLRKDGTLPWLRPDAKAQVTLRYDEHHQPLAVDALVLSTQHNPDISQKQLQEAVMEEIIKKVIPSQLLHKDTLYHINPTGKFVIGGPVGDAGLTGRKIIVDTYGGMARHGGGAFSGKDPSKVDRSAAYAGRYVAKNIVAAGLAERCEVQISYAIGVAEPTSISVNTFNTGKISNADIIKLIRTHFDLRPYGITGMLNLLQPMYEITASYGHFGRQGVDTAFTWEKTDKAQLLRSAL

SEQ ID NO: 62985 - protein, 893 aa, Moraxella catarrhalis
MKTMQSNEVRQAFIDFFVSKQHTHVPSSSLIPHNDPTLLFTNAGMNQFKDTFLGLEKRDYVRAVSSQKCVRAGGKHNDLDNVGYTARHHTFFEMLGNFSFGDYFKKDAIAFAWEFLTDEKWLALPKDRLYVTVYHTDDEAFDIWHKDIGLPQERIIAIGDNKGGAYQSDNFWMMGDTGPCGPCTEIFYDHGEHIWGGLPGTPDEDGDRYIEIWNCVFMQFNRQKDGTMQPLPKPSVDTGMGLERISAIMQGVHGNYETDIFTKLMTKAVNIIGLPTDTDIQNEPSLKVLADHIRSVAFLIADGVIPSNEGRGYVLRRIIRRAVRHGNKLGATDAFFYQLVHPLADIMGDAYPQLRHEQHKIEQAILKEEEQFAKTLSQGLKLLSQELDSLQQGDVLAGETVFKLYDTYGFPADLTADIVREKGITIDEAGFELSMAEQRTRAREAGKFAMDYHALIQVDSATEFLGYERLDNDSTVIHLYQDGKAVDTLAEGDEGVLILDKTPFYAESGGQVGELGEISTESGVFDVLDTQKSGQAIIHHGVVKMGHINNNQSATAQVASQVRASSAKNHSATHLLHAALRTILGDGVSQKGSMVSSDLLRFDFSYDKPLTEQNISQIEIMVNQQILANTPAHVEILDIDSAKNKGAMMLFGEKYGDTVRVLSMGTTDKDGKPFSIELCGGLHVTRTGDIGLFKIISEQGISAGVRRIEAVTGMGAVNYVQQGDKQLNQLANQFKAKRHEIAQRVAQLSDKNRHLEKQIERLNQKLASLHANSLTDNLKDIHGQKVLIATVNGMDNKALRTLSDDMKSKLADGIVILASVYTADGEDKIAMTASVGKHLTSKIKAGDIIKYLSENLGGKGGGKPDFAQGGATDVANLPKLMTGLTDWIGEKLG

SEQ ID NO: 62986 - protein, 236 aa, Moraxella catarrhalis
MDAMITIDDNQLLTNYRLIKQALNTANDQAVQMNPTHRPAKLIAVSKTKPVAMIQTLFHQGQQDFGENYLQEALGKISQLSQLPIIWHYIGSIQRNKTRDIAKHFDWVHTLEREIIAQRLNEQRAGMQPLNVLIQINIDDESSKSGCKPTELPTLIEQIINYKNLNLRGVMVIPSQQTVDAFARTKVLFDAIARRFDLPNWDTISMGMSGDMTQAVAHGSTMVRVGTAIFGERDHR

SEQ ID NO: 62987 - protein, 259 aa, Moraxella catarrhalis
MTTMRSHDAIRDFQFTKDSLKDKIILVTGAGDGIGKVAALTYAKCGATVLLLGKTQSKLEVVYDEIEALGLALPAILPMDLERADFAQMQKLAGLIEKEFGHLDGVLHNAAILGTLTPLEMYDPITFEQVMRVNMTAVFMLTQSLIPLLRAAQSGSVVFTSSSVGARPRAFWGAYALSKQAVEGMATIFTQETQNMTALRFNCINPGATRTNMRAHAFPGEDPYTLKTPEDIMPVYVYLMTDEASGIKGQVIDCQPKNA

SEQ ID NO: 62988 - protein, 440 aa, Moraxella catarrhalis
MGVTVSLFQNFMIILVLILTSSFFSISEIALAGSRKIKLKLLAESGDDRAEKVLKLQENSADFFATSQIGLNAVAILGGSVGESALRPYFSEWIGLVYQGIWLDSIAFFSSFVLVTLLFILYADLIPKRIAMINPERVALVVINPILWTIRVVKPLAWIINTIADVTFRLFKFDTARDDSITFDDISAIVDAGAEAGVLMEQEQHFIENVFELEERTVPSSMTAREDVVYFALSESEESIRQKIADYPYSKFLVCNEHIDQVIGYVDTKDILVRILSEQPIFQLNESTIRNVLIIPDTLTLSELLDKFRASNEKMAVVINEYALVVGLITLSDIMMTVMGDWAAAEPEDLQIIRRDENSWLIDGITPIDDVKHALDINEFPDWDHYETLAGFIMYRLRKIPRPADWVEHEGFKFEVVDIDHYKIDQLLVTRLEQLPKHED

SEQ ID NO: 62989 - protein, 359 aa, Moraxella catarrhalis
MASNTRFGLPIWSMLLPLVAWGLFFVGIKTHLLLQILGGVFLIGSVLSAVYHTEVVAHKVGEPFGTIILALAITIIEVALIISLMVAGGDNAAYLPRDTVFAAIMLILNGILGMSLMIGGLKHREQFFGQKSASTALITLVSILVMTLILPNFTTSTTQGTYSSAQLMFVAVASLVLYGSFIMVQTVRHRDYFLAADDDLDHHAQPPSTKITTISFIFLLICLGIVVMLAKSLSPSIEAAVAYMGAPVALVGVIIAAVVLLPEGLAALNAARHNRFQTSLNLALGSALASIGLTIPAVTIVCLIYDIPLVLGLDGKSMVLLGLSTFIVMLSLNQGRTNILYGIVLLVNLSAYVFTIIAP

SEQ ID NO: 62990 - protein, 472 aa, Moraxella catarrhalis
MAKAKSSYICQNCGAIYGKWAGQCTDCGEWNTLVEAPNTSLPHHHKSKTTTAPRKTANYAGAVSAVMTLDHVGVTLETRMPTGIGEFDRVLGGGLVAGSVVLIGGDPGIGKSTILLQTAINMAAGDSLSGSALYITGEESLSQVAMRAVRLGLPTDRLRVLAETNVDTICAALTTEQPAIAVIDSIQTLFTEAIQSAPGGVAQIRESAAVLTRYAKQTGTALFLVGHVTKEGALAGPRVLEHMVDTVLYFEGESDSRFRMIRAIKNRFGAVNELGIFGMTDTGLKEVANPSAIFLSRYDKPIAGSVVMVSREGTRPLLVEVQALVDDSQGQPRRMALGLDYQRLSMLLAVMHRHGGIHTSGMDVYVNVVGGVKVMETGSDLAVLIACASSIKEKPLPVRLCVFGEVGLSGEIRPVPNGQERLKEAMKHGFTHAIVPRANAPAANHPQFKNIQIIAVDRLDEAIYQAFEINAG

SEQ ID NO: 62991 - protein, 488 aa, Moraxella catarrhalis
TPIPELDLLDKPNLSNKPKVSDDELQQASELLEIKLQEFNIQAQVVSAMVGPVVTRFEVELAPGVKASRVTRISQDLARSMSKASLRVVEVIPGKPYIGIEVPNQKREMVHLLELLDTKDYQSPNNQIAIAVGKDISGKPVIADLAKAPHMLVAGTTGSGKSVLVNSFLLSMLLKYTPDELKLVLIDPKQLELANYGDIPHLLTPVITDMKDAVAALTWCVNEMERRYQLMSKLRVRKISEFNKKVEVAEAEGEPIYDPLWHINQSVSQDKPPKLKPLPTIVIVADEFADMIMQLGKTAEEPIVRLAQKARAAGIHLLLATQRPTVNVVTGLIKANIPARVALRVSSKVDSRTIIEEGGAEDMLGHGDMMFIGPGKNHPERVHGAYVDDDEVNRVCDAWRERGKPDYIDLSDSYSFEGEGSGDAGGSVAGDELYEAAAAFVVETKKPSISSVQRKFSIGYNRSARLLDQMEERGLVSSMDNSGKRQLL

SEQ ID NO: 62992 - protein, 65 aa, Moraxella catarrhalis
MKTNELREKSVDELAQLLDEKQLDAFRLRMAKATGQLANTHEIKNNRRTIAKILTLINEKQRGEA

SEQ ID NO: 62993 - protein, 262 aa, Moraxella catarrhalis
MIKPFATLATVACVTLAGCTKEETSTQTTAPAQPSQKSIVIATEAAYPPFNDTDASGQIIGFDVDVMNALCAEMHAHCQIIAQDWDGLIPSLLAGKYDAIIAGMSITPERQAQVDFSDSYFSNTIVWLAKSDGSFDPNNITNQTLASQRGTTGAAYITEKYDGKDGNRVQLHDTYTNAYLDTKAGRNHAVMAEKVSAIDWLKQEGNGEFGLIGEEIDNNDHLGIAVRKGDSLKAEFDAALAKIKESGKLAEIEKAHFQSDTF

SEQ ID NO: 62994 - protein, 267 aa, Moraxella catarrhalis
MIMTTVLKFTTAAFCVSLLAACSNESTTNTKTAAAPNSSTSQKELIIATESSFKPFSYLDKQGQLVGFEIDLANALCKQMQADCQIVSQDWDSLIPSLNANKSDAIMAGMSITEERLNAVDFSEPYFDNTLVLIGKKDNTATINDIAGKAVATQQATVSAEYLQKHYPDANIKTYDKQDNAYLDLTAGRVEFMLSDVVPATDWLATEAGSEFEIKGMPIDIGDKVGIAVRKDSSLKADFDAALASLKTNGKYDEIVAKYFNSQALGQ

SEQ ID NO: 62995 - protein, 786 aa, Moraxella catarrhalis
MSKNTFSASFIAILSKVILGVLALFAILILAFPIGFYGMVMYLEPTLPDVKNLDNSRFEMPLQIYTADNKLIGQYGNRYSLPVTFDEIPERMIQAFLAAEDDTFFEHSGISVKGMGRALTEVISDNDAQTGGSTITMQVAKNYFLSPERTINRKLTELFIARKIENELTKNEILTLYVNKIYLGEGTYGIQAAARRYYSKNLESLTIAQMAMIAGLPKAPSAYNPVVNPERAMERRNWIIGRMHQEGFITASEKDAAIAEPMGLNIYQEKLDLNMPYVAEMVRSTLVDRYGEAVMDSGWRVQTTINSSSQLAANAALVGGLRDYDRRHGWRGVEAESGSLEGRKNFDHIYPAKVTKVHNQSFEAKLQSGETVTIGWSGMNWARRYYDANRVGGGYSNAHQMVKVGNIVRISPINEAKTAWRMESIPKVQGALVSLDPENGALRAVVGGFHFNHSKFNRAIQGYRQPGSIIKPFIFAAALESGQYTPDSLISDAAIRVGRWQPKNADGRYTGDMTLRRALTLSRNTPAIRLLRSAGVDESRHLMNAMGGLEIERMPSTLALALGAADATPLQMATGFATIINGGHRIQPYFIERIYNFDNETIYQANPQQACALCFNENLSATNAKLLELFEANKSEISTDTPSAPAGDRLQPRSAPQYVAATQAPRVLSHQTAYDISNMMREVITSGTGRRARALGRSDVGGKTGTTNLAKDAWFAGFHPTNVAVVWVGFDTPSTLGNSEYGGVAALPIWVNFMSHELRNTPSQWISQEDRSKAVKATQQVIDLKD

SEQ ID NO: 62996 - protein, 644 aa, Moraxella catarrhalis
MTNPTAHHFEAEVSQLLHLVTHSLYSNADIFVRELVSNASDACDKLRFLATSDDGLYENDGELAIRIDIDNTAKTITFSDNGIGMNEEDAIEHLGTIAKSGTKAFLDKLADSDKKDGHLIGQFGVGFYSGFIVADKIVVESRKAGESADKGVRWVSDGTGQFTTESIHKPNRGTSITLYLKDEYAGGGESETNYLNDQHIKSLVNKYSDHISLPIQMHKQIWQDELGEDGEPTGKGEYITTDDYETVNQANALWTKSPSDISDDEYHEFYKNLSYDYAKPLAYTHNRVEGRVQYTQLLFIPSKAPMDLYAREQQHGLKLYVKRVFIMEDAEQLLPMYLRFVKGVIDTADLPLNVSREILQESRDVKAIREGNARRVLTLLSSLANSEDADKQQKFADFYQEFGDVLKEGLGEDQTNQERIAKLLRYATSTDDKIATGFGDYKARMKDGQKAIYYLTADNLAAAKNSPQLELFKKKGIEVILMTARVDEWAMNFLHEFDGTPLQNIAKGAVDLGELTDENEKQEAKQAEEKMQPVVEKLKTTLGKRTKDVRVSSRLVDSPACLVVGEGELTPQMAQMLKAMGQSVPEIKPVLEINPNHPLIDKLQNSHDFDDLAQVIFDQALLADGGQLDDPAGYLKRVNKLLMG

SEQ ID NO: 62997 - protein, 449 aa, Moraxella catarrhalis
MQYAFAYGADAVYAGQARYSLRVRNNDFDEENLAKGIAYAHSLGKKFYVVVNIQAHNAKLKTFIEDIRPVIEMKPDALIMSDAGMIMMVREAFPNQVIHLSVQANAVNWATVKFWQQMGISRVILSRELSLKEIEQIIKEVPDMEVEVFVHGALCMAYSGRCLLSGYINKRDANQGTCTNACRWNYNTYKAVENETGDIVPANPEVFVPSQGEISNVNLNGDVVMDDDYVEKPSDEVVLIEEQGRKGELMAMYEDEHGTYIMNSKDLRAVELVPDLVNMGVHSLKIEGRTKSHYYVARTAQVYRRAIDDALAGKPFDTGLITALDGLANRGYTEGFLRRHVHSDYQNYEYGSSKTDNQQFVAEVADISDERLTLTVKNKLMVGDTIEIMTPQGNVSYTLTEMWDKKGEAIDGALGSGWVCQIANPFKDMDKDVLKFALVMKSVSEAIYS

SEQ ID NO: 62998 - protein, 236 aa, Moraxella catarrhalis
MSVNKVILVGNLGNDPEVRNFDNGGMIATVSIATSERWTDRNTGERKEHTEWHRVVFNNRLAEVASQYLRKGSQIYVEGSLRTRKWQDTQTGQERYTTEIRADNMQMLGNRASGDNGGYANSQGGYANPNQQYQNQGNQGGQYPNTAYQQANQFGGQNSSGYTQPQPNQAYPNSGYPQERASQPQSSSMAQNHAFGQPTHIEQNTGMSPIQKPNTPSTNQPVITPSQGLSDDDMPF

SEQ ID NO: 62999 - protein, 78 aa, Moraxella catarrhalis
MSDIEAKVKDAVAEQLGLSVDEIKNEASFMDDLGADSLDLVELVMAFESSFGITIPDEDSAELTTVQKAIDYVSDKVA

SEQ ID NO: 63000 - protein, 490 aa, Moraxella catarrhalis
MTQQAPLIDGYEVVIGIEIHCQLNTDSKIFSNAPTAFGQEPNTQATIVDLGFPGALPVLNAGVIERALKFGMGVNAELGTYNTFDRKNYFYPDLPKGYQITQMANPIVGEGYIDILVNAGQKDEYTKRIGITRAHLEEDAGKSVHDAVPQMTGVDLNRAGTPLIEIVSEPDMRSVDEAVAYVKTIHELVTWLGISDAIMAEGSFRADINVSVHKPNTPFGTRCELKNLNSFRFIHRAIKSEIERQIDVIEDGGKVVQATRLYDPERDETRAMRTKEEANDYRYFPDPDLLPVIISDETLAKVRADMPELPSVRKERFVSEFGLTAYDANVLNGSRELSDYFLQVLDIIGKNNAKIAANWVMGELSGSLNKNELTIDQSPISAKRLAGLIVRILDDTISGKIAKEVFGHLWESDKSADEIITEKGLKQETDTGAIEAIIVDVLANNQAMVDEYKGGKEKAFNGLVGQVMKASRGKANPAQVNALLKQMIGA

SEQ ID NO: 63001 - protein, 614 aa, Moraxella catarrhalis
MADDIKHLRNIAIIAHVDHGKTTLVDKLLQQSGALGERSGEIERVMDSNALESERGITILAKNTAIRWTDKRTNTEYRINIVDTPGHADFGGEVERVMSMVDCVLLLVDSQEGPMPQTRFVTQKAFARGLKPIVVINKIDKPAARADWVIDQVFDLFDSLDATDEQLDFPIVYASGINGIAGLEPDNLADDMTPLFETIVDIVEPPKVDVDGPFQMQISSLDYNSFVGVIGVGRIQRGSVKTNTPVAIIDKDGNKRNGRILKIMGYHGLERVDVESAQAGDIICITGIDSLNISDTICDPQHVEALPALSVDEPTVSMTFQVNDSPFAGKEGKFVTSRNIRERLDRELIHNVALRVEDTDSPEKFKVSGRGELHLSVLIENMRREGFELGVSRPQVIMKEIDGVMCEPYENVTFDVEEQHQGAVMQEMGNRKGELTNMEVDGKGRIRIEATVPSRGLIGFRSAFLTMTSGTGIMTSSFSHYGPVKDGAVAKRQNGVLVSMVTGTCLAYALFSLQERGRLFAKPQLEVYEGMIIGINSRSDDMVVNPTKAKQLTNIRASGSDDAIILTPALDYTLEQALEFIEDDELVEVTPKSIRIRKRYLTENERKRFGRKKD

SEQ ID NO: 63002 - protein, 453 aa, Moraxella catarrhalis
MTLHTIILAAGKGTRMKSNRPKVLQTLAGKALVQHVLDTCTQIQADGTILVYGFGGEMVKEALSTHTVIFAEQTQQLGTGHAVKMALPHLPKEGKSLILYGDVPLTQAETLQNLVKANTSGISMLTLTVEQPFGLGRIVRDQGKVVAIVEEKDADVQQKLITEINSGIYCVDNALLHKYLPILNNNNAQGEYYLTDIIKLAVDDGVEIVTIEPKFAFEIEGVNDRIQLANLERDFQSHQIHQLQIAGVQFADPNRVDIRGKLTCDRDVFIDINTVFVGDVHLGMGVQIDAGNVITNSHIGNQTHIKPNCVIDDSMIGQNVSIGPFAHIRPKTILSDDVKIGNFVETKKTTVGVGSKINHLSYAGDSIIGQNVNIGAGVITCNYDGINKFTTTIGDRAFIGSNSSLVAPVTVGMGATIGAGSVITKDAKDNALTLARAKQATIIGWSRPKKNQV

SEQ ID NO: 63003 - protein, 597 aa, Moraxella catarrhalis
MRSTYCGQVTEELIDQTITIAGWVHRRRDHGGVIFLDMRDREGLLQVVIDPDTPEAFATADAARSEYLLKITGRVRRRYEGTENPNMVSGQVELLGKEIELLAKSDTPPFPLNDDNITVSEELRLKYRFLDMRRPEMQERMKFRAKATSTIRRYLDDHGFLDVETPVLTRATPEGARDYLVPSRTRQGNFFALPQSPQLFKQLLMVAGFDRYYQIAKCFRDEDLRADRQPEFTQVDIETSFLSDEEIMDITEGLTKNLFKTMLDVEFDTFPRMTYADAMRDYASDKPDLRIPLKLIDVADIMQHVEFKVFSGPAQDPKGRVVALRIPNGGNMSRKQIDEYTKFVGIYGARGLAYIKVNDASNINNGVEKESGLQSPIIKNMTDEVLIELIERTDAQTGDIIFFGADKAKIVNDAMGALRVKIGTDLNLFTCEWAPLWVVDFPMFEETDDGKWTSVHHPFTRPKGSVEELKQSPETALSIAYDMVLNGTEIGGGSLRINTVDMQEAVFDALGISKEEAELKFKFLMDALRFGAPPHGGLAFGLDRLIMLMVGASSIRDVIAFPKTKTADCPLTEAPAEVDNRQLRELGIRIREKQKAE

SEQ ID NO: 63004 - protein, 319 aa, Moraxella catarrhalis
MTEANSGMTKRLAVVFPGQGSQSVGMMDELDKAFKSVRTTFDEASEALGFDLWSVTQDENCLNKTQYTQPALLTSSIAIWQIIEPILSAQSIKPMYLAGHSLGEYSALVAAGVLNLKDAVKLVHERGKFMTEAVQGIDTQMAAILGLDDEQVVSLCEEVSTTTGTVDAANFNSPGQVVVAGTAVGVSGVLSAVEALGKKAVPLKVSVPSHCALMNPASDALAKLLGETDFGEASIPVIQNPHAKIHTQTTQIKTALIEQLSMPVLWSKTMEKLSERGINLILECGPGNVLSNLAKRQATPITALPTDKLARLEKLENLV

SEQ ID NO: 63005 - protein, 133 aa, Moraxella catarrhalis
MNQTKLTKVRADKWLWAARFFRTRSLAKEAIEAGKVHMNGAKIKVSKELQVGDTLTIRQGHATRLEDKTIIIKALSENRGNATLAATLYEETDASKTQRAFMAEQRKLLNLARPDSRPDKKQRRELNKFKHHW

SEQ ID NO: 63006 - protein, 142 aa, Moraxella catarrhalis
MRAKLTNFLPDVYLDSAGTAGYHIGNPPDPRAIATGESLGFELSQLRARQVSLEDFYEFELIFAMDDTNLSDLQTLKTTAMMHANGRDMAKLSLFDPEGRSVADPYYGDEQDFEQMYTHLQQIADRYITVWQLDHQDSLAAD

SEQ ID NO: 63007 - protein, 347 aa, Moraxella catarrhalis
MLDTYQNYDLSSMNTMALSSVADTAIVIHDAAALPTLKLNNTWFVLSGGSNVLLPSRLHTTVLLPRMMGRRVLFEDDQEIILQVQAGENFHDLVTDCVHKGWFGLENLALIPGLVGAAPVQNIGAYGVQLDDVLVSVQVYEWASKQFKQLSKQACQFGYRHSIFKDEPNRYFICAVTLRLHKNPTRILSSYGDLHTYAKQLANHQGRTTVTTTDVYHAVIAIRQSKLPDPKVLANCGSFFQNPIISTEHYQKLCVDYPNLPCYLITKTLVKVPAGWLIDQAGLKGQGVPPILTHAKQALVLTNHAPLTATQEDIKTTADMIITAVKQKFDITLVREPVWINADGSYN

SEQ ID NO: 63008 - protein, 289 aa, Moraxella catarrhalis
MAAEQTSTEYIAHHLTNWTFGHHPELGWKVAHDAAEAQQMGFMAIHVDSMLWSIGLGIFFLALFWAVGRKATSGVPTKLQAFVEMIVDFVDNSVRESYNGPSKLIAPLSLTIFVWIFLMNLMDLVPIDWIPSLAQWVGSLMGHDPHHVYFKIVPTTDPNITLGMAIGVFFLIIGFGLKYKGVGGFIAEFTLHPFSAKNPILQAILIPINLVLEIVTLLAKPISLGLRLFGNMYAGELIFILIALMPFWIQWALSVPWAIFHILVITLQAFVFMMLTIVYLSLISAESEH

SEQ ID NO: 63009 - protein, 81 aa, Moraxella catarrhalis
MDPVIAQYTLLAVALLIGAGALATGIGFAILGGKFLESTARQPELGSQLQTKMFIVAGLLDAVPMIGVGIAMLLLFANPFA

SEQ ID NO: 63010 - protein, 155 aa, Moraxella catarrhalis
MINLTIFGQLIAFAIFVLFCMKFVWPPLIGAINERQRKIEEGLNAAEKAKADLVSAEKQVEAEFAAAKTEAASIIERANKTANQMIEDAKEQARLEGERIIVAAHAAVEQEAAQTREQLRSQVASLAVLGAEKILQDKINEQEHASMLEQLAAKL

SEQ ID NO: 63011 - protein, 182 aa, Moraxella catarrhalis
MAELTTLARPYAKAAFDYAKEHNAISNWEAFLLIASDVVRNEDFASLLNNPAISAQQKADILMDAYGKLTAEQASQALTNFIKQLAEHDRLALMPEITAHYTKLKSQELKQVDAYVTSAFPLTEAQSKKLQERLALSTGSIVILHESVDPNLLGGATIKVGDKFTDGSVRGKLKQLKTQLTA

SEQ ID NO: 63012 - protein, 514 aa, Moraxella catarrhalis
MQQLNPAEISNLIKQRIQDLDVSATAKTEGVIVSVSDGIVQIHGLEEAMYGEMIEFEGGVYGMALNLEQDSVGAVVLGEYLSLQEGQKAYCTGRILEVPVGPELLGRVVDALGNPIDGKGPINAKLTDKVEKIAPGVIARQSVDEPVMTGYKAVDTMIPIGRGQRELIIGDRQTGKTALAIDAIIAQKNSGIKCVYVAIGQKRSTIANVVRKLEETGALAYTTVVVASASEPAALQYIAPYSGCTMGEYFRDRGEDALIVYDDLSKQAVAYRQISLLLRRPPGREAYPGDVFYLHSRLLERASRVNADYVEAFTNGEVKGKTGSLTALPIIETQAGDVSAFVPTNVISITDGQIFLESNLFNSGIRPAVNAGISVSRVGGAAQTKIIKKLSGGIRTALAQYRELAAFAQFASDLDDATKQQLEHGVRVTELMKQKQYAPMSIADQAAVIYASNEGYLSDVPVEKIGAFEEAFLRYLRNDHAALMSEIDETANYNDDIESRLKAAVESFKASASY

SEQ ID NO: 63013 - protein, 451 aa, Moraxella catarrhalis
MTDDILTSLSSAFDELALPAHAKLYLACSGGRDSLALAYACFLLYRQGKIIRLPTILHVHHGWQAANDAWMQLVHRWAIEHGFDCQILRITLAKNSETHARDARYQAFGLVMNQGDVLMLAHHANDQAETVLMRLVSGAGLQGLSGMKVWQAKTVHTDEAAKTITLWRPWLKISRNQISQFANAHALPYVDDITNTDPAYARGRIRQDILPHLLTLNPKAVENIIRSAGLLSMASTMVGQQVGTLLASLDHPANQMPYQQVLGIKDFLNLSKSEQALVLHRWLQADEALPPSHQLTQQVIEMICRQDNDHSSQLVWQAEQAAYVMCCYDDCLYRYRADIWALFGTSGHTKPSSQGWILSDDGRCQLILMAKIDDIQKITKTDTINIGKHRYKGKKLAQKLRIPFWLRDSLWKINHQGHPYLIAPMMVWDLSSGQRLDSFAPIGRMVYNAPD

SEQ ID NO: 63014 - protein, 583 aa, Moraxella catarrhalis
MSTQPTEKNDFIRTIIRDDLASGKHDSILTRFPPEPNGYLHIGHVKSICLNFGVANEFGGACNLRFDDTNPTAEKQDFVDGIKEDVRWLGFEWAGDVRYASSYFDELYGWAVQLIKQGDAYVDLQSIDEIRANRGSFTEVGVPSPQRDASIEENLARFEDMRQGKFADGEAVLRAKIDMTHPNLNMRDPVIYRVMHAHHHQTGDQWCIYPMYDFAHPLSDAYEGITHSLCTLEFEDHRPFYDWVVQKVGFDVPPRQYEFSRLNIDHTLTSKRKLKRLVDMGVVSGWDDPRMPTVAGMRRRGYTPEGLRDFCERIGITKSEGLVDHRMLEFSVRKSLEETTARGMAVLRPLKVTITNFDDAVSKFNELKNEKTLAEFDGEALWLTQPKHPHLNMGERQIPFTKTIYIDATDYEIEPPAGYKRLSPNNPEIRLRNSYILKVNEHKTDDAGNVIELIATIDEHTLGNNPEGRKVKGVIHWVSATHGVTALVRLYDHLLLEEDEIDASLAQNALGADADAFWINRHLNPNSLTVYQAVVEPDLAKAAAGERFQFERESYFIADSVEHTQSSPVFNQIVSLKDSFKPE

SEQ ID NO: 63015 - protein, 363 aa, Moraxella catarrhalis
MIPNNPHHRAHVPKLRLAINGFGRIGRNILRAYLQQLSTFGHIEIVAINDIADNQMLLHLLKFDSTHGRFDQGDHNAAQVSLTTNQDNSYLTITKGELLHQILLLSCDEPKYLPWADLNVDVVLECTGQFRSYADANRHRTAGAKQVIIGAAPFDRVDASIVIGVNDHKLHADLPIISGVSCTTQALVPLLSVLDDKFGIQSAMMTEIHAVTADQSVLDQAHRDFRRARASGHNIIPTTSSSINATERVLPLMRGKINGHSIRVPTINVAAIDLTVKFNKTVSLDQIKDALMTASQNQLLGIMDYCDEPLVSSDFIGNSHSLIIDGQQLMMAGELAKIYAWYDNEWGYANRLLDMCQKLADLR

SEQ ID NO: 63016 - protein, 649 aa, Moraxella catarrhalis
MIAFKNVAVRREGRLLFSDVNFQLHKGQKIGLTGNNGTGKSTLFATILGTHNTDVGSISLPESWQIAHMAQEVSATAMSAIDYVLSGDEEWWQLNWQINHQTSLTDGQIAPMYQRFEEIDGYRTPAKAAMILSGLGFGEADHSKQVSMFSGGWRMRLNLARTLMHRADVLLLDEPTNHLDLDAIFWLEEWLLKFEGLILLISHDQAFLDTVCGHILHIEQGQITLYTGNYSQFIRTRAERLAQEQQAFEKQQAVRAHLEDYIRRFRAKATKAKQAQSRIKQLDRMTQLSPVMAENGFSFRFYEPQHMASPLIYLDNATIGYDGIPMLTKINLRITPDARLGILGANGAGKSTLIKALVGELPLIDGIYKVSETLQLGYFNQHQMDSLDDDATPMIMLRRLSGQTSDANLRAFLGGFGFQGERIDTQSRLFSGGERARLMLALLVWQRPNVLILDEPTNHLDLQMRNALMLALQDFAGALILVSHDRDLIMSVCDELLLVFDGRATEFVGDMADYAEHLRQAKKAHQANQKMDKSIHQQSTNTATGQEICLHDSLSKEDRRKKNAQIREQTAPLRKQIAKLEDRLGKLSDTLAILENELSDARLYEDDYKSELLDKLNHQNTLKSQIDDIEEQLLTAMAELEALEEALSG

SEQ ID NO: 63017 - protein, 495 aa, Moraxella catarrhalis
MRKYILSRIFRSLLSVVVVTALVYVIVYTLVPTSLIFKQDPNYNKMTKTLDKKVDYENTTFDSMGYIDYLSAGELQKRVSSQGGDINSEAAYQNYLSTLNGQWQLKTYPLSEQFYATRDIPIYERVWSFFSNLIEIDHPWKIQDPDNPNLPRYMRFEKDAAAGWALVGSGTHHKYLLYTNREFPYLHQNFINLNLGTSYPTYSNVPVWQVITQGQGRIDLQEVTFPTGVTKKSSVDIYSRTYKNPNTMDDIARANYGENDNYSKTKTNYKDPSMIYNSFVIGLFGVLFSYGIGLPIGMLMARFKDGLFDKVSTATMTFMLALPSIALIYVIRFAGSQLTGLPDSFPILGASDIRSYILPALILGIFSLPYTVIWFRRYLVDIQASDWVRFARAKGLSESEIYKKHLFKNAMVPVVVGIPASIILAIGGATLTETIFAFPGMGKMLIDSIKAANNAMIVGLTFIFTVLSIISLLLGDIAMALVDPRIKLSEDKKGE

SEQ ID NO: 63018 - protein, 348 aa, Moraxella catarrhalis
MTTNNVILEVNDLVVEFTVRKRILTAIRNISLKLHEGEILALVGESGSGKSVLTKTFTGMLENNGRIASGDILYRGQDLTKLTNNEDWLKIRGSKIATIFQDPMTSLSPIKTIGAQIVEVITKHQKVSRKEAKIQAIDYMRKVGISNPEKRFNDYPFEYSGGMRQRIVIAIALACRPDILVCDEPTTALDVTIQAQIIDLLKSLQQEYRFTIIFITHDLGVVASIADKVAVMYAGEIVEFASVNEIFYNPQHPYTWSLLSSLPQLVNDSGELYAIPGTPPSLYSPIVGDAFALRSEYAMEIDFEQRPPIINVSDTHWAKTWLLHPDAPKANKPEAICDLHEKILQKLS

SEQ ID NO: 63019 - protein, 206 aa, Moraxella catarrhalis
MQGKFISFEGTEGVGKTTAIEALITRLVDRGIQVVRTREPGGSELAEQLRQLFLNPNANMNADTEILLMFAARSDHLHQVILPAIKSGKWVVSDRFFDSTVAYQGFGRYHGKQAALAKIELLIEQFVPIYPDVTLWLDLDVVMGMQRAAKRSAADRLEANDIAFFERVYQGLAYQHSQHSNRIHRIDANGTVAEVAARIDTALGLD

SEQ ID NO: 63020 - protein, 507 aa, Moraxella catarrhalis
MSSQNQPQRNEAAISENELIAQRRTKLDALQQKAKQAGKSAYPNTFKPKNYCGDLQAQFDGVDKATIESGDKVYAKVAGRVMLNRGSFIVIQDMTDRIQLYVDRKGLPSETLELIKSLDLGDIVAASGYIGRSGKGDLYVHLEAFELLTKSLRPLPDKFHGLTDTEVKYRKRYLDLMVNEETRNTFAIRAKVVAGIRAFLTQERFMEVETPMMHVIPGGASARPFVTHHNALDMQLYLRIAPELYLKRLVVGGFDRVFEINRNFRNEGVSTRHNPEFTMIEFYQAYADYKDLMALTERMLETLAMDILGSTDVSYQGEVFSFKGPFKKITMFDAILEYNSDFSADDINDREFLAKFVKDELKQEVKPSFGLGKLQTIVFEETVETKLRQPTFITEYPAETSPLARRNDTNPHVTDRFEMFIGGRELANGFSELNDPIDQAERFRAQVAEKDAGDDEAMHYDADFIEALEYGLPPTAGEGIGIDRLVMLFADAASIRDVILFPHMRHK

SEQ ID NO: 63021 - protein, 798 aa, Moraxella catarrhalis
MNKQVQVITFNQLGKNDVDIVGGKNASLGEMISHLGGLGVNVPNGFATTADAFNRFLNETGLLDKINTELKGLDVDDVDLLTQIGAKIRSWIIEQELPKDLENEIRTAFAELSKGEDIAVAVRSSATAEDLPDASFAGQQETFLNIRGIDNVLIAIKEVFASLYNDRAIAYRVHKGFEHAGVALSAGIQRMVRSETGTSGVMFTLDTESGFNEVVFITASYGLGEMVVQGAVNPDEFYLSKVLLEQNRPAVIRRNLGSKQKKMIYGDEGSTTKSTKIVDVDKAERHQFALSSEELTRLAKQAMIIEKHYGCPMDIEWAKDGDSGEIFIVQARPETVKSRQDKNHMERYVINSKGAKVLTEGRSIGQRVGSGKVRIVTNLTEMSKVQDGDVLVSDMTDPDWEPVMKRASAIITNRGGRTCHAAIIARELGVPAIVGSGNATEVLVDGHEVTVSCAEGDTGFIYEGILDYEVQRNSISTMPELAFKIMMNVGNPDRAFGFAQIPNQGVGLARLEFIINRMIGVHPKALLNLDTLPQETVQAVQERMAGYNSPVEFYINKLIEGISTLAVAFRDKPVIVRMSDFKSNEYANLIGGKLYEPSEENPMLGFRGASRYVSDNFRDCFELECRALKYVRDDMGLTNVKIMIPFVRTTGEAKQVIELLEKNGLKRGDNELEIIMMCELPTNAVLADEFLKYFDGFSIGSNDLTQLTLGLDRDSGIVSHLFDERDPAVKKMLSLAIDACNKAGKYVGICGQGPSDHADLAYWLMEQGIDSVSLNPDSVLDTWFFLADKNNQPADDYA

SEQ ID NO: 63022 - protein, 553 aa, Moraxella catarrhalis
MQIERDSMEFDVIIVGGGPAGLSAAIRLRQLAIAAGMDEFTVCVIEKGSEFGAHTLSGAVIETRALDELIPDWKERDAPITVEAKEDRVYMLTSEKGSTALPSSIVPSSMHNDGNYIVSLGNVVRWLAEQAESLEVMMFPSFAASDVLYHEDGSVRGVVTGDMGLNAQGEPKNSFEPGYELLAKYTIFAEGCRGHLGKRLISRFHLDKDKDPQHYGIGLKELWEIDADKHEQGVIMHGSGWPLSETGTTGGWWLYFAEDNQVSFGLVVDLSYHNPYVSPFDELQRLKLHPIIRPILEGGKRLSYGARALTKGGLNSLPKLTFAGGVLVGDDAGFLNPAKIKGTHTSMKSGMLAAESIFNAIQAGRSSDEVVEYQTAFENSWLFEDAHQARNFSPSLHRMGTWMGGVFTFVEQNLFGGKMPLTIHDNTPDYSTLDKADHAYKPNYPKPDGKLTFDKLSSVFISNTNHAEDQPNHLRLTDPAVPVSLNLPLYAEPAQRYCPAGVYEIVHKEGKTPKFVINSQNCVHCKTCDIKDPSQNITWVTPEGGGGPNYPNM

SEQ ID NO: 63023 - protein, 447 aa, Moraxella catarrhalis
MKLAVIGVNHKTAPVSLRERLSFGSDMPQAIEQLSTLANGCTIVSTCNRSELYVGIVDDVGSQHESQDEQSGGLISAKLQAIGEWLAEFKGISFDEIAPYLYTYEDSRALNHWLRVAAGLDSMILGEPQILGQIRQAVALSREYGGVDSDFGWLTQQVFAAARTVRRDTKVGQQAVTLGFATARLATQIFDDPSELTFLLVAAGEMNRLVAHNVAALGVKKIIICNRSPERAQALSDELSEMAQQAGRFLEIELAGLDRLGEVLPHADIVSSCSGSMQALIDTAMVKYALKIRRHQPMLLVDLAVPRDIDPLVGQLDNIYLYSVDDLQHVIAGNIAERKQAAVEAELLVGQLVADIEAQMQGQVARTHIRDYRQMAEARTQVLLARAMSQIDQGDDAKAVLSEFSHTLSQALMHSPSRLIRQIAKTYDADTLDLVSHELIHSYRKPI

SEQ ID NO: 63024 - protein, 189 aa, Moraxella catarrhalis
IENFTHLLIIWQFHHNRPQANFRPQVRPPRFGGNAKMGVLQTRSMYRPSPLGLSVVRLERLEVINHKVRLYIIGADMADGTPIFDIKPYLAFSDSITDAISQQIDTPSMRKTAIDTKAKQVFDGLIRQGVLEDADVQIIQGLIAQDPRPAYRQDEVGTIFALRYDGVDVDFLMNETGVLMIVGVRLIGS

SEQ ID NO: 63025 - protein, 315 aa, Moraxella catarrhalis
MSYMAVFSGSANPKLAQTVADNLHIPLGKADINRFSDGEIAVEIKENVRGKDVFILQPTCAPTNDHLMEVILLADALRRSSAGRITAVIPYFGYARQDRRPRSARVPISAKVVADMLSIAGIDRIMMVDLHADQIQGFFDVPVDNLYGTPVLLRDLKQQNYENLMVVSPDVGGVVRARAMAKLLGDADLAIIDKRRARANESQVMHIIGDVSGRDCVIVDDIVDTASTLCKAAQALKDHGARRVVGYITHPVLSGKAIETIQKSALDELVVTDTIPLSEAASACANIRQISIASMIAESLRRINNEESISAMFEY

SEQ ID NO: 63026 - protein, 457 aa, Moraxella catarrhalis
MPLSALTALSPLDGRYASKCDALRPYLSEFGLIHARVTVEIRWLQALANHPQVIEIQPFSAKTNQRLDEIVQNFSEENALRIKEIERTTNHDVKAVEYFLKEQIADIDELKNAGEFIHFACTSEDINNLSHALMLKASRDVLASSMQQLIDAIATLAQTHANQPMLSRTHGQTASPTTLGKEMANVAYRLHRQLTQFNHVELLGKINGAVGNYNAHLSAYPNIDWADHAQKFVTSLGLTFNPYTTQIEPHDYMAELFDALRRFNTILIDFNRDVWGYISLGYFKQKLKDGEVGSSTMPHKVNPIDFENSEGNLGLANAVLAHLGEKLPISRWQRDLTDSTVLRNMGVGFAQSLIAFDACLKGIGKLEINANRLNEDLHNAQEVLAEPIQTVMRRYNIEKPYEKLKTLTRGQAMTREMMLDFIHGDELNAVPASEKKRLADLTPATYIGNADIQAKNI

SEQ ID NO: 63027 - protein, 295 aa, Moraxella catarrhalis
MNYKHAYHAGNFADVVKHILLLQLLSQFSAKAKPFYVLDAYGGRGLYSLASSETQKTQEAQRGVVVLEQAVKAGLDGLPNAVSRYLSDLAFARQKYDQYVYPGSPWWIAHHGEYHSTNAPLRAEAFETVADEYDALNYQLYQLPIGIHHRDAFEGVRAVIPPKEKRGIILLDPPFEQEHKDFSRLVDLLVSSHKKFATGTFILWYPIKNIEAVELFYKKMKRTGIKKQLVCELNLYPNDVAVGLNGTGLLVINPPWQFADNAQEVIEFLAPILKPKDAPQMTLGEMAVVKWLVAE

SEQ ID NO: 63028 - protein, 331 aa, Moraxella catarrhalis
MKKLVMAALVMATAAPAFANEIVVYSARADELLKPIAEAYQQKTGTKVTVVSDKAGPLMERLKAEGKNTQADVLITVDGGNLWQATQAGVLRPINSSVLKSNIPSHLRDPKNHWFGLSVRARTIFYNPNKVNPSELSTYADLADPKWKGRLCLRTSNNVYNQSLVATMIANHGQATTDRVVKGWVANLAAAPFANDTALLEAIDAGRCDVGIANTYYYGRLLNSKPQVANNVKVFFANQAGKGTHVNVSGAGVVKHSDNPAEAQKFIEWLSSNEAQRLYADRNFEYPANIQVTPTPAVARWGRFKQDFINVSVAGQNQQKAIMTMKRAGYK

SEQ ID NO: 63029 - protein, 357 aa, Moraxella catarrhalis
MTQQTQPVLLSDYDYHLPDDLIARYPLNERTSSRLLHVSKNSCQDLRFTDLPNLLKSGDLLVLNDTKVIKARLHGQKQTGGAVEVLIERILPDEINNNLYKALCHVRSSRSPKVGQTLNLANNQMQATVIGRQDNLFILGFRSPILADLDNYGQMPIPPYFERKADETDDERYQTVFHNPTKSASVAAPTASLHFDDALLTQLRKKGVQIAFVTLHVGSGTFTPVKVDNLADHVMHAEYAHLPASTATLINNTKSAGGRIIAVGTTVTRTLETAHLHRIHGELVEFLGDTQIFIYPPYEFGVVDCLITNFHLPKSTLLMLVSAFAGTQTIQEAYNHAIKNKYRFFSYGDAMFLEKAQ

SEQ ID NO: 63030 - protein, 626 aa, Moraxella catarrhalis
MREHNHINEDHDTSSSQLGALIRLGKEQGYLTYAEVNDQLPESVTESDQIEDIIQMLTDVGIQVFEVAPDDDDILLSDTGSDDDIATDEAAAVLASVETEPGRTTDPVRMYMREMGTVDLLTREGEIGIAKRIEEGTREVQYIMAYWPGTVKFVLDEYQQVLLGEKKISDIVSGFLNGDDGDFILNEEEIELDLGSPKTTDKDDAEEDGESDGTELDDTDDSSLDPEEVRVRFEEIQRLYDVAQEALAKHGRGSEAVKVAYDELANHFMLIKLNNRLSDQVMSLMREVYEDVRSNERRIMKLVIRHGKMPMDEFKKTFPSNETNLEWLSHRIKGGPAFAETLAKIEPEVVALQQKLLAHEQALQMDIRDMKAVARQMAIGEAKARRAKKDMVEANLRLVISIAKKYTNRGLQFLDLIQEGNIGLMKAVDKFEYRRGYKFSTYATWWIRQAITRSIADQARTIRIPVHMIETINKINRVSRQLLQEMGREPTPEELGERLDMDEAKVRKVLKIAKEPISMETPIGDDEDSHLGDFIEDNTISSPIENATAEGLREATREVLDNLTEREAKVLKMRFGIDMPSDHTLEEVGKQFDVTRERIRQIEAKALRKLRHPSRSEHLRSFLEND

SEQ ID NO: 63031 - protein, 260 aa, Moraxella catarrhalis
MLDQLIIGSRSFNSRLLVGTGKYKDLNETKDAIHASGANIVTVAIRRTNIGQNKDEPNLLDVISPNKYTILPNTAGCFDADSAVRTCMLARELLDGHNLVKLEVLGDEKNLYPNVTETLKAAKVLIDDGFEVMVYTSDDPIVAKELESMGCVAIMPLGSLIGSGLGILNRHTLSLIIEQTKVPVLVDAGVGTASDAAIAMELGCDGVLMNTAIAHAKNPVMMASAMNHAVVAGREAFLAGRMPARHMAQASSPQTGYFFK

SEQ ID NO: 63032 - protein, 480 aa, Moraxella catarrhalis
MSALRQTQSQLQLYDTLSASKRPFKPIHAGQIGIYVCGMTVYDYCHMGHARVMVGFDVIVRWLRAIGYQVNYVRNITDIDDKIIQRAYDNGETITELTDRFITAMHQDEQFLGCQSPNIEPRATEHIENMQHLIDVLLTKNLAYQGSGGDVYYAIEKFPNYGKLSKRHVDDMQAGASERVSTAEDKRHPFDFVLWKTAKPSEPHWQSPWGLGRPGWHIECSAMSTCCLGETFDIHGGGHDLQFPHHENEIAQSEGATGKTYANHWMHMGFINIDGEKMSKSLGNFFTIREVVDKFHPETIRFFLLSSHYRSPVNFSDTALKESHTALSRIYQSLKSAENFGVISIMPNAWESEAGQAFAKAMNDDFNTPKAVSVLFSVVTEINRAMKAGEYQKATQEASTLKTLASVLNIAQSSPHEFLQANIGNKPDGLSDAEIANKIAQRQQAKAQKNFAKADAIRDELNRQGIELEDGRMGTTWRRI

SEQ ID NO: 63033 - protein, 420 aa, Moraxella catarrhalis
MDKFKIIGASRIIGEVTISGSKNAALPLLAAMLLPNGETVLHNVPTLKDTATLIELIAGTGVKIYKEGNTVTADASVVTNYYAPYELVRTMRASILVLGPLLARFGEAEVSLPGGCSIGSRPVDQHLKALEAMGATIEVENGYVKARAPAGGRLIGCDFSFDMVTVGGTENIIMAATLALGTTRLENCATEPEVVDLANMLVAMGAKISGIGTTTMVIEGVESLHGCEYSVIADRIETGSYLAGALMSRGDVLVLNTSAEFLHPVLKKFEAMGATITTGHNWIRAVMTTRPKAVDIRTQVHPGFPTDMQAQLMAVCCLAEGTSTIIENIFENRFMHVPELQRMGANIRIDGHTAIVKGVEKFMPAPVMATDLRASMSLVMAAACAEGESVIDRIYHIDRGYDDVENKLRGLGVNIERIKG

SEQ ID NO: 63034 - protein, 218 aa, Moraxella catarrhalis
MITMTENFSGLTIALSKGRILDETLPLFAKAGIVPLENINQSRKLIFPTTHPNVRLLILRASDVPTYVEHGAADIGVAGKDVLIEYDAQIYELLDLGIAKCRLMTAGVKGAVLPNRRLRIATKYTNVARNYFASRGEQVDIIKLYGSMELAPLVGLGDLIVDVVDTGNTLRVNGLEPLETICQVSSRLIVNPVSYKRKLVQIEPILQILEKAVLEQGA

SEQ ID NO: 63035 - protein, 406 aa, Moraxella catarrhalis
MTIIKQDDFIQSIADAFQYISYYHPTDYIEALVEALAREENPAAKDAMTQILVNSRMCAEGHRPICQDTGIATVFLKVGMNVTWDATMSVEDMVNEGVRRAYNHADNTLRASVLTDPAGKRQNTKDNTPAVIHMQIVAGDKVEVTCAAKGGGSENKSKLAMLNPSDDIVDWVLKTIPTMGAGWCPPGILGIGIGGTPEKAALLAKESLMSHIDIHKLKQKADSGAQLSTTEALRLEIYDKVNALGIGAQGLGGLTTVLDVKILDYPTHAASKPVAMIPNCAATRHVEFELDGSGPVELMPPSLDVYPDVTYNPENGKRINVDTLTKEEIANWQTGDVLLLSGKIYTGRDAAHKRMTDMLNNGDNSCQLDLYQLSVHTIERHATTERMIFMHPNAPKKYFCACSSVG

SEQ ID NO: 63036 - protein, 456 aa, Moraxella catarrhalis
MNFFGYNTEFNFDRYDLGVMMNAVLLAVIVMVGLSLVRVHVVLSLVVGALVGGLMAGMSVADTLTSFQDGIKNGAQIALSYAMLGAFAMAIAHSGLPQILADKLIARLQYADGTGGLKFLLFFILIIMAIMSQNIVPIHIAFIPLIVPPLLSVMNRLHLDRRAITCILTFGLVNTYMFIPYGFGDIFLNQIILKNINEAGMITNNISMMQTMMIPALGMLIGLLIAIFVTYRKPRHYQEKVVAVGQASIQVGTLNIVVAMAAIVAAFVAQLMTDSLLIGSLVGFAIFMATGIVKWRDANEVFNDGIKMMAMIGFIMICAQGFAEVMKATGQINALVNGAVGLFGDNKMLAAVSMLLVGLVVTLGIGSSFSTVPIIATIYVPLCMAMGFSVPATVALIATAGVLGDAGSPASDSTLGPTMGLNADGQHDHIHDSVIPTFIHYNIPLIVFGWIAAMVL

SEQ ID NO: 63037 - protein, 820 aa, Moraxella catarrhalis
MTTPNTTYDNANNHHNLQQLPLIAVRDVIIFPQTQVALFIGREQSIKAIELAQKSHEGKLIAVAQKDSLSEQIDIEDLHRYGTLCRIVSTMPHDSDDKCLKVLIEGLERVEIGRIQNANDDTDDSFIAEFTAANVDLNLSQEEADAQKSVLLELFSDYAESTLRNSRELIRVASGFDNLLELIYFVVTRTQLPLDKKQALLESGDAAEYFKVLSEYFTNTKTEHSIESQLQDTVRKQMENNQREYFLNEKMKAIKSELSDLNDGADDDDVELENRLKEADLPDDVRKKAESEFKKLKQMPASSSEASVVRGYVEWILDTPWNKASKVSINLDKAKQTLDKDHYGLDDVKDRILEYLAVQSRVKQLKGPILCLVGPPGVGKTSLGESIARATGRKFVRMALGGVRDEAEIRGHRRTYIGAMPGKIVQSLAKVEVKNPLFLLDEIDKMAQDFRGDPASALLEVLDPSQNKSFNDHYLDLDLDLSQVMFICTANSMNIPPALLDRMEVIRLPGYTEDEKMAIANNYLTPKALEQNGLKPNELDITDDALTSIIRHYTKEAGVRNLEREINKISRKAVRSQIEKYGVKPKKGVNIDSLTITDDNISDYLGVKPHDYGLAEKDPEIGRITGLAWTSVGGELLTIESATMQGKGELVFTGSLGDVMKESIRAAMSVVRANGERFGITYEKFKNTDLHIHMPEGATPKDGPSAGIALTTAIVSAMTGIAIRADIAMTGEVTLRGKVLRIGGLKEKLLAAHRGGIKHVLIPKSNERDLIEIPDNVKEGLVIQSVETIDEVLAVALVEPIRPLPPQAVTHKTSSDTVRS

SEQ ID NO: 63038 - protein, 212 aa, Moraxella catarrhalis
MKALFDYIPLIIFFVLYKTTEPTDSTHPILQLIGSAGTDNNHILVATFGLIAATVIIYGYLFISQRFHLEKQQWFVLLMTVVFGGITLALSDAFYIMLKAVLINGAFALGLLISPLFSKDKSPIIKRLFEPVFHLTHQGWQYLNLAWVSMFTVMAGLHTFFAFIFAEGKYWGEFTAFGDMIVMFIFLGVMFFCLRKNIRKDITENSKKSLNK

SEQ ID NO: 63039 - protein, 422 aa, Moraxella catarrhalis
MLDPKFLRGNLEELKAKLAVRGYDLDVAFWQEVENQRKSIQVKTEALQAKKNAGAKKVGELKRHGEDTSELMNQMQLVSEAMKAAENELKELQNTITTAALQIPNLPDDSVPVGSDETDNVEVRRWGVPREFDFAIKDHTDIGESLGQLDFELAAKLTGARFSVLKGHLAKLNRALVQFMLDTHTQKYGYTEMYVPYMVNSDSLQGTGQLPKFEEDLFKLRGEKEYYLIPTSEVPLTNSVRDTILSPKDLPIKLTAHTPCFRSEAGSAGRDTRGLIRQHQFEKVEMVQVTRADSSMQALEDMTAQAEYVLQALELPYRVMTLCTGDMGFSAVKTYDIEVWLPSQNMYREISSCSNCGDFQARRMSARLKDGKHSELVHTLNGSGLAVGRTLLAILENHQNADGTITIPKALQPYMGGLEVIA

SEQ ID NO: 63040 - protein, 672 aa, Moraxella catarrhalis
MKQILLGTLLMPIELNQRHNANAIRILAMDAVQQANSGHPGAPMGMADIAEVLWREFLRHNPKNAKWVNRDRFVLSNGHGSMLLYALLHLTGYDLSIDDLKNFRQLHSKTAGHPEYGYADGIETTTGPLGQGIANAVGFALAEKTLAAQFNKPDNAIIDHFTYAFLGDGCLMEGVSHEACSLAGTLGLGKLIAYYDDNGISIDGEVEGWFSDDTAKRFEAYGWQVLKIDGHDADAIRDATNQAKAESAKPTLIICKTIIGLGSPNKQGKEISHGAPLGLDEIALTRTQMGWADTTPFIITDEMYRAWDATAKGSTDEAAWNKQFAEYQDKYPKEAAELLRRFSGDLPENFDQLADEFIQTCIQKAESIATRKASQNAIAALAPHLPEILGGSADLAGSNLTLWSGAKGVQEYADGNYVHYGVREFGMTAIANGVALHGGFIPYTATFLMFMEYARNAVRMSSLMKQRVINVYTHDSIGLGEDGPTHQPVEQIANLRMTPNHYVWRPCDTVETAVAWKMALKTKTAPSSLILSRQNLAFQSRSDEQIQNIEKGGYILAPEKGTLKAIIIATGSEVELAMQAYEQLEGVRVVSMPCAEIFVKQDSGYIESVLPSDVRVRVAVEAAITDYWYKFVGLDGKVVGMTTFGESAPAKVLFEHFGITTQAVVDAVNSLL

SEQ ID NO: 63041 - protein, 241 aa, Moraxella catarrhalis
MSDKNPQFSRILLKLSGEALAGGRDMGIDANILDQMSLSIAHLRGLGVQVGIVVGGGNLYRGSTLQKQGLVGRVTGDQMGMLATVMNGLAMRDALVRRNIKTRLMSAIAIDTVVESYSSRDAIRHLNNGEVCIFVAGTGNPFFTTDTAACLRGIEIEAGLILKATKVDGVYDKDPTTDDDAVKFDSLSFDEVLEKKLGVMDLTAIALCREHNVPLQVFDMNKPNALLNVVMGEAEGTRVYH

SEQ ID NO: 63042 - protein, 184 aa, Moraxella catarrhalis
MINEIKTDGESRMQKSIEALEAAFSKLRTGRAHPGILSGVMVSYYGSDTPLNQVASINVEDSRTLLVQPFERSMVQAVDKAIREADLGLNPMTADVIRVPMPALTEETRRDMQKIARNDAEQTRISVRNIRRDMLSDIKDLLKDKEISEDDERRAADDIQKLTDKFIATIDSRLEKKESELMEV

SEQ ID NO: 63043 - protein, 248 aa, Moraxella catarrhalis
MTTQICESLPIIPKHIAIIMDGNNRFGKSKQLATGAGHVAGKDALDPIVEHCLALGVEVLTVFAFSSENWARPKDEVDLLMRLLSQTIYEQLPRMNQHRIRLRFIGDRSQIDGDLVKLMAQAEAKTADFDAMTLVIAISYGGQWDITNAAKKLAKQVELGHLSADDIDIQMIKTQLELADLPSVDMLIRTGGEYRISNFLLWQTAYAELFFTPTLWPEFGCDELDEMIRIFAGRERRFGMTSEQIQKT

SEQ ID NO: 63044 - protein, 282 aa, Moraxella catarrhalis
MWQRIKTAIILVLIVGFALFASSMPIFVLPLLAIGVLIAAHEWTKLMPKCRQPVQFILAVLIITMLSVALPWTWVFWWAVSLGIWVMATAWVAQYPNKERWYGRRLVYMGAVILTAAITAMYGLWQMSPWWLMYVFLLVWCADSGAYFIGRKFGKRKMAPNVSPNKSIEGLCGGLMVSGVVTVAVGYYLQLSGMSLVLFLILSWLTVLASILGDLFESMLKRRAGIKDSGTILPGHGGILDRIDSLLSAIPIFALGFWLLLKLGIFTEVWIKMYFATMQVPF

SEQ ID NO: 63045 - protein, 284 aa, Moraxella catarrhalis
MHIIPKSPQQAKHAPRKRFGQNFLHDTHIISQVVTAIRLDRQDNLLEIGPGLGALTEPLLAEVDGMTVIELDRDLASQLKINIGANSHSDFTIINDNAMHVNYRALAEQIGKGVFRVVGNLPYNISTPILFRLLEFSDVIKDMHFMLQKEVVDRITAEPNSKEYGRLSVIMQYYCQSDYLLTVPKGAFNPPPKVTSAVFRLTPYKTKPITAMDESVFALVVRESFNHRRKTLRAIFKANGLLPTLDESDFEKIGINPSARPETLCVHEFVLLADLVVKNRQPSP

SEQ ID NO: 63046 - protein, 107 aa, Moraxella catarrhalis
MTFVVTDNCIRCKYTDCVEVCPVDCFYEGPNFLVINPDECIDCALCEPECPANAIFSEDEVPSGQEEFLKINEELSAVWPNITEKKDALPDYEKWDGVEGKLQYLER

SEQ ID NO: 63047 - protein, 88 aa, Moraxella catarrhalis
MANSAQARKRARQNTKRRQHNASQRSMVRTYIKRVNSAIEAKSYELATEAYNKAVPVIDRMADKGIIHKNKAARHKSRLNAAIKALKG

SEQ ID NO: 63048 - protein, 888 aa, Moraxella catarrhalis
MSDSVSPIGIVEELKRSYLDYAMSVIVSRALPDVRDGLKPVHRRILYAMHELGNDYNKKYLKSARVVGDVIGKYHPHGDTAVYDAIVRMAQDFSLRYMLVNGQGNFGSMDGDPPAAMRYTEMKMQKLTHKMLADLDKETVDWEDNYDGSMKMPSVLPARIPNLLVNGATGIAVGMATNMAPHNLTEVLNACLAYAEDPNISTDELISHISGPDFPTGGIIHGRSGIIDAYRTGKGRLHIRGRYHIEPMGDSGANKDRERIIFTQIPYQVNKANLIKHIADLVNAKKIEGITEIRDESDKEGVRVAIDLRRGENCEVMVNNLFNQTPLETSFSINMVALDNGQPKLMTLRDLVAAFIRHRQEVVTRRTIFELNKALARGHLLEGLAIALANIDDILQTIKQSANRSQARENLLVRTWQSAGVVAMLDAAGAKSIRPEMIDGEDLKAPYGLIENKTRYRLSPDQVNAILDMQLHRLTGLEQDKLTGEYQEILGEIARLTLILDDFDVLMGVVRAELIDIRDEFGDERKTDIVDARHDFNREDLIPEQTVVLTVSRTGYAKTQPISDYQAQKRGGKGRSATAMKEDDVIEHLLVTSTHAHILCFTNTGRVFRLRGFEIPIASRGSKGRPLVNLINLESDELVTAILPVNDLKDENSFVFFATASGTVKRVALSQFANLRAGGLRAIDLAEGDTLIGVAITDGEQEIMLFSNEGKAIRFKEQSIRAMSRVAKGVRGMRVNLLTTIDEEELLDEDGDEVGDDFAVSRVVSLVVAPKQGEILCACENGFGKRTPIDDYPTKGRGGKGVIAIKTSERNGQLVKAIAVTGEEDVILISDKGTLVRTPVAQIANAGRNAQGVKLIRIADEEVLVGMACVEHDDDEIEESEVLADVVQ

SEQ ID NO: 63049 - protein, 493 aa, Moraxella catarrhalis
MSREILTVVETVSNEKGLNPEDIFEAIEQALVVSTKKKVYTEQPEVAIRVHIDRKTGNYDTFRYWTVVADEDHEMPACQLAISDLDENEWQIGDVKEEQIESIEFGRIAATQAKQVIIQKIREAERALVADAFESRIGDLISGEIKKQSRDAYIVDLGEGGEGYLAKDQTLPRETLRVKSRVSAILSQVNRDGRSPQLMLSRTSNEMLIALMNKEVPEISEQIIEIRDVARLPGLRAKISVKTNDHRIDPVGACIGMRGTRIQAVQQELDGERIDVIVWNEDPAQYIISALEPADVIGLVLDEDAKTAEVIFATNDQLARAIGSQGQNVRLASELTGYKLNMILESEYSERQASENQAVIDLFYERLELDRDLAEVLAEVGFADIETVAYAPVEEFYEIDGLDDETITAIQERAKEVIISDEIAKQQNIKEPSAELLALEDMTPAIAYKLAERDIITLDDLAEQAIFDIEDIEGLNSQSAGKFIMAARQSWFE

SEQ ID NO: 63050 - protein, 848 aa, Moraxella catarrhalis
  MISC_FEATURE (9)..(9): X=any amino acid
PKLPQPLKXQAHQVRQKRSMSCVPKKSSMTNQIQLRLKRKSQPKAKAAKEARLKAAEEKQAAERSKKEAAERQAATLAAMRASSEPVKNHEVNATVVVKKIKNPEDAKPADKAEKTDKKKPAKPIKKESATDKKAREAREAEEERLRQMEAETRRKAAEEAQKRTLEQMKQMASRYSDADDGATAAIVRTKDDAPLADGLVGAALEESFEKERREIKRGATGTAGKGGKKSRKGQQEEREMKTRAKGLKSSQANKHKFEMPVEKIVHNVEVGENIVLSDLAQKMAVKVREVIKSLMKMGEMVRESDSIDQMTAALVIEEFGHNFVPISDTQLEDDLQVAVDEKSGNVQTRPPVVTIMGHVDHGKTSLLDKIRTTKVASGEAGGITQHIGAYHVTTDRGLITFLDTPGHAAFTAMRSRGAQATDIVVLVVAADDGMMPQTEEAIDHARAAGTPLIVAINKMDKDTADPDRVINELSVKEVIPEEWGGDTPMVKVSAKSGMGIDELLEVISIQAELMELEAPIDGAAQGVVIESRLDKGRGAVASLLVKRGTLNQGDLVLAGEYYGKVRAMTDENGQRIKTAGPSIPVEILGLPEAPAAGSEFLVVSDEKKAREVADFRAARERERTLDRQNKMRLDTLFESMGSAEVATLNIILKTDVRGSLEALLNALDELSTDEVKVRVISSGVGAITESDVILAESSEAVLLGFNVRADNAGKRKADEAGIDIRYYSVIYGLIDDVKAAMSGMLAPEHREQILGIAEVRDVFRSSKFGAAAGCMVQEGTIYRNKPIRVLRDDKVIFTGHLQSLRRYKDDVNEVKAGMECGLAVKGYEVAVGDKIEVFEIHEVKREL

SEQ ID NO: 63051 - protein, 313 aa, Moraxella catarrhalis
MMNRPTKKVVISGILLLDKPADISSHSALAKAKYLYQSELYDSKKAGHTGTLDPMATGLLPICFGEATKFAQYGLNADKSYVALLSLGVKTDTADRYGQVIQRTDAPSFNQQTLDGIANALIGKQMQVPPMYSALKKDGKKLYEYARLGKVVERDARPIIIHNLTLTKLDNTTIKLIVSCSKGTYVRVLGESVAEHLDCVGHLTDLRRTATSGFDVADAVGLDVLSQLSLPDKINRLLPVDALMTHIPILSIDGLEAERLKMGQRLNVKDRLDSLLEFDDVLLVRLYAQDIFIGLAEVSNSGRLQPIKVVHCY

SEQ ID NO: 63052 - protein, 290 aa, Moraxella catarrhalis
MSDDNSSTWSMRGLRRWLSTAPETRDDLLKLVQDSRQFLEPDTVDMLEGVLDLPATQVREIMTPRPQVHAIASDDDLSDILSVVLETEHSRYPVFDSLDDDAVVGILLIKDLIPYLKAKADGKEQPLKLADIVRKPLYISETARSDTLLRSLQKAQVHMAIVVDEFGSVSGVVTMEDLLEEIVGDIVDEHDDIDEDSDINNIIPHPDKSGVWLVQASTLISDCNEILGSHFDDTDVDTMGGLVMQALGFVSHLQGAVVQIDEWQITVVDVEARFIHLLELVLIPQLENAE

SEQ ID NO: 63053 - protein, 931 aa, Moraxella catarrhalis
MLTKIISTVIGTKNDRELKRMRKIVTKINSYESSIQSLSDDELRQKTEEFKLRHQAGESLDKLLPEAFAVCREASKRVNGMRHYDVQLIGGMALHEGKIAEMKTGEGKTLMATLAIYLNAISGKGVHVVTVNDYLANRDAQLNRPLFDFLGLTVGVIYSQQAPQEKFAAYRADITYGTNNEYGFDYLRDNMVFSLSEKKQRPLNYCIIDEIDSILIDEARTPLIISGQAEDSAHLYALIDNIVERLVRSKDEEDNKNNTDGDFWIDEKNRTIEISEKGYEKIESFLAEVGELGENESLYSPARLPLLAHAQAAIRAHHLFVKNIHYIVQDGEVIIVDENTGRTMPGRRWSDGLHQAVEAKEGVEIQAENQTMATTTFQNYFRLYDKLSGMTGTADTEAAELKSTYDLDVVIIPTHRPIARIDMDDQIFLTKLGKYKGIIREIKQITEKGAPVLVGTATIEASEELSYLLNQEGIAHNVLNAKQHEREADIIAQAGRPRAVTIATNMAGRGTDIILGGNWQAELETHEVITDEMRREALTAWQARHDEVLAAGGLHIIGSERHESRRIDNQLRGRAGRQGDPGQSRFFLSLEDDLMRIFAGDRITSMFRAVGLKEDEAIEHKMVSRAIENAQGKVEARDFDARKSLLKYDDIANEQRKVIYSQRDDLLAEMDLQAGIQAMHHEVYHALINQFVPPGSIDDQWNIDGLEDEIEEAFRFDMPINDWLDADRRLDEEGLRAKIIETAIERYQTRREQMGEQTAAQLERHFMLTSLDRHWKEHLTQMDQLRKGIHLRSYAQKNPEQEYKRESFELFQSMLGAIKSDLIQDLARVHVPTPEELAALEEQRRQQAEQMRMMFEQQAQLDDVQSLDNRPAEETPRSLGRMTVTLGATSAPQAADTTTDEALVIPKNIHRNAPCPCGSGLKYKQCHGKLS

SEQ ID NO: 63054 - protein, 333 aa, Moraxella catarrhalis
MSTMSNTISTSDEFSHTTVLLPETVAMVLGVKQLNDVTSKVSGVYVDATFGRGGHSQLLLEYLAPEATLAVFDKDPEAIAVAKSLAAQDTRIKVVHDSFAHLTKNLQALGIDKIDGLMADLGVSSPQLDDGTRGFSFMRDGVVDMRMDTTRGEPVSEWLQRVSADELADVLYEYGEERHSRKIARAIKSMQNYTSTRQLAEVIKQAHPAWQKGKHPATQSFQAMRIFINNELGDVEAFLAQSIGVLKAGGMLAVISFHSLEDRLIKQFLQRHSRGQYEEDARLPIIPKRPKYFGKPKRIGPCDQEVKANPRARSAWLRGAVRSDVALVAQDED

SEQ ID NO: 63055 - protein, 652 aa, Moraxella catarrhalis
MTKQRKNPKTGSATTAASLHRPKASAKTFGILTKKRIKKSGANLAGGKQDAWRYLIIGGLMLCIFMAIFARAFYLQIVNPQFFIDKGDELITGKRIEPAYRGVITDREGAPLAANAPLYTVFFDPYAYAEEYYRLDNEIKTTKSETAKQKALKKLKEMDLVRLAAAANYPLEKLEAAVGIDHTLDTSNSQKVKEALPKGASSRRLVLLNRVSPEVAKSVTDLGLFAIGREQYFQRYYLQAEPNAQLLGYMAQSSDETQGGYIGRAGIEAKYNERLAGKDGKVQILRGTGRQPIQEIEQIEPLIEGENIRLTIDSRLQYVLYKELEQVGRLQSARSSSGMVVDVKTGEVLAMGSWPSFNSNNLSERDGANERNRPVLDVFEPGSVMKPFTVAAALESGEYTTNSVIDTSPGSVSVGGYTIRDGGNYGAITLDKLIQKSSNVASTKIALNLPTDAIANMQLKFGFGSKTALDFPAEASGRVSIPKERELARRATLSYGYGQQVTLAQLAQAYAALGNRGLMQPLKLVKDQKTPEPTQVIHAGHAEAIVRMMELVTGPGGTGQAAAINGYRVAGKTGTSRRTNPQGGYYTDQHRVIFVGLAPASDPRFVVVILVEDPRRQSYAGQVSAPVFHQVMKEALRLYNVPYDKPLRVLSP

SEQ ID NO: 63056 - protein, 521 aa, Moraxella catarrhalis
MMTPISFREVIQKAVATPHTVAAKLGLMALESVFSPILACQFDQFCLDSRKIGVDDGFVLLKSSSQDAQTNLNNANRYLMSVKDSAAFVISEFDLAGLDLDDIQIPIISVPNIRTYLGDLIAARLQLHHAVALPKIIAVTGTNGKTTVSQLIAQLCQASGISSAVMGTAGNGRLGQLMQSANTTGDVLLTHTFIHQMAQEGVQMIALEASSHGLDQYRLQGIPIIGAIYTNLSRDHLDYHADMASYRDAKAKLFDQSLFPTLRFGVVNLDDEPALFDYETADFQIIGYSQQKPNADFYAKAVRLSLDCVEIEVQTPQGEMTAISPLLGLFNVDNLLASMAAFTALNPARAADLPNLITQLQGARGRMQRASSQTGAFIIDYAHTPDALKQVLSSLRRHCTGRLIAVFGCGGDRDRGKRPQMTQAGLAYADQVILTADNPRSESPSAILADMQKGLSCEDHYKIIIEPDRKNAIELAVKTAGKTDIVVIAGKGHETYQEIQGVRYDFDDLAVLGEFLQKYQK

SEQ ID NO: 63057 - protein, 494 aa, Moraxella catarrhalis
MTNSSAYFWNQDNLKQATQGQWHHSDKAEIDARRIVTDTRQIQAGDVFLAIKGERFDAHDFIQNAYQQGASAAIVERVVDCDMPQLLVADTKLALGNLGKFRRDAHPDLTVIALTGSSGKTTTKEMIGAILSQIAPTLITRGNLNNDLGVPMMLLELTDEHRFLVIELGANHLGEIAYTASMVRPDVALILNIGTAHLGEFGGRANIACAKSEIYSALTSQGVAILPFSDDFYPELLKQASQFTKLHLSFGERAVPIEQAGLEATDQAMLKAEGISSVLMMGDLFADDIETFATHSTFTLNTNIDIDQIDSLPVHLPFIGEHNVANALAAASATFALGVPLEQIAKGLLRATPPKGRLMRLSMDGYHIIDDTYNANPTSMLAAAKVLEAELDTKILVLGDIFELGDAADDEHTKLGHQLALLEIDHVFTLGNHMAHTAAAINEQKPIARHYTDKPSLLKDLCQLLSHGSATVLFKGSRGMAMESLIADLTACNH

SEQ ID NO: 63058 - protein, 365 aa, Moraxella catarrhalis
MLYWLLQQTDIAIGSLTLRALLAVITSLLIVIIGGKPVIHYLRTLKYGQAVRDDGPKTHLAKQGTPTMGGVLILVAIGIATLAWADLGNPYVWILMVVMVIFGAVGWADDWLKIKHKNPQGLIARKKYFWLSVGSLFAGCSMYYIATQQDTTAMIAMQDMLIPLFKDIVIPFSAIPLGLGFIIATYFVLAGSSNAVNLTDGLDGLVILPVVLVAAGLGVFAYISGSPHFADYMHVPYIAYNAEVTIVCAAMIGAGLGFLWYNAAPADVFMGDVGALSLGGMLGTIAVMTRQELAFAIMGGIFVAEAVSVILQVGSYRLRKQRIFLMAPLHHHFEELGLKETKVVARFYIVCIILVVLGLMTLKLR

SEQ ID NO: 63059 - protein, 404 aa, Moraxella catarrhalis
MTTQFKFGQYPDINGYFGRHGGRFVSETLMAALEELDEIYQTAKADPKFWDEFMADLTDYVGRPTPLYFAERLTQQVGGAQIFFKREDLNHTGAHKVNNTIGQALLAKMVGKKRIIAETGAGQHGVATATIAARLGLECVVYMGADDVERQKMNVYRMRLLGATVVPVTSGSRTLKDAMNEAMRDWVANVDTTYYIIGTVAGPHPYPMLVRDFQAIIGREARIQHLQKTGRLPDALVACVGGGSNAIGLFYDFLNDHEVVMYGVEANGLGIDTPNHAAPLQAGRVGVLHGNRTYLMADDDGQILGTHSISAGLDYPGVGPEHSFLKDIERVHYVGVTDDEALHAFKEVTSKEGIIPALESSHAVAYGLKLAATMKPEQSMIINMSGRGDKDLHTVMAKDGMQID

SEQ ID NO: 63060 - protein, 168 aa, Moraxella catarrhalis
MRLTTRGRYAVTALLDLAVQESRHQGAVSLSDIAKRQSISISYLEQLFSKLRKKGLVNSTRGALGGYHLAKPLEDIDIMSIITAVDESINATQCGGKGNCQDGAMCLTHDLWHNLSHHIESYLKKVTLAQLLETKNTQTIADRQVNRLHQFEKDNSQITTITLIGNPA

SEQ ID NO: 63061 - protein, 127 aa, Moraxella catarrhalis
MAYSDKVIDHYENPRNVGNLDKAAKNVGTGMVGAPACGDVMRLQIQVSDDGIIEDAKFKTYGCGSAIASSSLVTEWLKGKTLDQAAAIKNKDIANELALPPVKVHCSVLAEDAIKAAIEDYQTKAQA

SEQ ID NO: 63062 - protein, 457 aa, Moraxella catarrhalis
MFDTLTERLSGSLRHIAGTGQLTEDNIKDTLREVRMALLEADVALPVARNFVARVKEQALGQEVLKELAPGQAFVKIVYDELTEMMGSANQTLEMTGKPPLVYLLAGLQGAGKTTTAGKLAKFLQDKQNKKVMLVSADIYRPAAIKQLEQVAAQVGASFVPSTTDENPIDIARRAIDEAKLQYQDILIIDTASRLHIDDEMMSEIKELTKAVNPVETLFVVDSMTGQDAANTAKAFNDALPLTGVILTKTDGDARGGAALSVRAITGKPIKFLGRGEKLEALELFHPERIAQRILGMGDVLSLVEEVEQKIDREKAEKMAKKIQKGGEFDLEDLLTQFQQMKNLGGMAGFLDKMPGLGGADIQKAMEEARPEEKVKEMEALIHSMTPFERQNPDKITPSRKRRIAAGSGRQIQDVNRLLKQHKQMAKMMKMISRPDGIGKMMKAVQGLARGMSGGGP

SEQ ID NO: 63063 - protein, 542 aa, Moraxella catarrhalis
MFEVVFSFIFGEFMVNSTKQATPIAVNLFFGLLLAGMSIYFIQWGLVYTMHQQVLLFMIASFFGIFMAFNIGGNDVANSFGTSVGAGTLSVTQALAVAAIFEVSGAVLAGAAVTDTIRSGIVDIGQLGVSPNQFIYLMLSALVAAAFWLLFATKRGLPVSTTHAIIGGIVGSSIVLGISIGGVDFAFSTVKWSKIRDIALSWVISPVLGGALSYLLYSIIKKNILAYNDKAELVVKTIKAKKKALKREQKEYFETLDDKEKLPYTNALLRDQEAFKDGDCQRDDLETQYYRAIFDLERRRDNLDTLKALKTWVPLIAALGAVIMTAMVVFKGLANTGLQLSILQAGLVMGMLGALVWLTAFIYTKTIRGKHKEALGKATFVMFSWMQVFTACAFAFSHGSNDIANAVGPFVAIMDVIKNNAVEAQATVPAPVMLTFGVSLIVGLWFIGKEVIQTVGTNLTEMHPASGFSAELAAAAVVMGASSLGIPVSSTHILVGAVLGIGLVNKNTNWRLMKPIGLAWVITLPAAATISAISFLLLTYFL

SEQ ID NO: 63064 - protein, 279 aa, Moraxella catarrhalis
MTPTDNFDDLLALMARLRTDCPWDAKQTNASLQKYAIEEVYELIEAIQTDDGSAFATEQLKSELGDVLLQVIFHTHLYQEAGRFDMSAVILALQDKLIRRHPHVFEQENLQTDADVKRRWDEIKAQEKAHLAALGQPIRLLSDVKAGSALMQSQHLQGKAASVGFDWSNLQGVLDKLNEELGELYELLPLGDFNYKTDKLSDNQKQKLSDELGDVLFVLTNLARHLDIDSEMALQGTVGKFRRRFAFVEQSLMDQGKSFENSDLAEMDRYWEMAKANET

SEQ ID NO: 63065 - protein, 599 aa, Moraxella catarrhalis
MGKVPKKPKQTKKSICTTHSAKSLRLQKGSLPHSIVEVIGTLQKAGFDAYIVGGGVRDSLLGLAPKDFDAVTDARPHEIKAIFGGRCRIIGRRFQLAHVYSGREMIEVATFRAPPKDDTHTTEDGMITRDNVWGDIEQDFARRDFSINALYYQPIKGEVLDFCGALKDIDSHTLRLLGDAKVRIEEDPVRLLRALRFKAKLGFEFDQDLANQFHQDNWTLLEQVSTHRLYDETQKMFGGGYLTPLLPLLFEHGAMSSLMSFAPNEPTPLMMVVARNTDRRIAADKSVNPAFFYAAMLWENYLYQLAKYKKRGLPFHEAQIKAAEKTIDAQRIKTAIPKFAEQFITDIWLLQPKLVNPRVRDIANLERLPKFRAAFDFLVLREGYDTHPLSEPTQNMGAWWQAYQDASAVDKAIMIEAFGTQAGTPKRRRDRNAKKDTKTRELEQLKELSLRSDDELIKTRPEPLFVVAGAEDLVKKTKARTKLPTPAVPTPVFEPVNFTQADFEKLLANDEPYIPASRHRKRKPSSTLSIKEREQGLIKQSDEHWSGSKQSAQTKKPSRHQSKQVDGVTDIEPKLVENQAKPKRTRRRKSNAKPKADSI

SEQ ID NO: 63066 - protein, 162 aa, Moraxella catarrhalis
MTTCFIGLGGNITNELGTPTEHIINAVQAFKQSPHFTDVKMSSLYQSKAFGITDQPDFINAVLSANTSLPPLELLDFCQGLEQTAKRVRLRHWGERSLDVDILLYGDKRIHHERLTVPHQGLFERNFVLIPMLEIDECLLVNGQKLADLNESNSWQGLNKLT

SEQ ID NO: 63067 - protein, 280 aa, Moraxella catarrhalis
MSDQAPSSITPKPKAPITLSTLNKLKAEGKTFSCLTCYEASFAHAMQLADIDTILIGDSLGMVVQGQSSTLPVGVQDMVYHTQNVVRGNSHALILCDLPFMSYATLSDAITSAKAVMQAGANVVKIEGGSELSDTVKVLTNNGVPVCVHLGLTPQSVNVFGGYKVQGKTDAQADKLMRDCTAVVNAGASLLLLECVPAPLAKAVTERFDVPVIGIGAGVDTDGQVLVMHDMLGIYTRKPAKFVKNFLTDDSNQTKDIVGAFKAYHHAVKQRAFPTKQHSF

SEQ ID NO: 63068 - protein, 296 aa, Moraxella catarrhalis
MMPKLIAPNSIIVVSGRSGSGKTSVLNTLEDFGYYPLDNLPLSIVPLAIEKLVNDSQIHRIAVGIDVRTPKADLSNFGQVYDSLIQTYGKTALSVLYTTAQDDVLVARYDATRRVHPLMAMAGNLPNAIQKETALLEPIACHADIKIDTSLLNIHELKNSLRQHLGVDNHIIVNVLSFGFRHGTPKDADFVFDVRTLPNPHWQMDLRPLTGLDAPVQEFFAQFSAVHEMTHDISTFLLKWLPDFIENNRHFVTIAIGCTGGKHRSVFVSQAVGEILTGHLPDKMQVNVKHREKSFW

SEQ ID NO: 63069 - protein, 400 aa, Moraxella catarrhalis
MHTQFVLNQAKKETVMKNLLPQDWQQPHISEADTADKWLIPPIVDLCAHLREPGHQSHGTLASEGRAARQNGFLHVVMPPDTSPVLENGSLLKGLKQKAWADGGIYLHVLGALSAGLEGKQPANLAGLKQGGAIGVSNTAAGFESDLVLLRCLEYAATFDIKVFFYPDEPSLSAGGVAHDGYIASFHGLQGIPWLAETIALSKQILMTEETGIHAHFSQITCRTSVELIRHAKQKGLPITCDVAMHQLHLTDDDIEGYNAHAYVLPPLRSNTDQKALIKGLQDGTIDAICSHHEPLSSSAKQAPFAQCQAGISNFDTFVSLGVKLVADGVLSTEQLVEKICLNPAKIAGITDYERIGGAVLIDPNQAWTVTKDTMLSAGKNTPFLGQTLTGRVEKVFFDG

SEQ ID NO: 63070 - protein, 270 aa, Moraxella catarrhalis
MNKTLFLFVPATRLDWVSKAKQSKANAIIIDLEDAVADDQKNHARTALMALDAKGECSYWLRINAVHSMHHLDDITCMLKLNHLLGVVLPKCQNKHQVESVYHHIHKPVIAMIETAVGMANIAGIAHADGLWAMSFGRLDLMYELGVQPDSPASQLIFDKIRTDLLIHSVANGLHPPIETIFNDFEDETGLAACVRHWCDFGFAGQMMIHPKQIAVADGVLTAQAEQMAFAHAICQKYQKTGETVFAIDGKMVDLPLINWAKNLIKVAKN

SEQ ID NO: 63071 - protein, 427 aa, Moraxella catarrhalis
MALIVQKYGGTSMGNITRIKNVAQRVKRWYDNGHQVVVVVSAMSGETNRLIGLAREISSDPDPREYDQMVCTGEQVSISLLAMALQSLGVDAKSMTGDQVAIHTDDTHTKARIQSIDTDSILSELNAGRVIVVAGFQGIDEHGDVTTLGRGGSDTTGVALAAALKADECQIYTDVDGVYTTDPRVTPKAKKLSKITFEEMLEMASLGSKVLQIRSVEFAGKYQVPLRVLSSFDEGDDGIFDDKFKQTVGTLITADEGDDMERAVISGIAFNRDEAKIVVLGVPDHPGIASAILSPIGRANIEVDMIIQNMSENGVTDFSFTVPRGDFNKAMKILNEQVKDDIGASDVVGTSDVVKVSIVGVGMRSHAGVASKMFETLASQNINLQMISTSEIKVSVLIKEECLEKAVKSLHTAFGLDREDGESKVAG

SEQ ID NO: 63072 - protein, 367 aa, Moraxella catarrhalis
MSKKINVLMMAAGTGGHVFPALAVADEMVARGAVIHWLGTPKGMENELVAKHGHTMHHIDMQGLRGKGLVRAIKLPFMLFKAVMASKNIIKNNNIDVVIGFGGYVTAPGGLAAKLCKIPLIIHEQNAIAGMSNKNLARHADKVLQAFDGAFDSDGKKVLTVGNPVRQSIANIAPPKERYLNDDSPLKVLVVGGSLGAKAINEAVVELLKLSDKPLTVRHQCGKDNHNTMLVAYSQAQIDTSRHVFEVMPFIDDIAQAYSWADVVICRAGALTVTEIASVGVAAIFVPLPHAVDDHQTANAKSLTDKEAGILLPQHELSGETLAQILTGLDRQKCLDMAKKAQESAKHHVAKTVAELVLAYGDDKGSQ

SEQ ID NO: 63073 - protein, 486 aa, Moraxella catarrhalis
MPNSTKVKTLPKRLIEIPEMRRIQNIHFVGIGGAGMCGIAEVLANQGYVVTGSDIKANAMTERLENLGVTVHVGHDASNIKMADVVVVSSAIDRQNPEIRAALKAHIPVVRRADMLGELMRYRHGIAVAGAHGKTTTTSLLTMMLTEAGLDPTYVIGGKLNASGKNAALGASRYLVAEADESDASFLSLRPMACVVTNIDEDHMETYEGSFDKLKQAYVQFLHNMPFYGLAVLCGDDKELYAMIDDIARPVITYGLEKHNDVQAVDVIADGTKTHFTVLRKDKKPLPITLNIPGIHNVYNALGAITMATDEGVSDKAICQAVEKFAGVGRRFENNGSYPLTDGSGDVVLIDDYGHHPTEIAMTIKAARQSYPDRRLVMMFQPHRYSRTRDCFSEFVNVLSQVDKLILLDVYSAGEELIKGATSNDLARSLRERGQVEPIVLNVNDKEQITQVLKITLNANDLLMTQGAGNVGQLCQELVKNGLFLG

SEQ ID NO: 63074 - protein, 333 aa, Moraxella catarrhalis
MSRIGQKWVVFGVILKGLKNLKKGKNMSKLNTKDGQNFGKVAVVCGGTSTEREVSLNSGMAVLNALLSKGVDAHHFDPADTDISHLRAYDRVFNVLHGTFGEDGSLQGVLDGFNLPYTGCGVLASAIAMDKFRCRLLWQSLGLPNVPYVVLHDDSDFSAVEREFGLPLFVKPAAEGSSVGVFMVEQAGDLAKIYPKLKQYHGEILAEKAMMGGEYAIPLLGEQVLPSIRIIPKGKFYDYEAKYLRDDTIYQCPSDLTPEQERQMGELALKAFRAIGGRGWSRVDFLKGHDGKLYVLEINTVPGMTDHSLVPMAAKEAGIGFDELCLQILRQTL

SEQ ID NO: 63075 - protein, 188 aa, Moraxella catarrhalis
MAAIINQTIPEFSTQAYVNGEFKTITSDDVKGSWAIFMFYPHDFTFVCPTELEDMAAHYEELKGLGVEVYAVSTDTHFVHKAWHDASPAIGKVQYPMLGDGTGKITRGFNVMIEEDNAALRGTFLVDPDGVIKVAEIHDLGIGRSAKDMVRKVKAAQYVRDNDGEVCPAAWEAGQETLKPSLDLVGKI

SEQ ID NO: 63076 - protein, 433 aa, Moraxella catarrhalis
MTVQNHPADNPPSSWAYPKSQIKQYDIAIIGAGVVGMVCAILLAKRGKQVIILDSKPTPSKASFDQRLAQRDARVYALNLSSIDLLKSADVWDGITRRADYDQMHVWARDDFGELIFQDEHAFENIMLGSMVEPSVLDEALWHRAKAYENLTLKYEISLAAHGMAFDEMPDGVCIRYQADNQAKMVKAKLLIGADGRASLVRREMGVGVDTLNYHQKAICCAIRTDQPHGNTARQVMLPTGTLALLPIANLNQDDQCRWQSIVWTLPKQIAETYLSDYHQNPDSLINRLALASGYVLGDIHKIQSVASFPLSAQAANRYHKGLIALMGDAAHGVHPLAGQGLNLGLSDVKALLALVDVYHAKNMPLSTRLLSDYERTVKGHNSLMMHSFSMINFAYTSALSNISVIRHARSEIVKAISKSPSVMRLLIERANC

SEQ ID NO: 63077 - protein, 469 aa, Moraxella catarrhalis
MSNKLFDLIESSGAKWVDFRFTDTHGKELHLTFPASTVDEDTLEDGKMFDGSSVAGWKGIESSDMILLPDAKTAYLDPFYESPTVVVSCDVIEPATMQGYEKDPRSIARRAETYLKSTGIGDTAYFGPEPEFFVFDDVKWQIDESGAQHSISSEAASWSSNKEYAWGNNGQRPALKGGYAVTAPMDYYHDMRAVMCDRIEDIMGEGRVEVHHHEVASGQLEIGVSFNTLVKKADEVQQFKYVVQNVANQFGKTATFMPKPIVGDNGSGMHVHISISKEGVNTFSGDEYAGLSMTALYFIGGIIKHARALNAITNPTVNSYKRLVPHFEAPIKLAYSASNRSASIRIPHVSSPKAVRIEARFPDPAANPYLCFAALLMAGIDGIENKIDPGEAADKNLYDLPPEEEALIPTVAENLETALKALKQDHAFLLKGDVFSKDMIDAYIDLKMQEVHKLNEAVHPLEFDLYYRC

SEQ ID NO: 63078 - protein, 611 aa, Moraxella catarrhalis
MTQQTTQSPNMTGHTQTKDAAAHFRELQDIIARGEIAMMSGAEMLVQALIDEGVEYIFGYPGGAVLHIYDALFKQDKIEHILVRHEQAAGHMADAYSRTTGRTGVVLATSGPGATNTVTAIATAYMDSIPMVVLAGQVPSSLIGDDAFQECDMVGVSRPIVKHSFQVRHAEDIPTIIKKAFYIAGSGRPGPVVVDIPKDMTNPSDKFAYIMPKTVNIRSYQPTNKGHGGQIKKAIETLLSAKRPVLYSGGGVVLGNASKELRQLADTLKLPVTNTLMGLGAYPGSGEQFVGMLGMHGTYEANMTMHHADVILAVGVRFDDRVTNNVKKFCPNATIIHIDIDPASISKTIMAHIPIVGDVKLVLNEMLALLAEIDKCIDEHALNDWWQQINEWRKRHGLRYDADDMTAKTHAIKPQHVVEMLYKLTNGEAIITSDVGQHQMFAALYYKYDEPRQWLNSGGLGTMGVGLPYAMAAKLAHPKKTVVCITGEGSIQMNIQELSTCLQYNLPVKILNLNNAQLGMVKQWQDMLYEGRHAQSYMQSLPDFVKLAESYGHKGVKITNPATMQEELKQALEMDGLVFIDVYVDKGEHVYPMQVAGQSMRDMWLSKGERT

SEQ ID NO: 63079 - protein, 180 aa, Moraxella catarrhalis
MVIKRGAYLMPNQVHKHLISVLMENEAGSLSRVVGLFSQRGYNIDTLNVAATDDPTISRLTLTTITTHDKIEQITKQLHKLIEVVKVQNLSELSGGHHVERELMLIKVRATGSNREEIKRNADIFRAQIVDVSTNLYTILITGDAGKLDGFIDVIGRDRILEVVRSGVIGIARGEKTLAI

SEQ ID NO: 63080 - protein, 340 aa, Moraxella catarrhalis
MSLNIYYDKDCDLSIIQSKKVAIIGYGSQGHAHALNLKDSGVDVTVGLRQGSASWKKAENSGLKVAETSEAVAGADVVMILTPDEFQRELYKEVIEPNIKQGATLAFAHGFAIHYNQVEPRADLDVIMVAPKAPGHTVRSEFTKGGGIPDLIAIWRDASGGAKQLALSYAAGVGGGRSGIIETTFKDETETDLFGEQAVLCGGAVELVKMGFETLVEAGYAPEMAYFECLHELKLIVDLMYEGGIADMNYSISNNAEYGEYVTGPEVINEQSRAAMRHALKRIQDGEYAKMFIAEGQTNYPSMTARRRNNAAHPIETTGEKLRAMMPWIGGNKIIDKQKN

SEQ ID NO: 63081 - protein, 886 aa, Moraxella catarrhalis
MQCIFIDILSLINLNEYIVPMIIFKDNYMNFEKYTRTLQEVIRGAQQSSLGHHHTAIAPVHLLSAVADNHTALSIIEASGANLARLQDEIKTLLSYQAVINQPTGQVNLSPETIKVLQATENYAAKAGDEFVPIEWLILALFENKSLNKAFVSSGVTAQNLQTIMKNIRGDEAVTNQNSEQNRQALDKYTINLTERAMAGKLDPVIGRDDEIRRTVQVLSRRTKNNPVLIGEAGVGKTAIVEGLAQRIVNGEVPESLRNKSVLSLDMGSLIAGAKYHGEFEERLKAVLNELAKQDGNIILFIDELHTMVGAGKTSGAMDAGNMLKPALARGELRCVGATTLDEYRQYIEKDPALERRFQKVLVDEPTVEDTIAILRGLKERYELHHGVKIMDSAIIAAAKMSHRYITDRQLPDKAIDLIDEAASRIKMELDSKPESLDKLDRRIIQLKMQLEAVKNEEDAGAKSQVKSLEQQIDDAQKQYSELEEVWKAEKVGVEKSKQLQAKLDTARITLEKALREGDYARASQLQYGEIIALEKQLAEEQTDEPEHAPKLLRNKVTDNEIAEVVSHATGIPVAKMLQGERNKLLAMEDVLHERVIGQNEAVAAVANAVRRSRSGLSDPNKPSGSFLFLGPTGVGKTELTKALANFLFDSEDAMVRIDMSEYMEKHSVSRLVGAPPGYVGYEEGGVLTEAVRRKPYSVVLFDEVEKAHPDVFNILLQVLDDGRLTDSQGRVVNFKNTVIIMTSNLGSHAIHEMTDSPYEDIKTAVMTSVTGHFRPEFINRIDEIVVFHGLGADQMTGIAEIQLDRLRTRLKERELGLSVSDEAMNHLVSVGYDPVFGARPLKRAIQQEIENPLAQLLLSGEFTTGDTIFVEWLNDQFTFNKLRYS

SEQ ID NO: 63082 - protein, 207 aa, Moraxella catarrhalis
MANLPHLSLTQFILYADHGINSHIVRLLLEEKHLNYETVFIGEERPEELIELNPYHTLPILVNRDISLYEHNVIFEYLEERHRVPRLMPDAPSERAKVRQLAWRLQKDWLKHGYTLLTHSDSFDIQAATAARKSLSDSLVTIAPLFGHKPYFMSDTFGWCDVLLLPLLWRLNKMGVHLPTHLIRPLIHYQEQQFARPSFINSISFKE

SEQ ID NO: 63083 - protein, 398 aa, Moraxella catarrhalis
IITSLLDNDLYKFTMLQAMLHQFPQTHGVYRFRCRNNHETAFALGEIKADLEQQLDYLCQLKFTQDELDYLRGLRFIKSDFVDYLELFSLKRRFITVSTDENHFLNIDIEGPMIQAMFFEIFVLCLVSELYYRRLATDDIMAEGQKRLDAKIALLHEYHAKQSTQPMPADNAFTVADFGTRRRFSKAWQYHVVKSLHEACPVIVRGTSNVYLAKQLGITPIGTMAHEFLQAFQALDVRLRNSQKAALESWVREYRGDLGIALTDVVGMDAFLRDFDLYFAKLFDGLRHDSGDPYEWGDKAIAHYHQLKIDPKTKILTFSDGLTLQKAWDLHQYFKDKIKTGFGIGTNLTNDLGEVQLNIVLKLVACNGQPVAKLSDSPGKTMIDDDTYLAYLKQVFEI

SEQ ID NO: 63084 - protein, 295 aa, Moraxella catarrhalis
MQVSNRLALTGLTIKQIRAIFKQLQSDVLPMHWLDGWLMHVLDKPFIFLMTDEDYQPTLEESSKITAGIMQLSAGKPLAYLTGQQSFWGRHFLVNAHTLIPRADTEILVETILNYAKAQQKIRQTDNKNLVNILDLGTGTGCIGITLALELEFAQVVLVDISSEALKVAEQNNHRLNARCQLLQSHWLQKVSGQFDIIVSNPPYIKENDEHLVNLKHEPITALVAAEDGLTDIRHIIETGRAYLKDGGLMAIEHGFDQAEAVRNLYLSSGYLDVYTIQDYGGNDRVTLGRYKNCG

SEQ ID NO: 63085 - protein, 253 aa, Moraxella catarrhalis
MDSHTVDGHLTDDEMMRYARQILLDDWDVTSQIRLKNSHAIIVGMGGLGCPIAQILVRAGIGSIDIIDHDVVDVSNLQRQILYTALDVGKSKAMAAKDALQKQNEWVSITAITDKITQTNTDQFIKHTDLVIDCTDNFLIRDILNRTCHQHKLALLSTSAIAQTGQIALYTTDTACYQCVFGDALGDEMNCSTSGVLASTVSVIGALASQVALSFLGKHINPIANELLIWQGEQFQLKKLNICRDEHCSVCGA

SEQ ID NO: 63086 - protein, 353 aa, Moraxella catarrhalis
MNTTKKRILTGITTTGIPHLGNYVGSIRPAIAEAHRAFENHDGDAFFFLADYHGIIKCFDPDEIHRSTRAIAATWLACGLDPEKVIFYRQSDIPEIPELAWILNCSCAKGLMNRAHAYKAAVDMNLSKEDTDPDYGISMGLFGYPVLMAADILMFNATHVPVGKDQIQHIEMARDIAGSFNFKYKPLFVEPFAVVDENTPLLTGLDGRKMSKSYGNTIPLFGDGNPQIDPEKALKKAVMQIVTNSQPPEEPKDPEHCTIFEIYKAFGTPEEIEALATHYRRGIGWGEAKEILFNKINHEIAPYRERYLHLMNNPKELEEILQMGATKARRVAQKQLDKTRRAIGIKPLAKLKS

SEQ ID NO: 63087 - protein, 328 aa, Moraxella catarrhalis
MNQSKPKNNSTINEQNATNKPAGEKLQKLLARLGLGSRRGLEEIIKSGRISINGKVATLGDRVILTDEIRIDGRQVRLKAEREKRRRVIAYYKPEGEICSASDPQGRPTVFDRLPKLTNDRWVMVGRLDINSSGLLLFTNDGELAHRLMHPSSGIIREYAVRVLGEVTSQIASQLTAGVELEDGVAKFDDIKEGGGIGVNKWYHVTIKEGRKREVRRMFESQTLKVSRLIRTRYGTVILPKELRTGRFIELDASDIGKLVDSVGLRQRQGTGLNHATKEKQARIHKKPLKSREIRRQKHEAHERREERKKHTPKHRTPNLSRTKFTKI

SEQ ID NO: 63088 - protein, 505 aa, Moraxella catarrhalis
MAALSAGAMFSLALAPYFIIPIAVLSPMLLYALLKKCDSPKRAFWLGEFYGFGTWVVGAFWLYHSIHYYGGVPSWAALVLIGVMSLIMGLFHALMAWAFVRFSAKQPISFAGFWILQEWLKTWVLSGFPWLFVGYAFTDVSWLNGIAPIFGVFGLSFLAVFVGAAVIELFYRNIGHIMIGGILTTAVIMISLIGVNWTKPTGKLTSVSLIQGNIPQDLKWQEGFGIQTLGIYAGLSQSEWGRDLVVWPEAAIPLFQDEASDHINALAKQANADGSAWITGIMYRKTPSDASNQAEFYNSVMLYDANQVSVYKKQQLVPFGEYIPFGGLLDILPGLEGVASLSRGDDKQPPLKLGGGVGDTIGAAICYEVAYPETTRKNALGSNFLLTVSNDAWFGTTAGPLQHLQMVQMRSLETGRWFVRATNNGVTALIDHQGRIIKQIPQFQRDILRGDVPSYVGHTPYMVWGHYPMLGFSLVLIFLSIMAKKMKNTTAKREKFYTADGVVDR

SEQ ID NO: 63089 - protein, 158 aa, Moraxella catarrhalis
MTSETLTLALDYGVKKMGMALGNSITHNARPFDILAMNNGQPDWDNLLGIIEHWGIDRVLVGLPLNMDGTESMLTKRAHKFARRLAHRLGERRQAVSVFIYDERLSSKEAKMIALDNGWIASSSEPIDDIAACLLLDSYYHAPNHAIYVSERKDSHKD

SEQ ID NO: 63090 - protein, 307 aa, Moraxella catarrhalis
MAKSTIPRADSAVIYDDDPEYLSEFRAAMLARGLSIATRNAYSQDVRLCIRLSDTPVNLWQPSDVRNHLMCLKDAKKSERSIARALASLCQFFLWQIESGYREDNPCESIKTPKLGKTLPKTLSEQEVSSLLDAPDISSVRGLRDKAMLEVLYACGLRVSELTSLSLEHLNLTAGWLSVTGKGNKMRLIPLGEYALSALNEYLAVRGSLLIGKKDCQAVFLTEQGGYMTRHNFWHLIKKYALMAGINTAISPHTLRHAFATHLVNHGADLRSVQLLLGHSDLSTTQIYTHVATTRLQNLHAKHHPRG

SEQ ID NO: 63091 - protein, 581 aa, Moraxella catarrhalis
MTESTTQTTDSTTENFVPQFSDLGLNKPILKALTKSGYTTPTPIQAKAIPHALNGRDLLLSAQTGSGKTAAFVLPVLDKMSRKPTIEKHVQALILTPTRELALQVQDSVRRYGDGMRNMFSVPLVGGAPYGGQLRALKKGVQVIIATPGRLIDHMREGRVDLSKLDMLILDEADRMLDMGFADDIKEILQNTPQTRQTVMSSATWDGAVGKIAESFTVNPEKVSIKVESAHIDESVYYCDDFNHKNNILLQVLNNPKIKQAVIFAATKMSTEKLAAQLVEAGFKARYLHGDLPQGKRNRIVSDMKSGKCDVLVATDVAARGIDISAISHVINYDLPRQVEDYVHRIGRCGRAGRTGVAVNLCSIDDNRQLEHINRYLKRQMSVSTIEGLEPRRNFGIQSQERRRGRSKSQNRTRQDGRQNFERTDHKFGSRNRHEHRHERSFEGKRERFEDRERSVNRRENDENHERRNSRFEARSDRRFDKNRQGYYQADGTARQDKKAYTRNFDRRDNDRNDTRFDKPTKKFGTQTDFDRPRRNKAFGDKVKPNTGFDKFGGKSRPKAVEEIFFAKRQDKKAKRRFGEF

SEQ ID NO: 63092 - protein, 309 aa, Moraxella catarrhalis
MNIAKSVTDLIGKTPLVELNRLTEGLSARVVVKLEYANPASSVKDRIALSMIDDAEKSGLLTKDTTIVEATSGNTGIGLAMVAAARGYRLVITMPESMSLERRALLRAYGAKLVLTPAAEGMGGAIAKANELAAQDGYFMPRQFDNLANPQIHRTTTAEEIWADTDGQVDIFVSGVGTGGTVTGVGETLKAKKEAIQIVAVEPLASPVLSGGEKGPHPIQGIGAGFIPSVLNTDIYDEVIKVANEDAFSVARDMAAKEGLLVGISSGAAVSAALELAAREENAGKLIVVIIPSSGERYLSTALFADLAQ

SEQ ID NO: 63093 - protein, 86 aa, Moraxella catarrhalis
MRKDIHPEYREVLFHDTNADVYFLTRSTVSTKTTREYEGQEYPYFPLDISSASHPFYTGEQRKTANEGRVASFNKRFGAFASRSKK

SEQ ID NO: 63094 - protein, 176 aa, Moraxella catarrhalis
MRWYIIQAFSGYENQVQRSLVERIKRSEFADKFGEVLVPTEEVVEMREGKKCTMQQKLFPGYVLINMEMNEDTWHIVRSCPNITGFIGGTPESPAPITQIEADRILNRINKTGDAPRPKTMFEPGEEVLVIDGPFTDFKGLVKKVDYDKSKLHLTVSVFNRPTEVELEFNKVEKIN

SEQ ID NO: 63095 - protein, 143 aa, Moraxella catarrhalis
MAKKIDGYIKLQVPAGKANPSPPIGPALGQKGVNIMAFCKEFNAASANIEPGLPIPVVITVFNDKSFTFVMKSPPAAVLLRKAAGISKGSSTPNTSKVGTVNRDQLEEIVKTKQADLTAAELEAAIRTIAGTARSMGITVEGV

SEQ ID NO: 63096 - protein, 233 aa, Moraxella catarrhalis
MAKLTKRQQLIKDRVDSNKLYTIEEAVAILNDLPAVKFKESIDIAINLGVDPRKSDQVVRGATNLPAGTGKTKRVAVFAQGAVADAAKEAGADVVGFEDLAESIKAGNMDFDVVIASPDAMRVVGQLGTILGPRGLMPNPKVGTVTADVATAVKNTKAGQAQYRVDKAGIIHASIGQVGFTADQIEQNATALLNDLKRAKPATSKGIYIKKITLSSTMGPGITIDPVPHRVNK

SEQ ID NO: 63097 - protein, 167 aa, Moraxella catarrhalis
MALNLQDKQAIVAEVNETAKGALSAVVADSRGVTVAKMTELRKAAREAGVDMRIVRNTLLRRALADTSFECMNDVFVGPTLIAFSNEHPGAAARLFKEFAKANDKFEIKGAAFEGEFIDAKSIDRLATLPTYDEAIARLMGTMKEAAAGKLARTLAALRDKMESEAA

SEQ ID NO: 63098 - protein, 124 aa, Moraxella catarrhalis
MSLTNEQILDAIAEKSVMEIVELISAMEEKFGVSAAALAAAPAAGGDAGGAAEEKDEFDVVLTSAGDKKVAVIKVVREVTGLGLKEAKDLVEGAPQTVKEAASKAEAEELKKKLEEAGASVELK

SEQ ID NO: 63099 - protein, 1363 aa, Moraxella catarrhalis
MAYSYTEKKRIRKSFSKLPDVMDVPYLLAIQVDSYEQFLQEHKKPKARANIGLQAAFSSIFPIESHSGNAQLQFVEYYLGEPEFDERECIMRGSTFAAPLRVKIRLIIKDKENKTAIKDVREQSVYMGEIPLMTDNGTFIINGTERVIVSQLHRSPGVFFDHDKGKSHSSGKVLYNARIIPYRGSWLDFEFDAKDLVYARIDRRRKLLATIILRAIGMDTAQILDQFFEKVEVFKGDESFEIELVADRLKGEMAQFDIVGPDGNVIVEQGQRINALRVKRILNSGMTKLAVPDEYLYERIIGEDIVVGDEVLVRANTLIDHEILVKLAEKNVQSFKILFTNDIDHGAYIADTLRADTIVTREEALIEIYKVMRPGEPPTLDTAEKLFESMFFSQERYDLSNVGRMKFNRRLGREFIDTDDMDVQREQGVLSNQDIVDVLKELIEIRNGRGEVDDIDHLGNRRIRSVGEMTENQFRIGLARVERAVKERLTTADSDNLSPQDLINSKPVAASIKEFFGSSQLSQFMDQNNPLSEITHKRRVSALGPGGLTRERAGFEVRDVHTTHYGRVCPIETPEGPNIGLINSLATFAKTNNFGFLETPYRRVVDGRVTDEIEYVSAIEEVGMVIAQADSPMNDKGELTEEMVSVRHDGEFVRMSADKVTHMDVSPRQVVSVAAGLIPFLEHDDANRALMGSNMQRQAVPTLRSDKPLVGTGMERHVARDSGVCVVAKRGGVIEEVDASRIIVRVNEDEMTAGEAGIDIYNLIKYTRSNQNTCINQRVIVNEGDEIERGDILADGPSTDLGELALGQNMRVAFMPWNGYNFEDSILLSERVVQEDRFTTIHIQELTCVARDTKLGPEEITGDIPNVGEAALANLDEAGIVYIGAEVDAGDILVGKVTPKGESQLTPEEKLLRAIFGEKAADVKDTSLRVPSSTKGTVIDVQVFTRDGLEKDSRAKSIEKAMLDDYRKDLKEELVIFEAAAKGRILSLLDGKKVSGGAGFKAGTILSTKDIENLPLESLLDIQPAEEEVSERLGQIAEFLSDKQKDIDNKFTEKKRKLTQGDDLAHGVQKIVKVYLAVKRRIQPGDKMAGRHGNKGVVSRIMPVEDMPYDENGNPVDIVLNPLGVPSRMNIGQVLETHLGMAAKGLGDKINAMLRSQVAVSELREFLDKIYNQVGGEQVDLDSLSNEDLLALCQNLKDGVPMGTAVFDGAKETQIKELLSLADLSTTGQQTLYDGRTGKKFDRPVTVGYMYMLKLNHLVDDKMHARSTGSYSLVTQQPLGGKAQFGGQRFGEMEVWALEAYGATYTLQEMLTVKSDDVEGRTRMYKNIVDGEQYMNPGMPESFNVLTKEIRSLGINIDLKEKK

SEQ ID NO: 63100 - protein, 1412 aa, Moraxella catarrhalis
MKDLLDIMKGPADNGVKEFDSIQISLASPEAIKSWSHGEVKKPETINYRTFKPERDGLFCAKIFGPVKDFECLCGKYKRRKFQGIICERCGVEVTAAKVRRERMGHIELASPVAHIWFLKSLPSRIGLLLDITLRDIERVLYFESYIVTDPGMTSLEKYQLLDDEEYFNALEQYGDEFIAKMGAEAVQDLLRDIDVDGEIDELRTAIPQTGSETKLKKMSKRLQLLESFRDSNNKPEWMVMTVLPVLPPDLRPLVPLEGGRFATSDLNDLYRRVINRNNRLKRLLELNAPDIIVRNEKRMLQEAVDALLDNGRRGRAITGSNKRPLKSLADMIKGKQGRFRQNLLGKRVDYSGRSVIVVGPTLRLHQCGLPKKMALELFKPFTYAKLLQNGIASTIKAAKKMVEREEPAVWDMLAMVIREHPVLLNRAPTLHRLGLQAFEPVLIEGKAIQLHPLVCAAFNADFDGDQMAVHVPLTLEAQLEARALMMSTNNILSPANGEPIIVPSQDVVLGLYYISRGGVNAKGEGMVFSTVNEALRAIGSDDLSVNAKIKVRVAETILDEKTGEKISHTSIQDTVAGRLLIWNIMPEGMAFSECNTEMTKKNISKLLNSCYRKLGVKESVMFADHLMYLGFAQATLSGISIGMEDMVIPPTKKQIVDTADAEVRDIEQQFEQGFVTAGERYNKVVDIWARTSDKIANAMMDNLSKDDVINADGETETQKSFNSIYMMADSGARGSATQIRQLAGMRGLMAKPDGSIIETPIKANFREGLTVLQYFISTHGARKGLADTALKTANSGYLTRRLVDVAQDLVITQDDCGTDAGQRMTPVIVGGEIVERLGDRVLGRVAAKDVVNADGDVVVPSGALIDERLVEKLDANAIDEVYVRSVITCEATQGVCAKCYGRDLARGHLVNIGESVGVMAAQSIGEPGTQLTMRTFHVGGAASAASVDNSVSVGNAGSVRFHNMKTVQHADGHLVVVSRSAEIGVADDQGRERERYKVPYGSSVLVRDADAVEAGQVIAKWDPHTHPIITEFSGTARFSDITDGMTATVKVDEMTGVRSFEILTGKDRPSIAKDLRPAIILDTDEGKEVVYFLPNETIIRVSEGEHVTAGSVLGRVPQATSGTKDITGGLPRVADLFEARRPKDHAIMAEMSGVVSFGKETKGKNRFIITNEDGDVHEELIPKWRQINVFEGETVERGEVVSDGPQNPHDILRLKGETALANYIVNEVQEVYRLQGVKINDKHIEVIVRQMLRKVEVVDGGDSSYFKGDQAEYSKIRTLNAELIANNKFPVQYERQLLGITKASLATESFISAASFQETTRVLTAAAVMGKVDDLSGLKENVVVGRLIPAGTGLAYHQSRQRKAQNAGNQTAQVDELLSVITAEPPTTSEDNLSIEDNFAKAFADELGSQE

SEQ ID NO: 63101 - protein, 188 aa, Moraxella catarrhalis
MKEAQNKTGESEGLVVMAGKLKHLDIIACAFDFRFMGGSMGSVVGDRFVQAAEKALTENKPLVCFAASGGARMQEGLLSLMQMARTSAAIERLRLAGVPYVVILTNPVYGGVTASLAMLGDVHIAEPKAMIGFAGKRVIEQTVREVLGEPFQRAEFLLEKGTVDMVVHRHELINTTHRILAKLTKSAV

SEQ ID NO: 63102 - protein, 916 aa, Moraxella catarrhalis
MPNSTAQNFKHLAKTCHLTIALPPTIQDTFISSEPIQAYLKKLNQAIDDQVVAYGMHAVHHIANLLKVRTLAIDIILRQLFDFYQFPKDFALFAVGGYGRSELLPASDVDILLIGDEIGKATKPIESFVAMLWDIGITPAFSVRSVDELRAAVRDQTIASAMLEARVLAGNEDLSWQPIQAVKEVWDIGSFYDAKMAESKARYLAHNATEYNLEPNIKNAAGGLRDIHMIGWLGRFYFGSSDIKLLATTDFINENECTILQAGQRYLWCIRHHLHTLAGRGEDRLLFDYQKAIAERFGYYTRTLDTTHQDITQALETMMRVYYQHAMKIAAFSEVLCKYFYENYLSATARLIDIDETFYLIQSGSDHQSRPAKIAIRRPDAFLVDPANLLKIFLVMGQKGIRQIAASTLRAIYASSDLIDEEYRKNPVHRQLFLANLQELNYLFHRLRLMKRFGVLGNYLPAFGKIMGLMQYDLFHRYTVDAHTLLLVRILHRFGDDSLDNQDKYGLVAEIYQRIARKDILVIAAIFHDIAKGRGGDHSKLGAADAYEFCLAHGMSEADSKLVRWLVLEHLTMSLTAQKQDISDPEVIAKFAEFTSSITRLNHLYVLTVADMNATNSQLWNTWRATLLKQLYTSVHQVHSLGVHVVDKDRVIDDRKNKAQDLLPMVDNHRLKALWDGFGEEYFLKQKHRDIAWQSAEILAAEHRLKQGKPIIAIREHSDVSLRGMQLLICAPDQDNLFATTVCILDQLGLSVLDATILSADIDGTSTAVDSYVIIDRLLPTDSSIPLLLSPERTSQMILGLEHGLKTGGVPVPSRVFEVDGKLKHFIVPTQVYFSEATSLAHQGHHKMHLITKDRPSLLAKVGAVFSELNIQVHGARITTLGERAEDIFYLSGLHGVSLNDDALAKLKSAIIQALS

SEQ ID NO: 63103 - protein, 271 aa, Moraxella catarrhalis
MNIKPIITTLSMITLMITMPTLANTISTHGFDGDDLPACAATPLPEDAKFAIIGSDCGYAEGLAPIIKDDHYGYVNTVGELVIPAVYQAAYPFSDGLALYRENDHYGYLDTSGQSVIAPQYTKAWEFSEGRAKIEQNGKYGFIDTTGKIVIHPSYEVIGDWFEEGLVLFKQKDKYGFLDKSGNIAIRPQFDSAKGFSEGLAAVTMKTDKVDEHGRSPHKYGFIDRTGKVVIDIKYDLAYDFLSGVTYVVDGDNAYYIDKSGNPTAMPNYFE

SEQ ID NO: 63104 - protein, 242 aa, Moraxella catarrhalis
MTTVLSMRHLGKRYGQRWVVEDVSFEIEQGQVVGILGPNGAGKTTSFYMVIGLVPMDKGQVILGNQDISKNAMHERAAKGIGYLPQESSIFRKLTVEQNIMAILQTRKDLTQTEQRQQLEKLMADFHLEHVRHSLGMSVSGGERRRCEIARCLASNPKFILLDEPFAGVDPISVSDIMQVIETLRERGIGVLITDHNVRETLSICQKAYIVSEGKVIAQGNKDEILFNELVRKVYLGQDFVA

SEQ ID NO: 63105 - protein, 470 aa, Moraxella catarrhalis
MKLMPLAFVIGAAVGLSACQSLDHTQNAISTTKTPSTQAEHHDIYTQTLKNGLKVIIKQDSRAPIVMTQVWYDVGSSDEPIGKGGISHFLEHMMFKDAKGVSHDDYQRLISHFGGELNAFTSDEFTAYYESLPANQFPLALQIEANRMNNLILTAEEVATEKQVIKEERRLTTDDKPTAKAHEEFLAIALPNSPKGLPIIGSMPEIEAITVTDLQNWYDQWYAPNNATLVLVGDIDPKTALPWIEKYFGTLKPSSLPKRTPLSQPSHRGYTQANSYQNVKVPSLIMGFNVPTLGSRTIKNHTKEAHALSLLSDIADGGLSARFERHLIRKLQILNSVSIRYNMLSKSDDLFTIIATPREGVSLADAEAAILAELNAITNDQITDDELARSRAGLLSSLVFANDSIAKQASNLGALSALGLPLDTLDTLPKALDKVSKSDIQAVGKKYLTKDNLTTVYVLPKNTQSPSDTH

SEQ ID NO: 63106 - protein, 365 aa, Moraxella catarrhalis
MISKQIVLGITLVIGSGVAFFALAKNDTQTTKSVQTPQQIPSDTKVAKPVVQPLTADVATEEKLLAEKQRVREAHTLQMQKQAAALLEEQNNARKQALEKASAEANGRMTNDTQTVSADSAAKSELIAAPTVQTRPEAIEAARKAEEAKKAAEMLKNSEQETKDEKAKTADKPTENKAENKKENKNTQTKAPVKAGTHDVQRGETWQGIANRYGISVAALVEANGVTRNDILRAERRIKIPSASQIARLERDNKARESASKDGNKKSDNQPQSKTDKKTESKSQSSQTSERYMVQVAISPDKDRVDEVVKKYRDAGYKVTTSNTSRGLRILVGNEKTEEEAKALRTKIAADSRVPSSGAFVHKAQ

SEQ ID NO: 63107 - protein, 247 aa, Moraxella catarrhalis
  MISC_FEATURE (149)..(149): X=any amino acid
EHQIATITLNRPNKKNAISFQMMDELIKVAHKLKRNREVRAVILMGADGNFSSGLDLVDLNDPKNLGLALYELAKPTPSKFQKVCLIWQSLPVPVIAVVQGVCVGGGLQLALGADIRIAAMDACLSVLETKWGLVADMGITHTACDIRXDVMKQIAMTAEMMGAPIAKDYGLLTHISDDPVCMAISLIDAIKMRSPDVVLASKRMMNTTQRQDYLALYQEKLWQIKLMLGANRKLAIKKAKDSTVQF

SEQ ID NO: 63108 - protein, 689 aa, Moraxella catarrhalis
MLIVANRLIVKYKATMSKLNPRQLEALNYTQGPLLVLAGAGSGKTSVITQKIAHLIENCRIPADRITAVTFTNKAAREMKSRVQKILSHEKSRGLTVSTFHQFGLQFLRYELKHTSLKPNFSILDADDCQRLLAELMVRDNLSGAERRELVHEAIKKISDWKNDLIAPKDAAETLDDPEDLGFVHLYELYERNLRAYNAVDFDDLIAMPVRILRESHEVKDKWQNRIRYLLVDEYQDTNTAQYELIKLLVGRLGRFTVVGDDDQSIYTWRGAKPENMALLKQDFPNLEVVKLEQNYRSTNHILGAANAVIANNEHMFEKSLWSDKGDGEKIRVITCNNDFDEAERVAKEILTHRLRNNQTWDRYAVLYRSNFQARALEAQLRQLEIPYKLSGGTSFFARTEIKDLMGYLRIIINPDDDAAFLRVINTPKRGIGSVTLEKLGLFAQHCGTSLLGACTRAGVKDALGAKAGAIIESFGEFINYYTHQLHDNSDPMPLVRQMITETGYIDYVKESSKNPQQEKGRLDNIEALYLSIAALINRADDEHDKTIDAVIRKMVLLDMLEQQQEEENTNKVNLMTLHAAKGLEFDYVYIIGCEEKLLPHVNSIMSANIEEERRLMYVGITRAKSELTLLLCKQRRSGADFKAVTPSRFLDELPAEYLSGAVTKKEDPKKVAENYLANIQAMLAAKKK

SEQ ID NO: 63109 - protein, 292 aa, Moraxella catarrhalis
MKMIMNTITHAIIPTAGFGTRMLPLSKAVPKELLPLGDKPAIHYVVMEAVRAGIKTIVLVNHAQKQAIENYFDINTELDSQLRQKGKDGLADGLNFLPKDVRIVSVRQGYPLGLGHAVLQGRAVVGDNPFVVLLPDVVLDPFTTDFRADNLAYMMTRFAQTGRSQILVEPVADSQVHKYGIARLKDRQSVQKSDTNHPFDVLGFVEKPSLDLAPSNLAVVGRYVFRPEIFEYLAKTKPSVGGEIQLTDAIDALISQQGMDVVTIKGASFDAGDMTSYIQAFAYFASQVDQSF

SEQ ID NO: 63110 - protein, 542 aa, Moraxella catarrhalis
MNTWHDLKRLAHSPINLQHYFTADSNRGQKFSATACDIYMDFSKQAIDDESLLKLIQLADACELSQKIKALLAGEKVNDTEQRAALHTALRLPKGESLIVDGVDVGEQVHDSLDKCEALVHRIRSGIWRGYSGKAIRDVVNIGVGGSDLGPLMATTALSEWADTDIHVHFVSNMDGTQLESLLKKLNPQTTLFIISSKSFGTVDTLSNAKTALSWLLAAYAHKPTILRRHFIGISTRPDKMSDWGIHPDNQLLLWDWVGGRFSMWSAIGLAIAVRIGMANFRALLAGAHEMDKHFAQADFYKNLPVLLGLIGVWNATFLGINAHTVLPYDGRLSHFPNYLTQLEMESNGKSVKRTGESVNYRTCPILWGDIGSNAQHAFYQLLHQGTQRVSCDFITPIHRYNDTQIINNSLVYQHKLSLANCLAQSQVLAFGNAALPYGVANVADDLAKFKKYRGNQPSTTLLLGDLNPKTLGALIALYEHKVYVMSVLWQINPFDQWGVEVGKVMANRVYDELISKTNTDCFDHSTNTLLSVIKQSRIINE

SEQ ID NO: 63111 - protein, 422 aa, Moraxella catarrhalis
MNNNAYVIGHQHEAINTCLWLASMNQTVYLLADEPSVLQTLEYYQCDHQMNTLWQLYCVQQKIIITDSQRQAFLSSAQAGVLWLFLDDVDDITLSHIIHVLDSPHSRIILSGVQKLGKIDKIAKQFKSSWVYYLPISFMKDGANYNAFYHSDLVMIGEKTAGSVAYCQILLSLKTYAKHCQVADILTVEFARSTLMAMLATRLSFMNEMARLADNQGVNIKSVERIIAQDGRIGSAYLSAGWGFGGKTLPRELELLMDKFKQNRVDTSLISAVSHINNDQKELIFRKFWQYFNGFIEHKTVMIWGAGYRNGASRMINSAIHPLIELLWSYGICTLVFAHNTAFEMQSTYGDHPLLRLTDDPYQDLVQADALFIINWSLLTKPDIHVLNQINIAIFDAKNVLDDEQIAMLTAPYYGIGREKYS

SEQ ID NO: 63112 - protein, 285 aa, Moraxella catarrhalis
MTTNHQNDQFTNPNILPTGTPQGQSEQQRPQGEKPADDETTHFGYQTVHKSEKQAKVAEVFTSVARKYDVMNDLMSFGIHRLWKRYAISLTGVRSGQRVLDIAGGTGDLAKVFSREVGRSGRVVLSDINEAMLEVGRTRLINAGCHNVDFVLANAETLEPFEDNSFDLVTISFGLRNVTDKDKALSAMHRVLKPGGRLLVLEFSKPVFEPLSKAYDLYSFTALPIMGKIVAGDAESYQYLAESIRMHPDQQTLKQMMQNAGFVNCDYHNLTGGIVAVHRGFKARS

SEQ ID NO: 63113 - protein, 359 aa, Moraxella catarrhalis
MVKVMQKMHAHTQAIQRWVMAILLPILLIFGETAWASESVSEDDLTALIISANRASQSNPNSPLAESVREFEQAINPANQVDTKPQSTPINIPTSHAQSISHDKLILNTPVVDVAKILTPSEYLHLTEQLHKIYQDNLAQAALVIVPSTDGIDIFDYALAVAERWQLGQADTDDGLLITVAVNDRKIYILTGYGLEGVLPDAALSRIIRDDITPAFKSGNYAQGLSAGIARIDERLRADPESLARADAQTDDSVDIDIIGLFIIALIAGSFLGAILGRFLGATFGAGGFVIVALMSGAGFFVVMIAAVILWVFLLARGVLPITGGSGNFGSGGRSGGFGSGGFGGGGGSFGGGGAGGSW

SEQ ID NO: 63114 - protein, 354 aa, Moraxella catarrhalis
MTKTLTLIQPDDWHIHLRDGEALATTVRHAATSFNRVICMPNLVPPVKTANQAIAYRERILKALKDSDLPATRKDSFDPRMVLYLTDQTTAKDIDDAAQTGIVSAVKLYPAGATTNSADGVTDILARSLVFEAMQKHGIPLLVHGEITDSNIDIFDREKRFLDDVLNKIITQFPNLKIVMEHITTADAADFCLAQGNHIAATITPQHLLFNRNHLLVGGIKPHYYCLPILKRAAHQKRLLEVATSGNPKFFLGTDSAPHATHTKESSCGCAGCYSALHALPLYAMAFESVNALDKLENFASRYGAQFYGLAINTTQITLIKQPQTIPESFHYLGDKTLTPLLAGEVLPWQVVGI

SEQ ID NO: 63115 - protein, 396 aa, Moraxella catarrhalis
MAILTMKALDLAGKRVLIREDLNVPIKDGVIASDVRLQAALPTLKDALAKGAAVLVASHLGRPTEGEPDQKYSLAPVADYLSKHLDAPVRFEAEYLDGIEVAVGELVLLENVRFNVGEKKNSDELSNAYANLCDIFVMDAFGAAHRAQASTEGVIRAAIEQGKQVCSGNLLTEELNALSRALDNPAAPVLAIVAGSKVSTKLDVLTSLAQKCDSIVVGGCIANTFLAATGVNVGASLYEPDLIDTAKQIMKKTNILLPSEVVVADKNEIDFDDFLGSLEKAAATVKPINELNDTDMILDISKASADEIAKHIHKAATILWNGPVGVFEVDKFGTGTQVLAMAVKDSSGFSIAGGGDTLAAINKYQVADDVSYLSTGGGAFLEFVEGITLPAIAALK

SEQ ID NO: 63116 - protein, 493 aa, Moraxella catarrhalis
MSLYKSAVAPLSVDHEYEITIVRFFTIMAVFWGIVGMAVGVFIASQLAWPVLNFDTSWLSFGRLRPLHTNAVIFAFGGSALFATSYYIVQRTCKTRLFAPYLAWFTFWGWQAVIVSAVITLPLGVTSAKEYAELEWPIDIAIALVWVAYAIVFFGTLIKRQTSHIYVANWFFAAFIITIALLHIVNSLVVPVGLFKSYSLFGGATDAMVQWWYGHNAVGFYLTAAFLGMMYYFIPVQIGRPVYSYRLSIVHFWALIASYMWAGGHHLHYSALPDWTQSLGMVFSLILFAPSWGGMINGVLTLSGSWDKLRTDPIIRFLIVALSFYAMSTFEGPMLSIKAVNAISHNTDWTVGHVHSGALGWVGMITIGSIYVLLPRIFNKAKMYSTSLITLHFWLATTGTVLYIVALWISGITQGMMWRATNPDGTLAYDFIQTVVVSHWPYVVRALGGALYVGGMFVMAYNCYRTIKMPSVPEHIAEPEEVNTGSEQATAQA

SEQ ID NO: 63117 - protein, 544 aa, Moraxella catarrhalis
MSTKFIFVTGGVVSSLGKGIAAASIAAVLEARGLKVTMTKMDPYINVDPGTMSPFQHGEVFVTEDGAETDLDLGYYERFLRRSKMSKANNFTSGRIYQTVLAKERRGDYLGGTVQVIPHITDEIKHKIRTSGEGYDIAIIEIGGTVGDIESLPFMEAVRQMQVELGRTHSLLMHLTLVPYIASAGESKTKPTQHSVKELRSIGLQPDVLICRSEQPISEDNRQKIALFTNVEPRGVILCEDAKSIYQIPRRLYEQDLDDLICERFGITAPEADLSDWDKVVDDLFNSQGEIVVAMVGKYVELPDAYKSVNEALLHAGIHNKTKVSIRYISAEALETDSEAMNQITDVDAILVPGGFGERGTLGKMKAIQFARENNKPFLGICLGMQLAVIEYARNVLGIEANSTEFDRKTANPIIGLITEWFDEKGELQTRSDDSDLGGTMRLGAQEAELVSNSKLAKIYGSHNITERHRHRYEMNNRYIEPLENAGMKISGYSAKQHLVESVEIDNHPWFVAVQYHPEFTSSPRGGHPLFNSFIKAAIDVKQA

SEQ ID NO: 63118 - protein, 287 aa, Moraxella catarrhalis
MTQPMIAAQSNITVSGIEIGNDKPFVLFGGMNVLESRELAFEIAEQYIDICQRLNIGYVFKASFDKANRSSLHSFRGPSLENGLTWLNDIKETYNVPIITDVHEPYQAAPVAKVADILQLPAFLSRQTDLVSAIARTGKIINVKKAQFLAPHEMRHIINKCLEAGNDQVILCERGSAFGYNNLVVDMLGFDTMKSMNVPVFFDVTHALQEPGARGDSAGGRRHQITTLARAGMATGLAGLFLEAHPDPDKAKCDGPSALRLNQLEPFLIQIKQLDDLVKGFETLDTQ

SEQ ID NO: 63119 - protein, 445 aa, Moraxella catarrhalis
MIAIGATMYAEDTKNIVEIKDIIAREILDSRGNPTIEADVILANGIRGRAAAPSGASTGSREALELRDGDTSRYLGKGVKKAVANANSQIRTVLLDKDVTQQTQIDNILIELDGTENKGNMGANAMLAVSLAVAKAAAIAQSLPLHQYIANLRGQTSLTMPVPMMNILNGGAHADNTVDIQEFMIEPVGFASFSEALRAGTEIFHALKSVLKAQGLNTAVGDEGGFAPNLRSNEEAITVIMQAIDKAGYKAGENIFLALDCAASEFYKNGQYILAGEGNKAFDSQGFSDYLTSLCNQYPIISIEDGLDESDWEGWAYLTKQLGKKVQLVGDDLFVTNPKILQEGIDKDIANAILIKFNQIGTLSETLDAIYLAKQNGYATVISHRSGETEDSTIADLAVGTAAGQIKTGSLCRSDRVAKYNQLLRIEQQVRAAYRGREEFIGLRG

SEQ ID NO: 63120 - protein, 242 aa, Moraxella catarrhalis
MKTTIYPLIVAAGTGSRFGANKPKQYLKIGTKSILTHSISRLNHPDLDALTVVIAHDDAYIQGEMLDMQSSFDQAIYYTTGGDERWQSVMNGLDKICAEGGLDGDWVLIHDAARPCLPYADLDRLIHKIKSNQCNAAILATAVVDTLKFAKDNHISHTVSRDDLWQALTPQAFKIGVLKSAFEFVITNRLQITDEASACEAMGESVAIVPASRMNIKLTYPDDLPLMEKILSGLFDELVKLS

SEQ ID NO: 63121 - protein, 429 aa, Moraxella catarrhalis
MGKNVVVLGSQWGDEGKGKIVDLLTEKATAVARFQGGHNAGHTLVVGGEKTVLHLIPSGILREGVTCFIGNGVVLSPEALLKEMNGLIEKGVPVRERLRISPACPLIMPYHTALDQAREIKRGSGKIGTTGRGIGPAYEDKVSRRALKVADLFRADLPEKLENLLEYHNFALTEYYKVDAIDFDTTLKLCQEWASDLKDLVIDVTDALEIRRQNGENLMFEGAQGTLLDIDHGTYPFVTSSNTTAGGVSTGTGLGPLYLDYVLGITKAYTTRVGSGPFPTELFDDVGAHLAKVGHEFGATTGRARRCGWFDAVSLRRAVVLNSMSGICLTKLDVLDGLDEINICTSYEVPEGECAGAYDAEYYEKVVPKYETLPGWSESTIGVTNFDSLPANAQVYIKRIEALVGCPVDIISTGPDRDETIVLRDPYDA

SEQ ID NO: 63122 - protein, 747 aa, Moraxella catarrhalis
KSSRLHLPKPDIAFGQSRAIKALNTALDIHANGYHVFAVGENGLGKRTLVTRLLAERAKHMPTPNDWVYVHHFEDIRRPIAIDFPAGMAIIFQQKVHKLWQNAKKKLVAKLLGDTHQNHIELIKSAIPLQQNKRFDAINADAKQHNLVLKTTGDERVHFVAIDDSKPIDTKKLAQLQKQLLEAQIELSELEDSTHEALDELHQSTAKKVLEPMFNAVMANFENHPKAIRHLMAIQDDMVKNITHIINEDDDNFIATSLSQVPSRYVVNILVSHQPSAGAPIVFEDLPTHLNLLGHIEYTTELGTVLTDVSMIRAGALHKANGGYLLLEAQSLLEHPYAWQGLKRALQSKQIKISSLEQMLTLTGSLSLEPDSVALDVKVILLGEADLYYELLEFEPEFNSVFKVRADFHDDIQRDDCSEYGMVLKMVDMIKSHQLPNFDNTAFAVIIDELSKLSDDKNKLDLHADRLSGLLVESARIATLENNKIVTAKHVQTALDDITERKGYLKDLYWQEILNGQQIICTKGWAVGQINALTIISYADSEFGLPARLTALIQPNFGQGEILDIERDVELGGSLHAKGMLIMSSFLRALFSEFHELNFSASLAFEQSYGQIDGDSATLAEACALLSALANIPIAQNLAITGSMNQLGQAQAVGGVNAKIAGFFDACRDKGLDGNQGVILPRANIAQLMLRDDIVQAVKDEQFHIYAIDHITDALALLSGMLIDDKNKHGEYKRNTLFGKIVKRLES

SEQ ID NO: 63123 - protein, 225 aa, Moraxella catarrhalis
MTPKFSKISHKFQRFAAAIDEAAQSLGLTITDVQNMQILRYLDGLLLWGKAYNLTAITDPDEALVKHIFDCMAIIPMLPFVTQPNKSLLDIGTGAGLPSVILAILKPDWHIDALDSNQKKIRFIRQISSEIGLKNITSIASRIEHHHAQKAGAYDVITSRAFASLTDFVSLATPCLADTGVLYAMKGKNPTAEEMADLQAWHIDIEPICVPKLDDDRCVVYLTKQ

SEQ ID NO: 63124 - protein, 261 aa, Moraxella catarrhalis
MEIIAIANQKGGVGKTTTTVNLAAALAIIAKKRVLLIDLDSQGNATTSVGLDKNALEYTMADVLLDGVSLQDAILSTDIGLDVIGANRDLAGIDVSLAGVADAPFLLKQAMADAKMAGKLEYDYIVMDCAPSLSMITVNAFSATDGVIIPMQCEYYALEGVADLIATIDKLKSINESLHIRGVVRTLFDYRNTLAQDVSGELERHFGDLVYQTSIPRNVRLAEAPSFGQSIFTYEKSSKGAIAYHKLMNEVIAQTKAKSNG

SEQ ID NO: 63125 - protein, 193 aa, Moraxella catarrhalis
MTTVYFIRHAEPNYANRDEFSRDLTPKGIAQSERLLDVFRGIDIDVFFSSPYKRAVDTIYPLANSRKKNIHLKEKLCERRIGTWVDNFDEFSQKQWQDFGFHLKNGESLHRVQQRNIAMLHEILINYPNQTIVIGTHGTALSTIIKYYQADFGYQDFNANKHKFPWIMAFEFDGIMLKRYHEISHEIHMDDTP

SEQ ID NO: 63126 - protein, 323 aa, Moraxella catarrhalis
MNEQEQLPYFAPLLPWQRQAWQQLTGQFIEQRMPHGLLAAGQKGIGKREFVWRFVAYLLCLEKNQYGACGHCQSCQWLRAGTHPDLLVLPQGDSIKIDDIRLLQEYSQTKGHGVKVIVLDGADTLTLGAANAFLKTLEEPRDGVFLILITDHPSRLLPTIKSRVQTMPLSYIDKVEAIDYLSEFMSPELSKLLLDISDGAVLQAKSLSSAKWFDQRTLWLKTYTALQLSKRTASAASSYWQKTLTLAEFITLSRVMLMDLWRVFLGIPSLHQDIDVVALLAQVQLDSSKLESLLSCIDDTQTAYAQNVQETLGFDRILIEMAK

SEQ ID NO: 63127 - protein, 402 aa, Moraxella catarrhalis
MADLSKITEIEDLRRIAERKVPRMFYDYVDSGSWTQTTYRNNETDFDRIKLRQRVLVDMDNRSLATQMIGQDVSMPVAIAPTGFTGMMWADGEIHAARAAEKFGIPFSLSTMSICSIEDVAENTTKPFWFQLYVMRDKEFMENLIKRAKAANCSALILTADLQVLGQRHKDIKNGLSAPPKPTLKNILNLMTKPEWCYNMLGTKRHTFRNIAGHAKNVSDLSSLSAWTAEQFDPGLSWDDVARIKDMWGGPLILKGIMEPEDAIMAARFGADAMVISNHGGRQLDGAPSSIASLTDCVQASQAENSNCEVWLDSGIRSGQDVLKAIALGAKGTMIGRSFLYGLGAYGEDGVRRALEIIYKECDVTMAFCGHTNISTVNSDILVKGTYEHLKANQPHITPIRW

SEQ ID NO: 63128 - protein, 364 aa, Moraxella catarrhalis
MALNTIPEIIEDIKAGKMVILMDDEDRENEGDLIMAANHITPEAINFMITHARGLVCLTLTEARCQQLDLPLMSDKNGAKFSTNFTLSIEAAEGVTTGISASDRARTVQAAIAANAKPTDIVQPGHIFPIMAKKGGVLHRAGHTEAGCDLARLAGLEPASVIVEIIKPDGEMARRDDLEVFAKEHGLKIGTIADLIQYRMATEQTVSEVEHFAIQTEHGDFTAYRFSEFGSDDTHLAFVKGKPTGGVSTVRVHSFSPMKDLFGIHTSGSRWNIQNALAKIATAEHGVLVWIGHDDTLNLGDGFEALKDKQSVTSVNRRAPYQTIGVGAQILKHLGVKDMRLLSSPIKFNALSGFDLNVVETIDK

SEQ ID NO: 63129 - protein, 332 aa, Moraxella catarrhalis
MYTFNRQFPHTRLRRLRISDGIREMVRETQLAPCHLIAPVFVIEGMNQKQSIHSMPNVHRYSIDLLIDYVRELYATGVRMIDIFPVIDPKLKTPDGQDAYHNDTLAVRAVRAIKDAVPQMIVMTDVALDPYTTHGQDGIIDESGYVINDITTEALIKQTLAHAKAGADIISPSDMMDGRIQAMRQALENGGYVNTAIMAYSAKYASAYYGPFRDAVGSSGNLKGHKKQYQMDPANRAEALHEVALDIQEGADMVMVKPGQPYLDIVSEVKDTFGVPTFAYQVSGEYAMHMAAIQNGWLTDAVILESLIGFRRAGCDGILTYFALDAARMLND

SEQ ID NO: 63130 - protein, 427 aa, Moraxella catarrhalis
MSLNKVAILGGNRIPFARSNGVYADANNIDMLTAALDGLVARFDLADKQIGEVVAGTVLKHSRDLNLTREAVLNTQLPATTPAYDISQACGTGLQATFAVANKIALGLIDNGIAGGTDTTSDAPIALGDGLRKPLLRLGNAKTAKQKLSALSTINPKDLLAFPQNGEPRTRLSMGEHQAITALEWNISRTDQDELAYNSHQNLAQAYESGFFDDLITPYKGLTKDNNLRPDTTLEKLASLKPAFGKKNANPTMTAGNSTPLTDGASVVLLSSDAWAKEHGHEPLAYITHQQTAAVDFIGKEGLTEGLLMAPAYAVPKMLKRAGLTLQDFDFYEIHEAFASQVLSTLAAWEDETFCKTRLGLDAPLGSIDRSKLNVNGSSLAAGHPFAATGGRILATAAKLLAQKGSGRALVSICAAGGQGVVCILER

SEQ ID NO: 63131 - protein, 632 aa, Moraxella catarrhalis
MPIYRSKTSTAGRNMAGARALWRATGMTDADFQKPIIAIANSFTQFVPGHVHLKDMGQLVAREIEKAGGVAKEFNTIAVDDGIAMGHSGMLYSLPSRDLIADSVEYMVNAHCADALVCISNCDKITPGMLMAAMRLNIPTIFVSGGPMEAGKVLASTLVDGSNVHETVVNDQGQSIRKLDLVDAMIDAADDLVSDSDVQTVENSACPTCGSCSGMFTANSMNCLTEALGLSLPGNGSLLATHAKRQELFLMAGRMIVEITKRHYEQGDDSVLPRSIATKSAFENAMSLDIAMGGSTNTILHLLAAANEAGVAFKMADIDRLSRLVPCLSKVAPATQKYHMEDVHRAGGVMGILAELDRAGLLDTSLPTVHSPTLKDALATWDVMNPDNTQARALYIAAPGGVRTTQAFSQNKEYPNLDLNRESGCIRDVKHAYSQDGGLAVLFGNIAERGCVVKTAGVDDSILTFTGKARVFESQDDAVEAILADQIIAGDIVIIRYEGPKGGPGMQEMLYPTSYLKSKGLGKACALLTDGRFSGGTSGLSIGHASPEAAEGGAIGLVEDGDTIHIDIPNRTINLAVDPTELQKRREAMQVRGKHAWKPANRIRHVSQALRAYAAMTTSADTGAVRDVSQVE

SEQ ID NO: 63132 - protein, 297 aa, Moraxella catarrhalis
MNLIAFFGALESGLIYALMALGVLISFRILDFPDLTADGSFPLGGAVAGICIVAGINPWLACVFGMMAGMVAGMMTAWLHVKLGILHLLAGILMMTALYSINLRIMNAPNLPLLGQPTVFTPLIDGGNGFWVRVAVIAGVVLVVKLALDWFFITEMGLSMRATGSNLRMAQAQGINTPWIIILGMAISNGLIALSGALFVQTQGFADVSMGIGTIVIGLAAVIIGEAVLSAKRIFWMTLAVVIGAILYRLFIQIALSSELLRGIGFKSQDLNLVTAFLVIIVLMLPKIKAKLSPKKH

SEQ ID NO: 63133 - protein, 557 aa, Moraxella catarrhalis
MMEIKAPDLGVESAEVAEIMVKVGDSVSENDNMILVESDKASVEVPSTGAGVIKEIHISVGDHISEGDLLFTLDSDQSGDAQKTDSKSDDEPQTKQSAKDEDDISIGDDEQTDDQPDLNESAGSQTHHLPDLGVDSAEVADIMVAVGDEITKDQPLILVESDKASVEVPAPVDGVIEEILIKAGDSVSNGQAFITIKSKGISAKKSSNKEQPAEKTKEEDTKANQAAVSESKNKSVQSPQTKLPEAVVNEKARHVYAGPAVRKLARELGVDISAVTGTAAHGRILKEDLFGYVKSVISGSTSQAKSGTTEVRSGLPSLPDMSNKEIWGELEIQDLTRLQKVSIPQLNYNTYLPQVTQFDLADITDTESLRNELKGEFKAEGIGLTILAFIVKAVAYALTQTPKFNSHLSDDNTQIIIRKSVNMGIAVATDDGLIVPVIKNTQDKGIKQIAIEIGELAKKARDKKLTAKDLQGASFTISSQGNLGGTAFTPLVNWPQVGILGVSEASYQPRWNGKEFEPRLMLPLSLSYDHRVINGADAAVFTRHIAKLLADPRRILL

SEQ ID NO: 63134 - protein, 460 aa, Moraxella catarrhalis
MTIFKTHLTHQSPIVPALPKPKDSLRLLHTSDWHLGKLLYNQSRYDEFAKFLDWLIEALILHQVDILIIAGDIFDTMTPSNRAEYLYHHFLASAFKNHIQHIIIVAGNHDSPTSLQKTKEVLGVLNTHVIGSVSQDKSDELIVLTDDVGIPSAIVMAVPYIRDRDVRSGIDANSIHQKNQLLLEGVAEYYHSLTNLAKDKQQAVYHTHQKTIPIIATGHLYAAGAAVSSTDDGMRDIQIGTLGQISSQIFDDAIDYVALGHIHAAQKVGQKNHIRYSGSPIAMGFGEIGRHKQVLIVDLPLNKSVPISKLPKNDDLHGENQDNNAISIHSLPVPIFHSLAKICGDMAFITNAIDTLKTHDEPIWLEIEYVGDTLVANLKQHISNLLEGSNIAAISIKNKAIHQGSLKLHTPTLNLETLDEMDIFYQRLDKENLNQDEKNDLIGAYQELIKAIQETDHKAV

SEQ ID NO: 63135 - protein, 632 aa, Moraxella catarrhalis
MNAISYTHLKTFDVIVIGGGHAGTEACLAAARMGANTLLITHNIETLGQMSCNPAIGGIGKSHLVREVDALGGAMALATDKAGIQFRVLNSRKGAAVRATRAQADRILYKAAIRHTLENQPNLTIFQQSVDDIIVENTRAVAVVTATGIRLNTRAVVLTSGTFLGGVIHVGLDHQSGGRAGDMPAIRLADRLRELKLPVGRLKTGTPARIDARTVDFSVMTVQSGDTPLPVMSYMGDVAMHPRQINCYITHTNERTHEIIRANLDRSPMFSGKIEGVGPRYCPSIEDKIHRFADKDSHQIFIEPEGLTTHELYPNGISTSLPFDVQLEFIHSMKGLENAHITRPGYAIEYDYFDPQNLKPTLETKSIDALYFAGQINGTTGYEEAAAQGLLAGLNAARMALDESSWVPQRHEAYLGVLVDDLITHGTKEPYRMFTSRAEHRLILREDNADARLTAIGRELGLVDDERWARFSQKMESIASETARLKDIWATPNNAIGQDFMANTGEILTKENSLLDLLKRPNITFDDIAKVSDSTVSAKVGEQIEISVKYQGYIERQNDEIEQMKRLENTLLPLDFDYKSVSGLSNEIVQKLSQIRPTTLGQASRISGVTPAAVSLLAMTIKKLKKTQAVMT

SEQ ID NO: 63136 - protein, 435 aa, Moraxella catarrhalis
MSWFPKWQPYTGDINTQPVATNEYLPVGQSIMLGLQHVLAMFGATVLAPLLMGFDANLAIMMSGICTILFFVMTGGRVPSYLGSSFAFIGVVATATAHATGSGANSNLSVALGGIIACGFLYAVIGFIVMATGTQWIEKLMPPVVTGAVVMIIGLNLAPITVSGVQGKPFDLWMALMTVLCMGMIAVFAHGFLQRLLLLIGLVMAYAIYAIATNILGLGEPINFALITDADWFGLPNFSSPTFDTNALPIIAPVAFILVAENLGHIKAVGAMTGENLTPYLGRAFVADGVATALSASVGGTGMTTYGENIGVMAVTRVYSTLIFVLAGIFAMILGFSPKFGAMIQTIPSPVLTGASIVVFGLIAIAGAKIWIDNKVNFANNKNLMVAAITIILGTGDFGLMVGNFNLGGIGTATFAAIILHWFLSLREFNSSRVK

SEQ ID NO: 63137 - protein, 547 aa, Moraxella catarrhalis
MQKMVKKIGMVLSGVVMVLLMIITTPSHATAKLLPTSQENPTKTMVDSFGRETPRGAVQGLLRAIAAEDYELAANYLDGRYLAKTQTPNREIVEHLVVALDAGGKLYPDLQISHASEGDLSDNLPSDIDKVGELHLMNEHIDILLNRRVTDDDMVFWQVSSQTLSSLPKMTTHAQTLSERLGLSDDTTHAQTKYWLELSALVLLVTVLYLAINLAVWILYWVSKGLYTTLTKKPFRIMPSVIMPLSLVVLSLILPIIMISVGVPLTLRSSFGRIKDIVAWGATAWLMLRLLDGIFRRAEANSLKRGRPEQVSILNLLRKVAKALMIILAVILIFGNLGFDLTTGIAALGVGGLALAFGAQKTLENLIGSVVVVADRPVYVGDYCKFGTYEGTVIDIGIRSTRIRTLNRTIVTVPNGEFSSLQIENFTARDMFYFLHDLFIKRTADLAEIERMITNLQEFLAAHRLTNHEWNQVWIKQLRQECYVIEMRAYIDADGAQDFYAKQSVLILEILKFLESYHIEHALPSQSITVHQNHDQTTPKHEKTPKT

SEQ ID NO: 63138 - protein, 268 aa, Moraxella catarrhalis
MYTDSHAHLTYLKLDHYDNRPENLLKAMYQAGVRRTMAIMCQLSEYDDIHAWVEMSADAMPDIGMSVGVHPCQDEHTLAAISPDELLKRDHEKVWAFGETGLDYYWDKDKSSAQKHSFAAHIDAAKTAKKPIIVHTRSAYQDTLEVLAAERCEHGIIHCFTEDYAFAKRALDMGLYISFSGILSFNKSQDLREVAAKLPLDRVLIETDSPYLAPVPKRGRDNEPTFVPYVAEALAKIYQKSAEEIGHITSHNFITLVNQYKPIIQSRL

SEQ ID NO: 63139 - protein, 322 aa, Moraxella catarrhalis
MMTNKRISLAPMIDYTTMDFRAFARLFNPNIHLYTEMISTSAILKGDAKHHLRCHPTESPVVLQLGGSNPDEMAKAVRVTEALGFGYCEYNINVGCPSDRVQHNKIGACLMAEPQIVADMVRAMKNETDKPITVKHRIGIDDCDSYEFMRDFVQTVAEAGCTHFITHARIAWLQGLSPKQNREIPPLRYEEVYRLKQDFPDLTIEINGGISHLDDIKTQLAKVDGVMIGRAFYHNPYLMAECHLLWGSQPPSHRQIFENLISYLKKRADEGVNLAVLTRHYLGLFQGMAGARRWRQDLSGKSVLTVDEIYQSGDRVLSQNGQ

SEQ ID NO: 63140 - protein, 452 aa, Moraxella catarrhalis
MMSYFGTDGIRGQFGVFPITPDFLLRLGFGAGQVLMRQSLNKRPSVLIGKDTRLSGYVIEAALQAGFNAAGVDVHMLGPLPTPAIAHLVKSFHADMGVVISASHNPYQDNGVKFFNHEGKKISDEMQNAINDQLTALVDDTNASLARLEGIKADAIGKNHRIADANGRYIEYCKGSFPYHLNLSNLKIVIDCANGAGYSVAPRVLQELGAQVIAIHNTPNGININDNCGSTHPNIIQAAVREYGAGVGIALDGDGDRIIMADNQGNIIDGDGILYILAKHLKPVGVVGTLMSNVALELALANQGIGFYRAQVGDRYVMQALQERGWSIGGEPSGHILCLDKSRTGDAIVAGLQVLSCIAETGKSLRELVLDYTPFPQTLINVRLTQMSNPYDNDELNIIFKNAEEQLSDQGRLLIRQSGTEPVIRVMVEHQNQAVCQEVAQKLAAEVRRVLA

SEQ ID NO: 63141 - protein, 867 aa, Moraxella catarrhalis
MIMTDTVQKDTAQSPKKVYLKDYTPPVYAVNKVDLDIRLFDDHAVVGAKLKMTRAHAGELRLLGRDLKLKSIHLNGQELESQAYHLDKEGLTILDAPDVAVIETLVEISPQTNTTLEGLYQAGTGDDKMFVTQCEPEGFRKITFFPDRPDVLTEYTTRLEAPKHFKTLLANGNLVESGDVDENRHYTIWHDPTKKPSYLFAAVIANLEVLQDHYTTIEGREVLLEVYADAQDIDKCHVGMQALKDAMKWDEDNYGRAYDLDRYMIVATGQFNMGAMENKGLNIFNTSCVLSSPETTTDERSFLVKSVIAHEYFHNWTGNRITCRDWFQLCLKEGFTVFRDQSFSGDFRSKAVQRIEDVAVLRAAQFAEDAGSLAHPVRPESFVEINNFYTMTIYEKGAEIVRMIANFLGKEKFRQGSDEYFARYDGQAVTVEDFLSAMSVADARVMDFLAWYRQPGTPVVSGGYRVLGDKVIINLSQKTRHVPNYDAPVALPIPVDTAIFDSLTGEMLASRMLLLTTDNAQFEFDHIQLSDGAHPVVSVLRNFSAPVKIDFDYTDEDLASLVAFESEGFNRWQALQILMNRWLSGSVEDATLIISVIQKAVDELIEDDPMLAARLFDIPSQKELAMAYDENYDPISVKARRDELIGKIADGLLENAKLWYQKLPLQAYEDTPQARGRRLLRNVLLDLRLTAGDEMAHQDAYHQYDNASCMSERLGALMAMIEHNLDKKDSYLDDFYAKFSHEDLVIDAWFVAQATPDSTSVSQIASLMERTDYDWNTPNRVRTTLSALAAKPVQLWTAEGLDLYLSSVVRLDGSNPQLAARLLSALARWNTLTADKKAMAQEKLAAVTSQVSSKNVLEFLQNMQTVA

SEQ ID NO: 63142 - protein, 562 aa, Moraxella catarrhalis
MTPSKPSQDSANYLFLVLPRFALLWVCVALIPVSILFHIWWLLFIATCLTCLGVYNISQKRHAILRNYPISGHIRFLFENFRPEVRQYFIEGDREEVPFSRMQRSIVYQRAKDVDSTTAFGSLNDLTKPGTDWFLHSGRSHTIKNHDFRVRVGNERCRQPYDLSVFNISAMSFGALSAAAIESLNKGAKEGGFAHDTGEGSISPYHQKHGGDLIWQLGTAYFGCRDDKGRFNPEAFRQRAVLSQVKMIEIKLSQGAKPGKGGVLPASKITTEIALTRDIPMGIDCISPPTHPEFSTPTELVHFWQRLRELSGGKPVGFKLCIGMPWEFMAIVKAMIKEDNYPDFIVIDGAEGGTGAAPIEFMDSVGMPLVDALIFVQNTLVGAGIRDKIKVGVSGKVISGFDIARLMSLGADWCNSARGFMFAVGCIQSRSCHTNKCPTGVATQDPARQKAIDIPDKSRRVSNFHKNTLKALAEIVGCAGLSHPTELKPHHIVRRQPDGWIKLLSEHYQFIETGSLLTGDCGRRVLDDMWKLADPNSFQAMTIADKIVGAENKRNRTIESLY

SEQ ID NO: 63143 - protein, 247 aa, Moraxella catarrhalis
MPNKSPNKAPAYLRIKTAILDNIHAGIWASGVAIPAEITLAEDFGVSRMTVNRAIKELEAERVLERRQGSGTYVAQQKYNNAHIEVRNIAKDIRERFHRYHAQVITQKTLDFMALNQPDNHWLNTLFFHNQPAYTDKLYQVCIAHYGDDLPIQYEERWVNASVIADFINQDFNIVNTSDYLIDHVPLEYGDYQIHAKLASDTICQILQIPINEPTLLHTRQTKSQGKLVTFVNMWHPASRFSFSGTL

SEQ ID NO: 63144 - protein, 340 aa, Moraxella catarrhalis
QRSIYFLVLDLHTDKLDDIKEVFKQWTQYAARLTKGDNIAPYGSNPHVPPVDTGEADSLGAYGLTLTFGISPSFLQKLNLTDKKPPEFSDSPKFPRDQIRPEYSGGDICIQACSDDPQVSFHAVRQLVRQARSSVSMRWSQSGFLGFDSGNQTARNLFAFKDGTANSNTLDHADKHVWIQQPDWLKDGTYLVVRCIQMHLETWDRTSLNGQDETFGRHRDSGAPIGQSDEFAHLDITAKDDEGNFIIPEISHAGLAKRSGLQLLRRSYSYASGIDPKTGQFDAGLLFISFQKSPMQFTAIQSSLGRVDKMNEYITHIGSGLFACFGGVKQGEYLGQKLFE

SEQ ID NO: 63145 - protein, 70 aa, Moraxella catarrhalis
MKQIKIKIEGMTCGGCVSSVQKALQAVVGVEAISVSLEDGLAVVAYDESDCDVPAIVEAIEEAGFDTQLV

SEQ ID NO: 63146 - protein, 292 aa, Moraxella catarrhalis
IMEIARYQEQIKDLHARGQELRGYLDIESKKERLEEVNLELENPDIWNNPDLATKISKEKSVLDGIVGVIDGLSAKLDDAAAMLELAVEDDDESLLSDVQAELDDALNSVEELEFRRMFSGEMDANNCYLDIQSGSGGTEAQDWAQMLLRMYLRWCESHDFKAEVLEVSEGGVAGIKSATIMVKGDYAFGWLRTEIGVHRLVRKSPFDSNNGRHTSFAAVFVSPEIDDNIDIDINPADLRIDTYRSSGAGGQHVNTTDSAVRITHQPTGVVVACQNERSQHANKDTAMKMLR

SEQ ID NO: 63147 - protein, 169 aa, Moraxella catarrhalis
MKIVTDKTPKVDIHAILTPQEIDGIHHHIHHYPQARAAVLDALKLVQKRNGWVNDAQVVAIANMLGISVADVEGVATFFNRIYRLPVGRHVILVCDSIACYLTGYETLLAEFKAQLGIEFGQTTADGRFTLLPICCLGNCDKGASVLIDEDTYGPVLPSEVGLLLEQYV

SEQ ID NO: 63148 - protein, 472 aa, Moraxella catarrhalis
MNKPNVSEQIDARKNGLAPSQLNRQKTPIWGVGLADGQAPTSLTHPLTWRLYHHDALLTLADYEALDGFVGLKNALTKSPKEVGEMIKTANVRGRGGAGFNAGLKWTFMTPPDGGVRYLICNADEMEPGTFKDRLLMERLPFQLIEGMLISAYAIGASVGYVFIRGEYVLAAKRLQNAINECVANHLLGDGILGTEFNFTLHIHTGAGRYICGEETALINCLEGRRANPRTKPPFPQVSGAWGRPTVVNNVETLNNMPAILLNGVDWYLNLPKAKGKSTTPGTKIMGVSGRVKDAGLWELPFGHTARELIELAGGMQEGLSLKAWLPGGASTDFLTASDEHLDLVMDFDPIMKAGSRLGTCLMMVVDESQDMVSLSKNLQQFFQRESCGWCTPCRDGLPWGVKILDAMDNGQAQADDIDKLSELTRDLWLGKTFCAHAPGAMEPLMSALKYFRHEFEQKVNNSKPQQNKVGV

SEQ ID NO: 63149 - protein, 1033 aa, Moraxella catarrhalis
MAVIHIDGKTYDVDGSDNLLSACLSLGIDVPYFCYHPALGSVGSCRQCAVKQYNNAEDYQAGKGRLVMSCMVAPSDDMYISVDDDEAKAFRKSIVEYLMTNHPHDCPTCEEGGHCHLQDMTYMSGHHRRRYRFTKRTHHNQELGPFIAHEMNRCIACYRCVRFYQDYAGGDDLGVYASNNRVYFGRPEDGQFDSEFSGNLTEVCPTGVFTDKTHSERYNRKWDMQYAPSICHGCSAGCNISAGERYGELRRIENRYNHDVNGYFLCDRGRFGYGYVNRADRPTHPLKKVNGQFVKTSADLAVDGVADLLKGKNVIGIGSARASLESNFALKRLVGANNFSTGERAIVKDVVELGVALLRHEAVHQASLAQIETADGVFILGEDITQTASRVALSVRQAAKNKARQMASALKTEHWLAEPVKRIGQSAYSPIYVACVADTKLSDIAKVSAVATPDDIAKLGFMVGDVIKAYADTLDEIGKSENAIFAKEKQTDLVIDDDMAMQFLAHHIAYDLIMANRPLVVTGTSLTSKAIVQAAGYIAQTLTAKRAKIAHVEREFIEVQNAKIRDEVARQFIDPDKNAKTDGTHTTERDPNDFEKELSSRLLKTNTLYADKTGVYVAMPEANSVGVNLLGGQAMEEVLAQAFEAVVVLEHDLSNLTPNQFDKLTQKTLIVLDHQSYEWHDKADFVLSSASFAESDGTLVSAEGRAGRFFASYDKKYYEPTSELKDSWRWLHALDNAMTNKMGELIWRHLDDVIDELIVEYPHLAQIKDVAPESDYRITGLKVAREPRRYSGRTVLRSPISIHEPMQPKDLDSGLTFSMEGYVGDKTNPSLIPFAWSAGWNSPQAWNKYQNKVGERLKGGDVGIRLFETLPKTQMVFGRVDIDHVNVATSIFYGRAVVVPVHNLFTSSRMISRSPVVASQIKPAMWMINHDDAERWMVKVGDKLTLSQHGAEITLPVEVVDYLADGCIGYPDGAVPLMVGIPTTVKKADKDTPVYVPDHQKSMQRLASIKRENIFTPKAGFNNAPFAMNKVGA

SEQ ID NO: 63150 - protein, 78 aa, Moraxella catarrhalis
MSRVCQVTGKRPLVGNNVSHAHNKTRRRFLPNLHNHRFWVESENRFVRLRVSSKGMRIIDKHGIEKVLADLRAQGQKI

SEQ ID NO: 63151 - protein, 51 aa, Moraxella catarrhalis
MRDKIKLVSTAGTGYFYTTTKNKRTMPGKMEIKKFDPKIRQHVLFKEAKIK

SEQ ID NO: 63152 - protein, 218 aa, Moraxella catarrhalis
MRIILLGPPGAGKGTQAQLISKEFGIPQISTGDMLRAAIKAGTELGKQAKSVMDAGQLVSDELIINLVKERLKQPDCDNGCIFDGFPRTIPQAKALADAGIAIDYVIEISAPDDEIVSRMSGRRAHLASGRTYHVIYNPPKTDGIDDVTGEALVQRDDDKEEVVRDRLSVYHAQTATLISHYQEVAKSGENAPEYHDFDGTKSIDTVRDEIFAVLKSE

SEQ ID NO: 63153 - protein, 1672 aa, Moraxella catarrhalis
MTHQDNSKNSSSAENGVSAGVAAPTKTQPKPPNPPKPQWLIYLIRLIVGAIIAALLLLAVLFAMTNSESGSKFLIEKIALETGTKLKYSEGSIRHGVWVQDVKIAQSEDITITINRAYVQLGWRALFARQVHLVNPKIDKVYVTNTKPSTGEPFDYATINLPVTLKLENAKVNEIIYDQVDSEPVVLHHIAFDHASWADSTVKIDNAMLSYGDDINISHATGGIDLTGHYPLSLSADVHILALDDAYFDTLSVKAGGSLKRTVGTLTGKYNQHHVTGSFIAQGLDKNSPFSARLDFDEVRLPYADSQNILLKNGSIIADGVISNIELRINTELSAKDIPDGHYHGRGIIRGSTMQIPYLQADTANGTLVATGDMTWEDGYELDATITADGYRIREEMPSDYHEYRAYLPKVLTGSLGVKYTLLDKASHDTRFEFDLNQKDGERIQATLAQNQQSDHEPWRIDATWANLIRHDIPQIGEIHSRSGQASVRLENGHTYINASADIVKLNAVPSGSYHVQANIEQNQHLHLTDFNYQGVMGELTGTGRVDFATAQRPLEWQLDVTANPVKPNAYFQTPNQTPFEQISGRIIASGRLREIDGVSIHDIKVDDSDLTALLNDGKQVHLMGQGVSKIRLQDGQISHLKANFDGKLAQDILPQVADSSIGLDIEGDLNDLTITRAVMMNDSGKVSLAGRLGLNDGIHWQIQGRLDEVDTAAFVDDDNLVAIITGDLATSGRYRDGVMDDIALTFDGQVINNSIPNGHLSIDATGSGNRFMVNHLRHDGTAGTLNATGWVDISQGAAWQLEADMNSLNLGAFIQSLDTDLNGTIQLAGNWQESHQVIDISNLDITGSYNNQPLIATGSLYAKLSLPKDLAGYIQSIKQASRPPTSSDDLLALKNRIDNNARQTQNIVHKLNADNLQVRIGNNHLAISGDERQLTASVNVIDLGQLIDTASGAIQGGVIVVNDHHALPTLYIDASVSSLRFANITIQNAQAIGKIVNLGNSESQLLVQGDDIIVMGRTIKSARMDFSGTEADHILSISTKSGDIEASMHIDGAFNRNNMRYHGVLSDGFVKSGFGKMSQRQPTEFSYGLDDNSLQIAAHCWQSAHIQGDGVGAICLQDTLSYTPQSGNVNLIIQNLDTQVLLAALPSDIHWKSMLNGRIKAMWQAGQSPLVDAVLYSDDGTIGLTQEETGYIEMPYQRASVIAKSVDNGLKVRTDILGTAGRGYADVIINPKQTDKPISGALVMNDLNLAVLRPFFPSIQTLSGKVSLAGGLGGTLSKPLFYGNANLKNGALAIVGVPMPISDVDATVNIRGTKARLDGRFMGGEGHGVLYGEMDWAEELYARLGVFGENLTVSQPPLVTAQISPELEVIIRPFQKFVDVQGVVSIPSATIRPPEATADIVTESPDVSVIDRRITGNIDQILSRAKPWDINANIGVDLGNEIEFRGFGAVLPLAGAIHLTQSGQGAMQALGVVQVSKRTKIDVIGQNLDLNYAQIRFDGDMLNPRLSIEGEKQIEGQTVGVRIRGTASNPNITVFNDAGLDEYQAMNALVTGRISESSDLGITEQGFRSQVTNHLAAAGLSLGLSGTRDLTNQIGHAFGFQSLTIDASGSSDDTNVNVTGYITPDLYLRYGVGVFNAESTLSMRYQLTRRVYIEATSAAENMVDVIYRWKF

SEQ ID NO: 63154 - protein, 456 aa, Moraxella catarrhalis
MTKHYDYLAIGGGSGGIASINRAAQYGKKCAIIEANLIGGTCVNVGCVPKKVMWYAAQIADAIHKYAPDYGFKGNIDEFNFGQLIQSRQAYIERIHRSYRMVFERNGVELIQGFARFIDKNTVEVAYDDGTTEQISADHIVIATGGQTVRPDIIGQELGIDSDGFFALDEMPKRVAIIGAGYVAVEVAGVMNSLGAQTHLMIRGNQPLRSFDDDIVEVLVNVMQNDGIQIHTGVNTQQIIQNEDKTLTVEFNDGQNLTVDCVIWAVGRKPATDQLNLDVVGIKTNTKGQIITDKFQNTNIEGIYAVGDIVANGVELTPVAVASGRRLSERLFNNKPDEHLELNLVPTVIFSHPPIGTVGLSEASAIAQYGADNIKVYTSNFTPMYSAVTSHREPCRMKLVCLGEEQKIIGLHGIGFGMDEMIQGFVVAMKMGATKQDFDDTIAIHPTAAEEFVTMR

SEQ ID NO: 63155 - protein, 351 aa, Moraxella catarrhalis
MADIAGQSLDGSDIELLSNPEIGGIILFARNVKSPAQVRTLTDSIRQINPQLLIGVDQEGGRVARFKEGFSSLPAMGKLGQLYDKSPKDALSLAYDCGYLMACEVLAVGVDFSFAPVLDIDGKSLVIGDRAFHANPDAIITLSRQFMDGMKNAGMATTGKHFPGHGSIAPDSHIADAIDERSFDEIMDYDTQTFIKTLDKLDALMPAHVVFSQVDDKPAGFSKIWIQDIVRNQLGFDGVIFSDDLCMQAAHIVGGIDARVVAAIEAGCDMALVCNHRQNALLAIETAKKLKDTPQHRLIKMAGNIPTWQGSLEATCHQFPLWQAAKHRIQAAFFQENHETLAKDPTVYSVC

SEQ ID NO: 63156 - protein, 348 aa, Moraxella catarrhalis
MKVLGLETSCDETGLAIYDSTMNGGRGGVLSQVLYSQINLHATYGGVVPELASRDHIRKLVPLFNELLDQANITKSDIDAVAYTKGPGLIGALMTGALFGRTLAYGLGVPAVGVHHMEGHLLAPLLASDDPPSFPFVCLLVSGGHTMLVRADGVGVYQILGESIDDAVGECFDKTAKMLKLPYPGGPNIEKLAKNGNPHAYELPRPMQHKGLDFSFSGMKTAIHNLIKDTPNAQSDPATRADIAASFEYAVVDTLVKKCTKALQMTGIRQLVVAGGVSANQMLRRTLTETLRQIDASVYYAPTELCTDNGAMIAYAGFCRLSCGQSDDLAVRCIPRWDMTTLGVSAHR

SEQ ID NO: 63157 - protein, 271 aa, Moraxella catarrhalis
MSDKNPTQISMRDLLEAGAHFGHQTRFWNPKMSQYIFGARNRIHIINLEHTVKQFNEALTFVNKQAAARNKILFVGTKRAAGAVIREQAQRAGMPYVDHRWLGGMLTNWKTLRQSITRLKELEKQAEDGTFAKLTKREALERTRQMEKLERALGGIKEMGGLPDALFVVDVDHEAIAIKEAKNLGIPVIGIVDTNSNPDNVDYVIAANDDAIRAISLYVTAMADAIIAGKEYAKTQGHADAADADKQANRENATAPVEDKVDQAGQVVNNY

SEQ ID NO: 63158 - protein, 292 aa, Moraxella catarrhalis
MTQVSAKLVKELRDRTGLGMMECKKALEEAGGDIELAIDNLRKSGQAKAAKKAGNIAADGAIIIAQGEGKALLLEVNCQTDFVAKDENFTAFANKVAKLALENNTTDVAAIAQLPYGDGSTVEEARVALVQKIGENIQVRRAEVIEGANLAAYRHGLRIGVVVSIEGGSEEVGKAVAMQVAAFNPLAVNEADVPVDILAREKDIIEAKAKESGKPEAVIEKMITGGLQKYLNEVTLVNQPYVMDNDKKVGDVLKSENATVVSFKRLEVGEGIEKKQEDFAAEVAAAQAAAKA

SEQ ID NO: 63159 - protein, 194 aa, Moraxella catarrhalis
MSFHPERFIEVALKNHVLCFGEFTLKSGRKSPYFFNAGLLSTGELLSVLAEGYADTLAKHANQDDLVIFGAAYKGIPFVAATAQVLWREHQINAEWGYNRKEAKNHGEGGMLVGADLNGKSVWVVDDVMTAGTAMREVITLLGKAGASVAGIIVALDRKEKGQSDRSAIQELAESLQVPVLALVTMDDIIDYVA

SEQ ID NO: 63160 - protein, 975 aa, Moraxella catarrhalis
MSIDNLSTNYNPANIEQKWYKIWEQQGYFKPQPNPAMSDKQNAFSIALPPPNVTGSLHMGHGFNNTIMDTLTRYHRMMGHNTLWQPGTDHAGIATQMVVERQLGLQGISRHDLGREKFIDKIWAWKEQSGNTITRQIRRLGSSVDWSRERFTMDDGLSQAVKEVFVRLYDEGLIYRGKRLVNWDPKLHTALSDLEVESVEEQGSLWHFRYHFADQSLTTQDGKNYLVVATTRPETLLGDSAVAVHPDDERYAHLIGKTIVLPISGREVPIVADDYVEKDFGTGCVKITPAHDFNDHELGKRHELPLINIFDEDACIKAEFDLIAKVGEPISNHITAPADYAGLERFAARKKLIEQAQNENWLEKIEPYTLKAPRGDRSGTVIEPLLTDQWYVAIETLAKPAIEAVQNGDIQFVPQQYTNMYMAWMRDIQDWCISRQLWWGHRIPAWYDDNGNVYVGRDESEVRAKYHLGDIPLRQDDDVLDTWFSSALWTFSTLDWTGQTSFDDYGDALQTFHPTSVLVTGFDIIFFWVARMIMMTMHFIKDKDSKPQVPFKTVYVHGLVRDSQGQKMSKSKGNVLDPIDLIDGIDLENLVNKRTQGLMNPKEADNIAKQTRQEFPDGIPAFGTDALRFTYASLASTGRDINFDLKRIEGYRNFCNKIWNATRFVLMNCIDKDGRPQNIDKSANPKLWQLPEHWIISRLNATINDIHEHISQYRFDLMSQAIYEFIWNEYCDWYVEFAKSSLNASGQDSTVSDERKAQIRYVLLFVLEMAMKMTHPIMPYLTEEIWQTITPLLGKTGKSIMLSTYPKYDDSKINEQAESDMAWLQSLIGAVRNIRGEMKLGNAVRLPVLIQGVSDEQKASLVRIDNQFKTLAKVDSLTIVKTGEEVPLSSSGMVGQMKVLVPMKGLIDPTAELNRLNKVRDKLQTQADAINKKLSNDNFIAKAPAQVVEAERAKLSELQGQLAEVEKQVGALGNL

SEQ ID NO: 63161 - protein, 358 aa, Moraxella catarrhalis
MRHFLFDIIFTFVCLVIAAWWGYSHGGISEMFLALGITAILAIMEISLSFDNAVVNASILKGWNDFWKKIFLTVGILIAVFGMRLIFPIAIVAVTANLGMGEVIHLALNNPVQYAEHLNAHHAEISAFGGMFLLLVFLNFMFGDKDVHWFKWLESRLVKFSKVDAMSVFVALVVLMISMSWVEEAKQGVVMVAGIWGILVYLGVSVLSALLEGDGDDKAAVYDAKGREITNTAGVSSTILKGGIAGFLYLEVLDASFSFDGVIGAFAITNDVIVIMIGLAIGAMFVRSMTIYLVNKGTLSDFIYLEHGAHYAIGALAIIMLLSTRFHVPEIITGLIGVAFIVLSVFNSIQYNKRHANS

SEQ ID NO: 63162 - protein, 413 aa, Moraxella catarrhalis
MKFMTAQIAKKAILALADGTIFHGISIGAMGSSVGEVVFNTAMTGYQEILTDPSYAKQLVTLTYPHIGNTGTNSEDGESGSEHRIWASGLIIRDATIISSSFRNDESLTDFLQRHDTVAIAEIDTRKLTRILRDKGAQHGCIYAINSDTDITADDENKAVQLAKEFAGLTGLDLAKECCHPQGFEWTQGTWELADNPATTAKYGKTDSPTGGYFKQLGKHISKKFHVVAYDFGTKTNILRMLVDRGCHVTVVPAQTPISEVLAKNPDGIFLSNGPADPAACTYAIDNIKHIIKQTEIPTFGICLGHQLLGLASGAKTIKMKSGHHGANHPVQNLADGTVMITSQNHGFAIDEATLPANVKATHRSLFDGTNQGIELTDKPAFGFQGHPEASPGPHDCSVLFDRFIMEMQKAKV

SEQ ID NO: 63163 - protein, 1078 aa, Moraxella catarrhalis
MPKRTDIKSILIIGAGPIVIGQACEFDYSGAQACKALKEEGYRVILVNSNPATIMTDPSMADATYIEPITWQTVEQIIAKERPDAILPTMGGQTALNCALDLDKHGVLAKYGCELIGATKEAIEKAEDRELFDKAMKKIGLECPKAEIAQSMDDAFAIQAKVGFPCIIRPSFTMGGSGGGIAYNREEFIEICERGFDLSPTHQLLIDESLIGWKEYEMEVVRDKKDNCIIVCSIENFDPMGVHTGDSITVAPAQTLTDKEYQIMRNASIAVLREIGVETGGSNVQFGINPKTGRMVVIEMNPRVSRSSALASKATGFPIAKIAAKLAVGYTLDELKNDITGGKTPASFEPAIDYVVTKMPRFNFEKFPQAESVLTTQMKSVGEVMAIGRNFQESMQKALRGLEIGVTGFDEQLDFEQNDDSIISTLKLKLKTPTPERIFYIADALRFGLSVDDVFADTNIDPWFLVQIEDIVHTENQLKTLGMGDLTPNLLRRLKRKGLSDARIAKLMGVSEKQFRKTRWNMGIYPVYKRVDTCAAEFETSTAYMYSTYDEECEANPSNKDKIMVIGGGPNRIGQGIEFDYCCVHAALAMREDGYETIMVNCNPETVSTDYDTSDRLYFEPITLEDVLEIVRTEQPKGVIVQYGGQTPLKLARSLEQAGVPIIGTSPDAIDRAEDRERFLQMINKLNLRQPNNSIVKSSEEGIREAAKVGYPLVVRPSYVLGGRAMEIVYNEDELKRYLRDAVQASHEAPVLLDHFLDDAIEVDVDCVSDGKEVVIGGIMQHIEQAGVHSGDSACSIPPYSLSDDIQDDMRRQTVAMAKELGVVGLMNVQFAIKGETVYVLEVNPRASRTVPFVSKCIGVSLAKVAARCMAGQTLAEQNFTQEIVPSHYSVKEAVFPFAKFPGVDPILGPEMKSTGEVMGVGQTFGEAYYKATLGSGDRLTGLPQEGETKTVFISVRDSDKAGVVDVAKRLAGFGFNIVATGGTHDMLVGAGVACKRVNKVSEGRPHIVDMMKNGQIHLAINTTEGKQALKDSFPIRREALQNKILVANTLNAGRAVCEAYETTLPFDVYKLQDLYAS

SEQ ID NO: 63164 - protein, 959 aa, Moraxella catarrhalis
MTAMTNTAYPNINSIPSLAKLSTDQVDTTRPPVILVDGSYYLFRCFHGLPPLSNSQGLPTNAIRGVLNALNKLIKKYHPTHMAVAFDTKAPTFRHNLSEAYKAHRPPMDEALRIQIPYIHEMIEKLGIALIKIDGFEADDIIGTLAYQACQQGHRVIISTGDKDMAQLVNDCVMLEDSFTGKLTDNAGVIEKFGVTSEQIADYLALMGDASDGISGIPKVGQKTAAKLLNEYQNIDGILANLANIKGAVGKSIADNQDSIPLNRILATIVTNLKLAISFDDITLDHSQETTIKRAPALYALFEELEFKKEMAQTAELLNLPHQPTDKAVSIDIHDNTLSSQTPILPIKDISYHTITTQQDFTKLLDKLNHTPYFAIDTETTDINWQHAKLVGISVSTADYEGYYIPVGHTADFDVLLDNQLPIDTVLSAFKPILENPNIGKIGQHLKYDAHIFKKYGINISPWQMDTMLASYVINAAATRHGMDALAKHYLGVQTTTFEDVAGKGAKQLSFDKVAMDAASQYACEDADITFRLFNRFNQHINQDKTAAQLLYHLEMPTAQILTQMEHDGILIDTDFLGQLSDEFDKKIMALQIEAERIADEPFNLASPKQLGEILFDKLGIAGGKKTKTGQYATSEAVLSKIEHPLIDVVLEHRSLSKLKSTYTDTLANAADEQGRVHTSYHQALTSTGRLSSSDPNLQNIPIRTDTGRLIREAFIAPKGRMILAADYSQIELRLMAHFSGDESLIRAFNHNLDIHTATAAEIMGKDISEVTPSERRAAKAVNFGLLYGMSAFGLAKQIEVDRAVAQDYIKRYFARYPAILEYMERTKTMAKQLGYVQTILGRKLYSPDIQSSNRMIKDAAERAAINAPLQGSAAEIIKLAMIAVDEVLPKDDAKLLLQVHDELVFEVDTDKAHDIGNLIKTAMQNALTDTAKKLGWAVDFAVPLVVEIGIGENWEQAH

SEQ ID NO: 63165 - protein, 404 aa, Moraxella catarrhalis
MRFIDEAVISVKAGDGGNGIVSFRREKFVPKGGPDGGDGGKGGDVYAIADDNTNTLVDYRYTRKFEAHRGENGGSKNRSGKGADDIYLAVPIGTTIIDTDLDVVIGDLTEKGQKILIAKGGDGGFGNTRFKSSTNQAPRKATPGFAGETRNIKLELKVVADVGLIGLPNAGKSTFIRQVSAARPKVADYPFTTLVPNLGVVDVGSHQSFVMADIPGLIEGASDGAGLGIRFLKHVARTRRLLHIVDVQPIDESDPVANAQIILNELNKFSQELSQLPQILVLNKIDQIPNEQRDAVCQDIITRLGWTGEVFYTSTLTGEGVEAVKHHLMQVIEDERERELEDPMFAEAQAARFARLEEEVRHNTEIQKEAYRAMRKAQREGGDGDDDDNWNDDDYDVAVEYAPY

SEQ ID NO: 63166 - protein, 774 aa, Moraxella catarrhalis
MIVLFVMMAAFVLYAMHLNTAVVGKFENRKWDIPATLYSRPLVLHQGAALSAKDLESWLKLLRYSHDDTSQTGRYQKNGQVYTIYTRGFHYGDADKDPKQLIEVHFDRNTIKSLKSSAPNNSGILRLEPIKIGSIYPDNLEDRLLITQEQIPKPLVDALIATEDRNFYQHHGISMRGVARALFTNLTGGQVQQGGSTITQQLIKNFYLDSERTLKRKINEALMAVLLETHYSKDEILLAYMNEINLGQNGKQSVNGFGIAAQFYFDKPLGELSLEQYALLVGLAKGPSHYNPRKNPERALQRRNTVLNSMLATGKIDTATHQDAINRPLGVVKTPAIARLQFPDFFDAVQRELKTHYRSEDLKNRGLRIISTLDPLAQQAADTAMTNQLGKLRKKGGRTQKLQGALVSAHPATGELVALVGSGSDFTGFNRAIDAKRQVGSLLKPVIYLTAFQSGQYNLTTPVNDTQTSYTVNGRSWTPKNYGGQSHGSVPLLTALAKSYNQAAVNVGMQLGLDAFKAQLGNLSITTDVPPYPSAMLGAIDLSPMQMLGMYQIFANGGAYTPIHTIRTVIDDNGRVLQRSQPRHQFRAPPQAVYLLNRGLQEVIKSGTAKAADSINNHLGLAGKTGTTNDNRDAWFAGYSGNYVSVVWVGRDDNQPIGLTGGSGALPIWMDYMKRLNLTAVNLPLPTGVTWQWMDGRLGLPTMESCPDARWLPVIDLYRPSQMSPCASAILYQEQIYRQMLEYGSQGIADTEDVYIEDAPIYDEPAEDGDNPWW

SEQ ID NO: 63167 - protein, 473 aa, Moraxella catarrhalis
MKLHTSALVLAMSGIMLSQTAFSNDSANLSNSEFQQCLSTLKNSSTFRSVSGVTFEKYRPSQPDPSVIRSLNYQPEFKKDVWDYLASLVDSERVQDGIRAKHEQADVLRRIESRYGVKPEHVLGVWGVESNFGQTLGKKNLFDSLATLSCFDRRQSYFRGEYANALKIVQNGDIRPEDMTGSWAGAFGQTQFMPSTFLELAVDFDGDGRKDLVNSKADALASTANFLVKRGYRLGEPWGYEVRLNGYNGSSGRRNKQSINHWRAQGITLPNGQPIPNNMASAGLLLPAGRQGPAFLVGKNFDTFYSYNASESYALAIAQLSDLVRDENTNTNFATPWPTDDPGIGRRESKEIQQALINAGYDIGAVDGIIGDNTRQAIMDYQRKVGVMPDGRAGQKFHRLITGRTASIQSAQTPAQSINTPTTQYHSVQPTVSTQANATRAVIVKPANTPPTTGTTYRRVINADGSSSWILVK

SEQ ID NO: 63168 - protein, 284 aa, Moraxella catarrhalis
MALCMPEKNLLKSSINHNLIKNKIYIIIEGTDTPAGKLFDVLILVAIITSVLVVMLDSVLFLRLQYGRLFFVAEWFFTILFTIEYALRLYSAPNLRRYVTSFYGAVDLLALLPTYLSLFFAGTHYLLVVRILRILRIFRVFRLKSYMQQAGFLAAAFKTSQHKITVFFLSLLLLVTIFGSVLYVVEGPENGFTSIPLSIYWAVVTLTTVGYGDISPKTPLGQAIASMVMITGYAIIAVPTGIFTAELTRTMRPQLQPISCPNCGKFGHATNAKFCDRCGHDLHV

SEQ ID NO: 63169 - protein, 159 aa, Moraxella catarrhalis
MQVILLQRVVNLGKLGETVDVKAGYGRNYLIPQGKALPATEANLAKFEARRAELEALEAEELLAANARAEALADVNVIMRAKSGDEGKLFGSIGARDIADALTKSGLEVDRSEVKMPEGAFRQIGEYKVTIQLHHDISTDILVTILSEDAPTADEDDSE

SEQ ID NO: 63170 - protein, 75 aa, Moraxella catarrhalis
MARFYRRRKFCRFTAEGITHIDYKDVELLKQYISENGKITPSRITGTSTKYQRQLAVAIKQARYLALLPYTDNHK

SEQ ID NO: 63171 - protein, 133 aa, Moraxella catarrhalis
MRHYEVVLLVHPDQSNQVADMVTKYRSIVEDNGGNNHRLEDWGRRQLAYPINKIHKAHYVLLNIECNDETLAQLEELFKYNDAIIRSLIIRRDEAITEQSPLAKEAEDKRTRKANRRNDVRTQEAESDNTASE

SEQ ID NO: 63172 - protein, 1314 aa, Moraxella catarrhalis
MMSTIAGLEFLTDFQAQKLADQLKQKAGLNIYTLSSQQVYVFDTPLSESDHQKAIDLLNQGQTPSLKTADDTQIQVVVAPRFGTISPWASKATDIFNNCGVTIGRVERVIVYTLTGENLPKRLPAIAESILHDRMTQSLVYELSDVSVLFVDGEPAHLSVVDILGMGKDALVQANAEYGFALSDQDMTYLVENFTKLGRNPTDVELMMFAQANSEHCRHKIFNAEWTVDGEVQPKSLFKMIRNTHEQNPEGILSAYKDNAAVMEGFVAERFYPTKTTEGNAQYGFHQEQIDILMKVETHNHPTAIAPFAGAATGAGGEIRDEGATGRGGKPKAGLTGFSVSHLHLPTMPEKWETTGQVSAVSYGKPSRMASALDIMIEGPLGGAAFANEFGRPNLNGYFRTFQLDISDHQDGSQMRGYHKPIMIAGGYGNIKRDLVQKNAIQEGDLLIVLGGPAMQIGLGGGAASSVDSGKLDEGLDFASVQRDNAEMERRCQEVIDTCWAMTKDGMDANPIISIHDVGAGGLSNAMPELVDDHELGAHLNLRKVPSLEAGMSPMAIWSNEAQERYVLAIRPESEALFDSICSRERCPYAILGTATTVRQLIVDDSLLPERPVDMPMQVLLGGTPKMKRSFNRTEFALKPLDTASVNIKDSIKDVLRHPTVASKSFLISIGDRSITGMVTQDQYVGRYQVPVADCAVTSTALNAITGEAMAMGERAPVALINPAASARLAVAEAVTNIASARIDKISDITLSANWMAACGDEKEDAALFDAVHAVGEELCPALGIAIPVGKDSLSMKAVWSEDGVEKSVTSPMSLIITAFAPVQDVSGTLTAALNNTDSALYRIDLSSGKFRLGGSILAQTLNQLGCDCPDLERPEDLANFFAFIQAAAKAGVIQAYHDIGDGGLIASVAEMQFASRMAITLALSDENLLGQLFAEELGAVVQVLPDDVPAFVDLAKTHGVSEFVSLIGQAKTTPAGGAGLDVLSITTPSQTLSFTRSELQKQWTKVSHAIQSLRDNPICADQEFALIDDMNHHGLIADANYDLDLAVEAPYVNSRTTQPKVAILREQGVNGHLEMGAGFVRAGFDAIDVHMSDLMSGRINLRDFEGLVACGGFSYGDVLGAGSGWANSILFHDEMRMQFARFFHRPETFALGVCNGCQMMSQLKDLMVGAESFPRFIANKSARFEARTVNVRIERTKSVLLKGMQDSILPVAIAHGEGYANLDDKSMADLTYHGQIALRYVDSQGNPTEHYPLNPNGSPQGITGICSNDGRVTLMMPHPERTLRAVNHSWKPDEWTNDGAWMRLFRNARAFLR

SEQ ID NO: 63173 - protein, 407 aa, Moraxella catarrhalis
MTITNNQETKFPVLWVMMLGVMIAIGPLSIDMYLPAFPSMAEDFGVNVSTIAKSVPAYFLGLVFGQLFYGPFSDRIGRVRPLYLGMSIFIIASIICATTNNAYVLFIARTLQALGACVTTVVTRAAIRDTLNPVQSARAFSLMVLVMGVAPILAPSLGALILKVADWHGIFWFLASFGVLNLLLTKCFLKETLKPENRNTRPMSESFGQYFGLMKDHTFMLPAVASGLLQGAFFIYLSISSELFMVNYRLTEHQFAIAFGVNAFGFIALTQVNQFLTKRFHLVNLLRTGAVIQLAAAGVLLILGLIFGGKASFYWVFVSLFICIAGLGLTQPNATAITLAFQKKRAGLASALQGALQFSVGIFGGLLIGLFELDPVTRLGITTSILVAVGTFLVFYINPKLDLSRLD

SEQ ID NO: 63174 - protein, 385 aa, Moraxella catarrhalis
MKLSINRDLLLKAINLVVKAADKRHRFAILANIKLVLEEGFLTLTASDLELELTTRFALPKDGCIQAGSTTLPAEMFFSVCKSLPEEVVVIDAPEDTTHCIITSGTGRYTLSCLPADDFPTIGTATPLSVIKISQGNLSSLIHHTRFAMATQDVRYYLTGMLFDIGENTLTAVATDGHRLAVAHRLLNETYAPNQVIIPGKAVAELERLLIELAKTVDDSNIVELGFDAEFLQVGLVLKDEDTDNEITVKLSARLIEGKFPDYRRVIPANNDKIVLFNKDEAVDVLRRISVLNTKEEPGVLMNFDTTDFCKVGVTNRNLGEAEEMLGVNYSGDAIELTFNEAYLRAVLNVLEGEVCLELNQPSSPALIYQVGDDLHRYVIMPMRR

SEQ ID NO: 63175 - protein, 819 aa, Moraxella catarrhalis
MTDNTNNHPQVDAQEIEYTAKNVRVLRGLEAVRVRPGMYIGDTDDGTGLHHMVFEVVDNAIDEALAGHCDEINIIVHDDESVSVMDNGRGIPVDTHPEEGVSAAEVIMTVLHAGGKFDDNSYKVSGGLHGVGVSVVNALSKKLILTIWRDGYAHTQNYTDGVPDAPLAKLEPSTQTGTQVRFYPSFEIFKGVQHFDYDILAKRLRELSFLNSGVRIVLTDERTSTTQVFEHKGGLSEFVSYINGGKHTLNDIFHFTADGADGIGVEVALQWSDSYNEKVLCFTNNIPQKDGGTHLSGFRSALTRCLNHYLDSENITKKEKVQITGDDAREGLTAIISVKVPDPKFSSQTKDKLVSSEVKSVVETAMHERLSEYLLENPTAAKMIASKIIDAARARDAARKAREMTRRKSTLDIAGLPGKLADCQEKDPALSELFIVEGDSAGGSAKQGRNRKMQAILPLKGKILNVERARFDKMLSSAEVGTLITALGTGIGPDEYNPDKIRYHKIVIMTDADVDGSHIRTLLLTFFFRQMPELIERGHIYIAQPPLYKVKRGKQEVYLKDTEALDAYLLSSTIDDHQLFLSKDTPPVTGVALEKLLKDYSQSQVIKAHLQSKYPSHLLDALTLIPRLDVSAIGDKQAVDEWALALENQLNDLEPKLDAKVEAVQVLGGDDGNGHWLPRVTLHIHRLPHQYLLDTNFLGSADYMRLLKLSANWNTVLSNSAFLRRGDKDFIIKDFEYLWQQLMLAARRGVDVQRYKGLGEMNKEQLWETTMDPENRRMLKITIEDAIKADHLFSCLMGDEVEPRRIFIEENALNADIDT

SEQ ID NO: 63176 - protein, 519 aa, Moraxella catarrhalis
MTNITQDRILILDFGSQYSQLIARRVREAGVYSEIHAFDMSDEDIRAFNPRGIILSGGPESVHQEGSPRAPKAVFELGVPVLGICYGFQTMSEQLGGKVEAGLVHEFGYAKIDITHQDKLLSKINDEKNQSQVWMSHGDKVASLPTGFTVTSSTPNCPYASASDEDRQLYGVQFHPEVTHTEKGEQLISNFVHIICGCGNAWNSENIIEMRIEQLKNQIGNQKVLLGLSGGVDSSVVAALLHRAIGDQLTCVFVDNGLLRLNEGDQVMQMFAENMGIRVIRADSEARFLNALAGVSDPEAKRKIIGREFIEVFSEEARKLDGVKFLAQGTIYPDVIESAASKQGKAHVIKSHHNVGGLPDDLAFELVEPLRDLFKDEVRKLGVALGIPHHMIYRHPFPGPGLGVRILGEVKKEYADILRLADDIFMQELRASGWYDKTAQAFAVFEPVKSVGVVGDGRRYAWVIALRAVETVDFMTARFAHLPYELIDKISTRIMNEIKEVSRVVYDVSSKPPATIEWE

SEQ ID NO: 63177 - protein, 426 aa, Moraxella catarrhalis
  MISC_FEATURE (2)..(2): X=any amino acid
MXFSKFGEKFIQNSPILQLMDDLGNALNGDTPINMLGGGNPANIPEVSAAYHAAYQQIATNGTAIESMSNYASPQGDSKFIKVLVEFFNRHYGWGLTADHIVLTNGSQNAFFYLFNLFAGQFCDGSHKSILLPLSPEYVGYADVQVEGSYFVSLPPIIEKTTHEGREGFFKYKVDFDALENLEELNNNKIGAICCSRPTNPTGNVLTDGEMAHLKQLAKMHGIPLIIDNAYGAPFPNIIHTSTTLEWDDEAILCFGLSKIGLLGVRTGIIIAHPKVTKAVSNMNAIVNLSPVRFGAAIATPLFENDEIICLSDELISPFYKKQSIFAIRRLQEEFADYPVYIHQPEGAIFLWVWFEGLPISTTKLYQILKQQGTLIIPSEHFFVGMQTADYPHAKECIRLSIAQDDHTLDQGIKTIGEVVRRLYHN

SEQ ID NO: 63178 - protein, 321 aa, Moraxella catarrhalis
MTIRTLTIATRQSPLALWQANFIKAKLEQLYPSLSVELLEMVTKGDKILDTPLAKIGGKGLFVKELEQALYDKRADIAVHSLKDVPMILPEGLMLGAYCERHAPTDAFVSNHFEHLDDLPTGAILGTSSLRRECQLRQARPDLDIKSLRGNVGTRLGKLDAGEYDAIILATSGLERLGLHERIRHELDDELSLPAVGQGALAIECRSDDEAIKLLLSPLNHPKTRLCVLAERAMNRALEGGCQVPIAGFAVIEDGMLTLRGRVGSVDGKTLLKAQQSHKLMGEIQLDEQAAEQLGIDVAHELLMQGADDILKQVYQNALNS

SEQ ID NO: 63179 - protein, 310 aa, Moraxella catarrhalis
MTTQTQHTPKRDYRQRFFIDGSVVRGDVVKLTDAYQTVITQKDYPVALKALLGEMLVSASLLISTLKIDGKLSIQLQSSDSDARLNWAMAECDHTGSVRALAGFDDTNQNQTVWQHLKSADEAFGELGKGVLFISIHPDNGEAYQGIVERVSDSLGECLAHYQRQSAQIPTIIKLATNETTAGGILVQLLPQSDADKEADPDLWDRLTALTDTLKTDELTDLDANEILYRLYHEEDVVLPSLTPLQFACTCSSQKSEGAILQLGYDEAKQAAAAQGGVLTLDCGFCGREYRFDDQALAQLFADGLSNHHK

SEQ ID NO: 63180 - protein, 503 aa, Moraxella catarrhalis
MRYANPNTKDSKVSFKEKYENLIGGKWVAPVDGEYFEDISPVDGKGFAKVAKSNKKDVELALDAADKAKQTWNKSTPSERSNLLLKIANHLEENLELLAVAETWENGKPIRETLAADIPLAIDHFRYFAGCIRAQEGGISQIDEDTVAYHYHEPIGVVGQIIPWNFPILMAAWKIAPALAAGNCIVLKPAEQTPVSILVLIELIEDLLPAGILNVVNGYGPDVGELLATNPRIGKVAFTGSTEVGQKIMEYATENIIPATLELGGKSPNVFFADVMDKDDEFLDKALEGFTMFALNQGEVCTCPSRALVHESIAEEFLKKAVERVKKIKTGHPLYTETMVGAQASQEQQDKILGYIDKGKSEGAKMLTGGEVRYDVDGGYYIEPTVFKGENSMEIFRDEIFGPVLAVTTFKDFDEAIKIANDTMYGLGAGVWTRDGSTAYRAGRAIQAGRVWTNCYHIYPAHAAFGGYKKSGIGRENHKMMLEHYQLTKNLLVSCSPKAMGLF

SEQ ID NO: 63181 - protein, 103 aa, Moraxella catarrhalis
MYAVIKSGGKQHRVSVGETLKVELLKAEKGETLKIEEVLMVVDGAEIKIGSPVVTGASVEAEVVEHGRGKKVRIVKHRRRKHYHKEQGHRQWFTELKIKAINA

SEQ ID NO: 63182 - protein, 545 aa, Moraxella catarrhalis
MPNAQAINQDFLNKLDQDLWKAADTLRKNLDAANYKHIVLGFIFLKYISDTFTDFQGKLKANIANPESDIYLDPSLFEPSEFEQILSAELEERDYYTAENIFWVPTQARWENIKDNSKLNAGDELPWGGKFKNVSILLDDAFEAIEQENPKLKGVLQRIAGFGVPDEMLRGLTDLFSRTDFTRPMYNGEPVHLQAKDILGHVYEYFLGQFALAEGKKGGQYFTPKSIVTLIVEMLEPYSGRVYDPAMGSGGFFVQTDRFIQAHQGNRNAISVYGQESNPTTRKLAVMNMAIRGIPFDFGDKPEDTLLNPLHIDKKMDFVMANPPFNMKEWWSESLAGDPRWAYGTPPQGNANFAWLQHMIYHLSPKGKMALLLANGSMSSQTSGEGEIRKNIITADLVEAMIALPNQLFTNTQIPACIWIINKAKARKGEVLFINATQIGYMKDRVLRDFTVDDIAKISDTYHNWQKQDGYENIPAFCYSATLDEIAKNDFVLTAGRYVGAVTEEDDGVPFSDKMQELTACLNEQFKQERELEQQITENLKGLGF

SEQ ID NO: 63183 - protein, 1048 aa, Moraxella catarrhalis
  MISC_FEATURE (837)..(837): X=any amino acid
INENTIEQSAIATMQSLGWDYAYGKTILLGCQNEWRERTGEVILKPLLAAAIAKLNPNLPAAEVENVVAMVCRADTGDLAERNRGAYEWLRNGVPYRYQAQGEQKFEVVRLVDFGVPAHNDFRIVNQLDIGGKKGKRIPDLIGFVNGLPLVVFELKNPLKENADIGKAFAQLQTYKDEISDLFVFNQALVISDGIVARIGSLTADFERFTPWRVVDEKNKSQRIVFENELEGLLQGLMTPKNLLDYVQNFVVFERDNKNRTIKKIGAYHQFYGVNEAVECTLLASSHTGNRKVGVFWHTQGSGKSLSMLFYAGKVLSQGSLKNPTLVLVTDRNDLDGQLYATFCGGEALLKQTPVQVDGRDELRSALASRSAGGVIFTTIQKFGLMEDELSHPILNERQNIIVITDEAHRSQYGFSQKINDKGQYREGYAKHLRSALPNASFIGFTGTPIALDDKDTQEVFGKYVSIYDFEDAVKDGATVPIIYEPRQISLGESHDFDKVVKEAQTLLDDDEQNPTFRLREKLHGVESRLQKMAEDIIAHYDERTKQQDGKAMVVVMSRAICVKLYEKIIAIRPDWHSDDVLQGVIKIVMTSNASDPAEWQKYNQDKKTLEKRFKDPDDPLKIVIVRDMWLTGFDAPCCNTMYIDKPMSGHNLMQAIARVNRVFRNKSMDNGGLIVDYVGLTDELEKAMKQYTNACGKEKPVRNIETVLEKMLEYVSIIRGQFATPVDGQTVDIGKILQISEPAKLLNAILTSANHILALDRINPDDSKDKKGKTPRKNAFLQAVRFAKKGYALCGALKAVEPYKQELAFYDAVRATIIKTALPLAILRAKTACYSXTVLMNRAVQSDGVVDLFDLLKKERPNINLLSDEFLETVKNSPTKDLWIGAMERYLASELRTQSGANLATKKEFEQRLKEAMNQYHNHNLSVLEILEELITLAKEFDARQKRGEELGLSPAEMAFYDALARNESAVREMGDAVLLKLAREITEKLRKSVTIDWQYKDLVRAKMRTLIRITLRTYKYPPDLQNEAIEFVLKQAEEIAEDLVPK

SEQ ID NO: 63184 - protein, 85 aa, Moraxella catarrhalis
MAHKKAAGSTRNGRDSNPKMLGVKVFGGQDVVAGNIIVRQRGTEFHAGEGVGMGRDHTLFALTEGVVKFETKGQFNRRYVSVLAK

SEQ ID NO: 63185 - protein, 90 aa, Moraxella catarrhalis
MNKSELVDSIAQSAGLTKEQAAKAVNAFTESVQGALQRGDDVVLVGFGTFSVKERAARMGRNPKTGEAIQIAASKVPSFKAGKVLKESVN

SEQ ID NO: 63186 - protein, 71 aa, Moraxella catarrhalis
MPSSKVKENEPVDIAIRRFKRACEKAGVLADVRKKEFFEKPTQERKRQKAAAVKRYKKKVYREQVRHQRKY

SEQ ID NO: 63187 - protein, 691 aa, Moraxella catarrhalis
MNTQTSFFNDTSKNNPSKANDQIIAQMRALIKLLKRHNHAYYVMDAPTISDDEYDGLRRTLMMLEQQHPNLIQPDSPINTVGGEPLPFFTQVAHEVPMLSLGNVFNADDLSGFLRRANERLGIAIDEYEMELKLDGLAVSLKYQNGQFAQAVTRGDGQVGEDITHNVRTIRNLPLTLTGCEQIKQLEIRGEVLMPKAGFEKLNRESIAQGIKTFANPRNAAAGSLRQLNAAIAAARPLAFFGYSVNDGLPDGITTQSGAMQWLGQLGFEIASFKVAKSLDEIQAFYAHVIKTRSQLPFEIDGLVIKVNDLNLQARLGFLSREPRWATAYKFPAETVPTRLIDVEWQVGRTGTLTPVGRLEPITVGGVTVSNVTLHNFGEIERLGVMVGDVVNVHRAGDVIPKVSGVIGELRPTDAKPILLPTVCPVCQSPISLPEGEALARCTGGLYCAAQQQEALIHFVSRRAMDIDGLGSQWLIKFFEMGLVQTVADIYKLHKQAEYLITLEGMGDKSVTKMLSAIEKSKQTTLPRFIFALGIRGVGESTALSLAQQFGELQSIIEADLQALQAVPDIGEITAQSIYDFFRASHNIEVVQALIEAGVSWQAMDTPDKSSLPLTGETWVVTGTLGSMGRDEAKDKLIALGAKVAGSVSAKTTRLLAGEKAGSKLEKAQKLGVTVVLEDEFLALIALYNQV

SEQ ID NO: 63188 - protein, 313 aa, Moraxella catarrhalis
MSENEKGGWFSRMKAGLSKSSKNLSEGLVNVLVGGKQIDDELLEEVEDQLLVADIGVNATNRIIKNLTEQTARGDLIYSHALYKALKTELTDILTPKVAPLIIDTTKKPYVILMVGVNGVGKTTTIGKLAKRLQNEGKSVMLAAGDTFRAAATEQLQIWGERNGIAVIAQGHGSDSASVIFDAMQSAKAKGIDVLIADTAGRLQNKTHLMNELEKVVRVMKKGDETAPHETMIVLDAGTGQNAINQVQVFSEAVNLTGISVTKLDGTAKGGVVFNIAQNTDIPIRFIGVGEGIDDLQPFKPKDFVDALLEKEE

SEQ ID NO: 63189 - protein, 197 aa, Moraxella catarrhalis
MMAKAVSTNYHPPSFLPDLPTMHLTASHGKLILLDWQDIKTQKLLNQANQHAVFIKPSQLDINQPDQAILLQTTEQLNEYFDGTRRNFSIPLDFSYGTQFQQQVWAALLTIDYGQTISYAKLATLIDKPKAFRACANANGKNPLSLIVPCHRVVASDGGLGGYTGGVAIKKALLDFEMACHLSKNKTPTDFDYLCYN

SEQ ID NO: 63190 - protein, 419 aa, Moraxella catarrhalis
  MISC_FEATURE (230)..(230): X=any amino acid
RIVITGMGALTPIGNSLDTIWQNLTQGVSGISRLDGFEDKSVAIDGFRAQIAGLVKNFDAKDYLNPKEARRFDTFVHYAQVAAAMALYHAGLIDDIKGDSLPINVDGERFGVVMGSGIGGIQTIETSRDTLKSYGAKKVSPFIIPGAIINMPAGLIAIRHHLKGANLATTTACTTSTHAIGLGARLIAYGDCDAVLVGGSEKASTPLGLSGFGAMHALSTRNDEPTRASXPFDKDRDGFVLGDGAGALVLESLAHAKARGATILAELVGFGMSDDANHITSPSVGGEGAARAMAAALADAGIDACEVGYINAHGTSTPQGDVAESQAIERLFGQDILVSSTKSMTGHLLGAAGAIEAIFTILALQNQLLPPTINLDNQDEACRLDYIAHTARRVDGVEFALSNSFGFGGPNGSSLFRRW

SEQ ID NO: 63191 - protein, 685 aa, Moraxella catarrhalis
MAGDIISRYVTDRIQDNHQWYAKKQVLAAECTLRLPDFELYHIVQDALLFQLNQGHTILHINDHDDLNNRHGLNGMIPIWQQKIMDSCLTVITHALANEGMDWAAFFDAYHRCADDTIKIKQFVNHALNHFRQQVSLLDHTVMEIEQLSALFLSMLRIYYVLYKNANTLNQFVSLLHNNTFFGDILASNIQSIPTNTPPIYFSDQAGGLYLWTSRAYLAESQLMTHILRISQADVPIFALDQLPNSLNTEQRDAIKLVSKQAFCLITGGPGTGKTFTVAQIVIALNQRDEYKKMRLGLAAPTGKAAQRMSESLLKSLDKANDIQLPKPKTIHRLLGIGANGSPRYDAKNQLPLDMLIIDEASMLGTELASQLFAAIATGCRVILLGDTHQLAAVDAGAVLADLCRIERLRHLRVNLTASKRFTDTSGVGQLAKLINDDRQNIHFDEIQQLINCHTKIDFHPITHALMHNDTYQKLSQDYQDYFLASKRLRFSFAKLSSQDAIDSVKKLFKILDTYRILCASHLGTFGDDQINDYLSLAHRAVQKIPPSVSPWFHGRVVMITKNLYDLGLFNGDIGICLWGSSGLSVYFEGETLRMVAVDMLSDTVVSTAYAITVHKSQGSEWQKVAIIFDGNSERLLSKELIYTAVTRAKSAVHIYSTHDALINAINTPTVRQTGLDKVSDGQQS

SEQ ID NO: 63192 - protein, 341 aa, Moraxella catarrhalis
MMTDNKLQKSLKNQHILSQPLSIGGLKIENRIWVAPMAGVTDNPFRRLCKSFGAGHAVSEMIIADTALYARKKSLYRANFDGEIAPISAQIAGAEPDKLAQAAQFQVANGAQIVDINMGCPAKKVCRKLAGSALLQDEDLVRRLLDSAVLAVDVPVTLKTRLGFANGQENILKIAQIAEQAGVAAITIHGRTREDFYTGQARYELITQVKKAAKIPIIVNGDIDSPQKALDIQAKTGADAVMIGRAAQGKPWLFQQIAHFANTGELLASPTVGEIHEVVLRHLDELYRFYGEYSGCRIARKHIAWYTGGLPNSNAFRDAMYACETTKEQFEVVDKFFKTIS

SEQ ID NO: 63193 - protein, 545 aa, Moraxella catarrhalis
MAKDVSFGSNAREKMIDGVNILADAVKVTLGPKGRNVVIDKSFGAPTITKDGVSVAKEIELEDKFENMGAQLVREVASKTNDVAGDGTTTATVLAQAILVEGMKTVAAGMNPMDLKRGIDKAVRAAVEEIRAISTPANDHKAIAQVGSISANSDATIGELISKAMETVGKQGVITVEEGSGFEDALEVVEGMQFDRGYISPYFANKQDSLTCEFDNPFILLVDKKISNIREIVPLLEKVMQTSRPLLIIAEDVENEALATLVVNTLRGGLKTCAVKAPGFGDRRKAMLQDIAILTGGVVISEEVGLSLETAEIEHLGTAKKVTIGKENTVIVDGAGDKASIEARVESIRRQVEESTSDYDKEKLQERVAKLSGGVAVIKVGAATETEMKEKKDRVDDALHATRAAVEEGVVPGGGVALVRALSALSDLKGDNEDQNAGINILRRAMEAPLRQIVSNAGDEASVIVNEVKNGSGNYGYNAASGEYGDMLEMGILDPAKVTRSALEHAASVAGLMLTTEVMITDKPAPEAPMPAGGMGGMGGMGGMM

SEQ ID NO: 63194 - protein, 280 aa, Moraxella catarrhalis
MKQYLELLQHILNHGTDKQDRTGTGTRSVFGYQMRFNLAEGFPLLTTKKVHMKSIIHELLWFLKGETNTSYLTDNQVTIWNEWATAEQTARFGRAEGELGPIYGHQWRNFGASKKSDGSYHDDGFDQIAWLINEINTNPNSRRLIVSGWNPTEAAEVALPPCHTLFQFFVSQGKLSCQLYQRSADVFLGVPFNIASYALLTHVVAQVCHLDVGEFIWTGGDTHLYQNHFEQVKLQLSREPLPLCSLRLNPKVRSIFEFGFDDIQIADYQAHPAIKAPVAV

SEQ ID NO: 63195 - protein, 171 aa, Moraxella catarrhalis
MMENIQLVHVVAMSQNRAIGKDNQLLWHIPDDLQHFKRITHGGVIVMGRKTFESLPNLLPNRTHIVITRQPIGYEGAVTAHSLQDAILLAKAYAHAKQQNKIFIIGGGEIYHQSLEMADVLEITEVDTVIEGDTFYPDIDEKFIKTDETKTFYCDKSGFQFRFCTWQKVLT

SEQ ID NO: 63196 - protein, 181 aa, Moraxella catarrhalis
MSQFSDALIHIVLFSPKIPNNTGSIIRLCANTGAQLHLVKPLGFELDDTRLKRAGLDYHEYATLSVHDNWQETKSALKSLGVERIVAMTTKFSRPFYEYQFKLDNDQHKVALVFGSETDGLPEEVRADIGANHWLRLPMLPDSRSLNLANSVGICLYEVWRQLGFVGDIGQSVGYHKPTSR

SEQ ID NO: 63197 - protein, 489 aa, Moraxella catarrhalis
MKALLLIPTFDAPNFSSIVENFAKSIGAAYIAPFDGEGDSKLRVAVTEGRLDEMLEKVVAAQSAKLTVVKGLATLPNTPYASLVNRDLANGLDADVLFVSQNAEELAVFAAAFGGLKSERVLGVIAAGVDEFGVTVWATIDGEQLTVDEEVIKNYQAATRVKKLSPYAFRNQVVQKAQAAKKRIVLPEGDEPRTIEAAVICQSRGIAQCVLLGERTKIEAVAAERGVVLPNDIEIIDPASIAEKYVAPMVERRKGKIDEAGAKQALQDTVVLGTMMLHMGDVDGLVSGAVHTTADTIRPAFQLIKTAPQYSLVSSVFFMLLPEQVMVYGDCAVNPNPTAEQLAEIAIQSAKSAKAFGIDPKVAMISYSTIDSGSGVDVDTVKQAVQIIREKSPELKVDGPLQFDAATVKNVGKQKAPNSAVAGEANVLIFPDLNTGNTTYKAVQRTADVISVGPMLQGLNKPVNDLSRGALVDDIVYTIALTAIQAIDE

SEQ ID NO: 63198 - protein, 268 aa, Moraxella catarrhalis
MLKKLLKLKNTITDDVKAVLARDPAARSQMEVLLTYPGIHARIMHRGAHYLWNLDHKFMARALSHFSRCTTGIEIHPAAKIGKRFFIDHGMGVVIGETAEIGDDVTLYHGVTLGGVSWEKGAKRHPTLGNNVVVGAGAKILGGFRVGDDAKIGSNAVVVKAVPAGATMVGSAARMVVKHKQEQISTKHHAQSKELFNAYGLKPDSKDPVASSIAALLAHIQERDKQICELTAAVKKLDPNFNPQSIKSLCKDDLDVFDGEGLELDYHI

SEQ ID NO: 63199 - protein, 371 aa, Moraxella catarrhalis
MSIHNPIKRRPTKKIYVGNVAIGGDAPISVQSMTNTNTCDIDATVAQIQRCVDAGADLMRVSTPTMESVAAFAEIKKRVSIPLIADIHFDHKIAIAVADVGADCLRINPGNIGNDQKVKEVVAAARHHNVPIRIGVNAGSLEKDLQKKYREPTGEAMLESALRHIDILENLNFQNYKISVKASNVFLTLDAYRLISAQIDNPLHLGVTEAGVYRTGTVKSAIALGGLLLDGIGDTMRISLAAAPEEEIKIGFDILKSLGIRSNGVNFIACPSCSRQEFDVIKVMNELEARLEDIREPLDLSVIGCKVNGPGEAKEATIGVVGASPNSLVYKHGAKSHLIDTKKLVDEIEAMVRAQVKDIQDKRANEIIRIG

SEQ ID NO: 63200 - protein, 422 aa, Moraxella catarrhalis
MNKITAIRGFNDVLPEQTPAWRAMERTLIEVMDSYGYSQIRLPLVEETQLFARGVGEATDIVEKEMFGVVHGGNKGDEGSSFTLRPEGTAGCVRAIVEHNLTRGDTPKLWYLGPMFRYERPQKGRYRQFHQLGVEYFGAELPDADAELIAMTYHMWQKLGIGEHVTLQLNTLGETDERVAYKSALVEYLTTHQEALDDDSKRRLNTNPLRILDSKDENTQQILKNAPKLGEFLGEASLAHFEKVQNYLSALGISFEINDKLVRGLDYYNKTVFEWVTDKLGSQATVCGGGRYDGLVGIIKGNAEQSEPAVGFAMGLERLMLLIDAVNPYQVASWCDVFVIAHPDYYIDGLKYAESLRLRQDNLRVKMASATGLKSQMKKADKSGAAYTVIIAEDEVNANQITIKTMATGEQRRAPIDYQFIR

SEQ ID NO: 63201 - protein, 392 aa, Moraxella catarrhalis
MYQRFINTALVAALAVTMAGCGTKAIKPTERKPAKLVNIQTPVAVLTQVSSIRLDQGRSGFSRRNTNLRKDVIDLQIAPLADGMIAASRSGIVSGYMGESIAWQYNAEDVITGGVGIDDQGSVAVIGTRSGKLIALDARTGAARWVVELASSSLAPALISGDKVIVITNSGTIFGLDINSGATVWQYATQVPNTSVRGMAKPLALDARTVLIGGADGRIHALDTMTGAPVWTRRVGLAMGSGEIDQLRDIDGTPTVVDHYLYAASYSGQLAGFDMTTGRTMFVSELSSTKKLTTLADAVIGSSTDGDVVAFNRMTGEKLWENHDLKYRGLTNPVTIGTYIAVGDADGVVHILNHQGQIISRANTKGALTNLTVINNRLYAQSADGVVTVWQF

SEQ ID NO: 63202 - protein, 472 aa, Moraxella catarrhalis
MSIKPVVALIGRPNVGKSTLFNQLTKSRQALVADLAGLTRDRQYGDAHFENKSFIVVDTGGIGEMDDGSGNIDDYMATQSYTAIHEADIVVFVVDARAGLIGADSEIAHFLHTLGKPVFLVANKMDGVHEAAYAEFFALGFGEPYATAASHGRGVTNLLESLTADMPEDMPKDELDSKTLKLAIIGRPNVGKSTLVNRLLGEDRVVVFDMPGTTRDSIYIPFEREGRSYVLIDTAGVRRRGRIDEKVEKFSVVKTLQAIKDANVVVLVIDAKEGIVDQDLHMLGYALDAGRAIVVAINKWDGLSQDQKDFVKIEIDRRFNFVPWVKIHLISALYGNGVGKLYPSIHKAYEASMFKVSTNQLTRILEDAVASHPPPMVGGRRIKLRYAHLGGHNPPVIVIHGNQTSSLPKSYQRYLENVFRNVYKLEGTPLQVEFKQNANPYEGKKNPVVKNKAKLMREKKRIQRFKRAEKKR

SEQ ID NO: 63203 - protein, 239 aa, Moraxella catarrhalis
MNDCTIFTKPNAVLSSHAPIVGIDEVGRGALFGNMTVGAVILPNELSGRFDEIDLTNTKISLLNDSKKLSEKRREQLFDIITDLALDYAIVDVPSTIIDQINIYQATMLGMKIAIETIIIKNNLNEKNTTILIDGNQLPSMDGSLGEHFHQIYAMIKGDATHSSIACASILAKVHRDRLMIQHAKSYPEYLLDKHKGYLTAKHKAAILEYGILPEHRRSFSPIRELYNQGFINSNYWHS

SEQ ID NO: 63204 - protein, 426 aa, Moraxella catarrhalis
MTNTSSLTIGIVAGEVSGDALGGDFMQKMNALHPNIRWVGVGGRSMAAQGLSSVIDMGRLSVMGLAEVMMHLPDLLKAKKQIITAFKTHQIDLFIGIDAPDFNLRIGKILKPQGVFCVQYVSPSIWAWREGRIHHIKAATDLVLCLFPFELGVYQKYAHPAVCVGHPLLNKLHAHQDSPKVRLENFIHQYHNHHHSVTSLTKASHIICLMAGSRTSEIRAMLPLLLTSAQNIHQQIPTVQFVLPVVSAEHARLVHEILHTHHANLVNCVHILDDHNRSQKQNQPAISHACMTISDVVLLASGTATLECLLLERPMVVVYQVNPLTFMIAKRLVKIPYVSLPNILAKQYLGHPIVPELLQSDATAEKVSTKALGIIHHPNKQTKQLSNISAWLRSQSHQNSAKAVLDHYFMSTKKSYDTHHITKAYE

SEQ ID NO: 63205 - protein, 356 aa, Moraxella catarrhalis
FQPETNGQARIIVFGVGGGGGNAVEHMVRQNVLGITFVCANTDLQALNKLSAPNKIQIGADATRGLGAGANPEVGRNAAESNEDEIRAMLEGYNMAFITASMGGGTGTGAAPVVARIAKEMGILTVAVVTTPFSFEGKRRAAAARNGIDALTQHVDSIITIPNDKLTQAYRNLTMVDAFKKADDVLLHAVNGLTETIVNPGMINIDFEDVRTAMSAKGHAMMGIGRASGTNRASEAMEKAIRSPLLDDLNLRNAQGLIINIIGSGVSMDEVMSIVAIGEGMMDEDAHVFYGLVEDPDMEDEIHVTVVATGLTVNERAVPVKLSGNKQETLRTHTSALAEENQQASIPRQGVPKPIS

SEQ ID NO: 63206 - protein, 328 aa, Moraxella catarrhalis
MIEPKSCPYGGAFLMLMMPVDDELGIWIMKKIDLHMHSTCSDGTNTPTELIKKVALAGIQMAALTDHDTIKGLDEAKQTAKMVGVELIRGVEVSCTHTLSGGYGKHQEIDKIIHVVALNFSDTLKMNEALQSLQDSRHLRGRQMTQKLASLLMNHPDEEPVLFEHLWQKVLIKADGNARAVGRAHIGQVLYELGYVSSVQAAFDKYLADNKPAYVPIQTISMADAIALIHECGGLAVLAHPTRYKLSATRTQRLISDFAQYGGDGCELPNHEPLSCIEMVGRTIAKHGLAISLGSDFHGDTMPWRKLGSTAVKSDNQIGIWERFGEIY

SEQ ID NO: 63207 - protein, 337 aa, Moraxella catarrhalis
MYDVVAIGNALVDTEFTLSDAALDATGLARGNMTLVDTNGQNMLFAALNEQNLKPAKQAGGGSAANSMVAFAALGGRAYYHCRVGGDDMGDFYLGDLANLGVATDATYAVQADGTTGSCVVLVTPDAERTMQTHLGTSSEINTDNINFQTLKDAKWLYLEGYLAMSPSATDALSQLYEHARKTGAKVAVSFADPAVVKFAKEGLSAILNRGVDAIFCNAEEAALFADADADPVNTLLKYSDLVVITNSDKPTTIACRIDDRIIEHHIDSCVVSQVIDTNGAGDNYAGAMLYGLSQNLDLPNCGRLAAAVAAAVVGQFGPRLSIAEYQTIKKRTVSLT

SEQ ID NO: 63208 - protein, 406 aa, Moraxella catarrhalis
MSISVDTLIIGAGASGLFCAFNTAAYGKSVLIIDHANKAGKKILMSGGGRCNFVNKQVEPCHFISQNPHFVKSALSKYQPEDFIDLVNRHHIAHQEREHGQLFCKNSAKDILSMLLNECHMAGVDIHLKTTVQDIQVTDTHFLVTVKSQPDNRIKVIQAHALVIATGGLSIPTLGASGFGYQVATQFGHQIIPTRAGLVPFTFTDKVGEMIKSLAGLSLDVIAYNDKASFDLPILFTHRGLSGPAILQLSNHWQAGEQITINLVPTQDVYQYLLDAKRIHPKQLLRTALAALLPKKLISGFEPLFWQAYQNIELANLKDETMHHIGQQLNAWHLKPSGTEGYRVAEVTLGGVDTHDISGKTMESRRQPNLYFIGEVLDVAGQLGGYNFTWAWASGYACAQSIGVRW

SEQ ID NO: 63209 - protein, 219 aa, Moraxella catarrhalis
MSLNPQSRSIKTPSVFNLPNNLTIARIVMIPLFVAIAYWPPALGIGVPAIPDNAIARLGMMGYSDSMLRHLILTLLFILAAVTDWLDGYLARRMNITSAFGRFLDPVADKLMVAAALIVLVQWHPNIVMATSAIVIISREIAVSALREWMAELGARTSVAVSYVGKLKTTFQMIAITVFLLNWQSLEMIGYVLMVIAVILTLWSMMIYLKAAWPYLKQP

SEQ ID NO: 63210 - protein, 692 aa, Moraxella catarrhalis
MTTILFELGTEELPPKNLKTLRDALKNSVGTLLNDQNISFDDIHAFAAPRRLALTITGVGEFQPDRIETKKGPSVKAAFDDAGNLTRAGQGFLQGLNATGRNLSVKDLGRIADKKGEYIAYDLTIKGEKITDLMPNILQKALDDLPIAKRMRSGIDRHEFIRPVHWVVLMSDDVVIEATIQGHKTGNQSRGHRYHSPDFFAIDHADHYENLLKNHHVIADFDQRQADILAQVKTLADDVNGTAIMPQELLDEVTALVDLPVALRASFPERFLAVPQEALISTMQADQKYFCLTDQAGKLMPHFIFISNINSKDSAQIITGNEKVVRPRLSDAEFFFLQDQKQPLFELNHHLKTQIFQDKLGTLWEKSERIANLAAHIADQIGANTDAAYRAGLLSKCDLASRLVGEFPELQGIAGTYYARLNHEPDVVADAIEEQYLPKFSGDKLPATHVGVALALADRLDTLVGIFGIGEIPSGSKDPFSLRRASIGILRILIEKRLRVSLSHLVKQALMGYGDILENIDQTLTEVMEFINARYRAMYSEQGVLVDTIQAVQAVQTDVPMDFDERIQAVTAFRLLPQAAILAENNKRVANILAKAGTVQGDVTPQNLIEPAEQALYQAIESAKVSVQPLHNHGDYQGILTTLVSLSEPLTQFFDHVMVNADDETLKQNRLALLSQVRKLFLSVADIGLLQS

SEQ ID NO: 63211 - protein, 420 aa, Moraxella catarrhalis
MFKEISLHQYDPELATQIDAETKRQEDHIELIASENYCSPAVMQAQGSTLTNKYAEGYPKKRYYGGCEHVDAIEQIAIDRAKELFGADYVNVQPHSGSSANSAVFLALLEPNDTVLGMSLAHGGHLTHGASVNFSGRNYHAVQYGLDTETGLIDYEEVARLAREHKPKMIIAGFSAYSQIIDWQKFRDIADEVGAYLMADMAHVAGLVATGIYPSPVQIADVTTTTTHKTLRGPRSGLILAKANEEIEKKLASAVFPGSQGGPLMHAIAAKAVCFKEAMSDDFQSYQKQVIINAKAMAEVIQSRGYEIVSGGTKNHLMLISLIKQGITGKEADKWLGDAHITVNKNSVPNDPKSPFVTSGIRIGTPAVTTRGFGEAEVRELAGWICDVLDARGDEAVLAATREKIAQICNKLPVYERNVA

SEQ ID NO: 63212 - protein, 532 aa, Moraxella catarrhalis
MTYQSALEHVRSVKAKLGNHWNAIRPEDAARMVVQNRFKTGLDIAKYTASIMRRDMAEYDADNSKYTQSLGCWHGFIAQQKMIANKKYFGTTSKRYIYLSGWMVAALRSEFGPLPDQSMHEKTAVPKLIEEIYTFLRQADAKELNDLFRALQQAEQAGDEAKVKEIEAKIDNFETHVVPIIADIDAGFGNEEATYLLTKQMIEAGACAIQIENQVSDAKQCGHQAGKVTVPHEDFLAKINAVRYAFLELGVDEGVIVARTDSEGADLTQKIPVSREAGDLASKYISYLQTTEIDISEAKEDEILIKRNGKLHRPTRLPSGLYQFREGTQHERVVLDCITSLQNGADMIWIETPTPDVAGIARFVNDIKKQVPDAKLVYNNSPSFNWTINFRQQAYDRWADEGRDLSGYDRDKLMDAQYDDSELAYDADEKIRTFQADAAREAGVFHHLITLPTYHTAALSTHELAKGYFGDEGMLAYVAGVQRKEIRDGVACVKHQAMAGSDIGDDHKEIFSGENALKAGDASKNTMNQFGG

SEQ ID NO: 63213 - protein, 589 aa, Moraxella catarrhalis
MVRQDSQKTLTLSPRLTEPLNQALRDQLDSSTLARVLQARGVHDISQIDTHICQLLAAADLMGIDTAVTLIDTAIDQGERILIVGDFDCDGATSTALMVRVLRQMGALVDFLVPDRFKFGYGLTPQIVEHGAALYRPNLIITVDNGISSHDGVATAHQMGIKVVITDHHLTTKPSPPADAVVNPNQLGCHFGSRYLVGVGVAFYVMGRLAKHRRQLGKSSASVAKYLDLVALGTVADLGVLDKNNRILVTHGLQLIRQGRCVVGILAILEQAGRQHQTITSDDFGFAIAPRINAAGRMDNMRIGVECLLTDDWGEAHRLASKLNQLNQARRHVEMSMKDDAIAIVQSLSEFDETPPKGIVLYQDDWHQGVIGIVAGRLKEKLYRPSIVFAPADTALVGKSDDIKGSARSIAGIHIRDVIESVALAHPDLIKHFGGHAMAAGLTIQKADFERFNQALQAVLLDFDDDVFYEQKFTDGALLPDEFSLSFVDRLKNISVWGNGFVPPVFDGKFEVINHRILKDKHLKLSLKMAGVQYPIDAIWFNYQADSWDYRAFGVHILYTLDINEWQGSQSLQLVIKDLAVMSVAALSV

SEQ ID NO: 63214 - protein, 139 aa, Moraxella catarrhalis
MMNAATFTPYQPTEGEDYMSDAQLAHFRTILKNWREELITEAERTKTYIHEETNTMPDINDRATQEEEFALALRTRDRERKLIRKIDKSLADIETLDYGYCETCGTEIGLRRLEARPTATQCIDCKTLSEIKERQNHGQ

SEQ ID NO: 63215 - protein, 376 aa, Moraxella catarrhalis
MSYSIFCQTKNNVLLEPMFFGQPVNVSRYDQQKHPIFEQLIEKQLSFFWRPEEIDVSKDRIDFAELSTHEQHIFLSNLKYQTLLDSIQGRSPNVVLLPLVSIPELETWIETWSFSETIHSRSYTHIIRNVVNDPSKIFEDIVDNEYILERASDIAKYYDDLHLCAKLYDLHGEGVYQIDGQSVEVTLPKLKKQLYLCIVAVNVLEAIRFYVSFACSFAFAERKVMEGNAKIIKMIARDEALHLNGTQHMINLMRQGRDDPDMVAIAEACQEEAIEIFKSAAEQEKAWANYLFKDGSMIGLNRDILCQYIEFITNTRMSAIGLPAIFETKTNPIPWINAWLSSDNVQVAPQETEITTYLVGQIDSDLDDVDLDDFEL

SEQ ID NO: 63216 - protein, 198 aa, Moraxella catarrhalis
MRIRKLFKFENAHIVRNCSSDRCKRSIHGHSYEVELILEAHRLDHGQMVYDFGLLKHHIKDIIDSFDHAITFWDQDDTRYIQACKDFSARWISLPVSPSAEQFSRVIFFWADAILNQTVMQNGEQDISVYSVIVHETATGYAQCFKQDVENEQMGVLSLADFEFSEQVKSEWSDPQMYDKLLKGDAFVNPKVDLQVQV

SEQ ID NO: 63217 - protein, 331 aa, Moraxella catarrhalis
MSDNTKTHSNEDTISAFFENRSTPKNESFRAGFVAIVGRPNVGKSTLMNHMLGQKLSITSRKPQTTRHRIHGILTDEDRQIVFVDTPGIHSKEVRAINERMNKAAISALADVDVVLFVVDGIQWREDDLLTLEKLSATNLPVILVINKADTVKDKSKLLPVIESFSESFDFADIIPVSALRRHNLDRLQSVIGEYLPIRPAIFDAEQITDRSERFLASEIIREKIMRISGDEVPYDLTVQIDTFKDEPAHKDPETGKWRKAVTFIDATIFVERAGQKSIIIGDKGAKIKQVGIDARKDMEVLFDRKIMLTLWVKVKRGWSDDERALNSLGY

SEQ ID NO: 63218 - protein, 462 aa, Moraxella catarrhalis
MSDTLSNSAKPNMDSNGNPTDGRGAWKQFLCRACGWIYDEKLGDPDGGLPAGTRFEDIPEDWECPLCGVTKRDFEPFVSRDEVVTPLIGHHSKTGVIVIGGGTAGWTAIEALRKLNENLPITLITSDLGDRYMKPQLSIAISQNKTPETLITKKAVDLAQALNVTLVAQTFVLSIDTNERIVRTTRGNFSYQKLILATGATPMLPPSLPAEYVWRVNHIDMFAKLQAKLIAKPNQHITIIGAGMIGTEIAEDIAKAGHQVTLINRDNLPMAEILPTIGGERLRDALTGIGIDYIGNAHITDIKPQDGGYVIIYNDKTLYADEIIASTGLILDNRLAKGAGIDYIRCGIVVNPKTLQTSHPAIYAIGDCIAIDDKPCRFVAPLREQAAAIAHHISDMAHAGYQHKSPLIRLKTKSIIISATGEIEQAKDWQVQENTDDKLILTQSSDGVITAKIEMKTSPQAN

SEQ ID NO: 63219 - protein, 91 aa, Moraxella catarrhalis
MQKVTIYTTPTCPYCLAAKQLLNNKSVAYDEISMYDINAEDREALSAKTNGYRTVPQIFIGDNFIGGFDQLNKLNADGKLDELLAQSFSHF

SEQ ID NO: 63220 - protein, 161 aa, Moraxella catarrhalis
MIKIGQGIDVHSFTQGDFVMLGGVRIPHSHGIKAHSDGDVLLHALSDALLGALALGDIGQHFPDADDAYQGADSKVLLKHVYALVQAKSYTLGNADMTVICELPKLSPHNLAMRECIAGVLGVSVDCVSIKATTNEKMGWIGRGEGIWASATVLLIKNHAY

SEQ ID NO: 63221 - protein, 623 aa, Moraxella catarrhalis
MQSLGINMATNQDNTINNIPTLNFDAVIVGGGGSGMRASLQLVNGGMKVAVITKVFPTRSHTVAAQGGIGASLGNMSPDNWHFHFYDTVKGSDWLGDQDAIEYMCREAPKVVYELEHMGMPFDRNADGTIYQRPFGGHSSNYGEKPVPRACAAADRTGHALLHTLYQKNLEKGTQFFVEWIALDLIKDDEGNINGVIALDQETGNISVFQANTTVLATGGAGRIFKASTNAYINTGDGLGMAVRAGIPLQDMEFWQFHPTGVAGAGVLLTEGCRGEGAILRNKHGEAFMERYAPTLKDLAPRDFVSRSMDQEIKEGRGCGPNGDYIVMDMTHLGAATLMKRLPSVFEISKNFGNVDITKEPVPVVPTIHYMMGGIPTNIHGQVTVPNLEGPVDEQGLYTEGRIVKGLYAIGECACVSVHGANRLGTNSLLDLVVFGRAAGQHIIDEFNQTGRNYKPLNPRVLDFTQSRLDKLQNSTEGYNAQEVADEIRNTMQSHAGVFRTQALMDEGVQKIMALAPKVEQIHLADKSAVFNTARIEALEVANLYEVAKATMISASLRHECRGAHMVVDYEHPADYEPAPLGRNDSEWMKHTLWYSEGNKVVYKPVRKQPLTVDYCVPRVRTF

SEQ ID NO: 63222 - protein, 236 aa, Moraxella catarrhalis
MSRGTRIVEIYRYDPDKDNAPYMQSYTVELLDSDRMLLDVLLRLKREDETLTFRRSCREGICGSDGMNINGKNGLACLINMNTLPNKITIRPLPGLPVIKDLVVDMNQFYEQYEKVHPYLINNQPAPPKERLQSPEEREKMNGLYECILCACCSTACPSFWWNPDKFLGPSALLNGYRFIIDSRDTDTQARLARLDDPFSLFRCRGIMNCVSVCPKGLNPTKAIGHIRNMLLDQAG

SEQ ID NO: 63223 - protein, 951 aa, Moraxella catarrhalis
MTNSSKDTVAFANTELAADSAAYVEALYEQYMADSQSVSKEWQDYFATYRQDDDAPHNAIKEQFLLLARNQSGLTAKSSDSSVEHHPKQMAVQALISAYRRRGHRKANLDPLGLHPRPEVEDLTLAFHGLAESDLDTTFPTNDLAIGKSEAKLREIIEILERVYCQSIGYEYMHVFQAAEKRWIENYIESNHGHIKFDKDKKLEILERLTAAEGLEKYLARKYTGVKRFGLEGGESFIPAVHEMVQRTGAHGSKEVVIGMAHRGRLNLLVNILGKKPSDLFDEFDGKVQPVNGSGDVKYHNGFSSNVMTPGGEMHLALAFNPSHLEIVSPVLQGSVRARQARRSEKYGLQIDNSTVLPLVVHGDAALAGQGVNQETFQMSQTRAYKTGGTVHIVINNQVGFTTSRIEDARSTEYCTDVAKMVHAPILHVNGDDPEAVVFASQLAVDYRREFGKDVMLDIFCYRRNGHNESDEPSATQPLMYAVIKKLPTTRAQYVEQLVQEGIITHEQGAKLEDDYRELLDRGEFVAGGLVSEPNTELFVDWKPYLGHDLQDDWETGVDIEKLKSYGRAMAKIPEGFTLQRQVAKVVEQRLAMQTGEEPLNWGAAETLAYASLAAEGSLVRITGEDVGRGTFSHRHSELYNMNDGSMYIPLQHITKDQARFATYNSLLSEEAVLAFEYGYATTVPNALIIWEAQFGDFVNGAQVVIDQFISSGETKWQRVCGLTMLLPHGFEGQGPEHSSARLERFLQLCAEDNMQVITPTTPAQIFHALRRQVVRPIRKPLIVMSPKSLLRHPLATSNLEELASGKFETVLPEIDSINHEQVTRLVLCGGKVYYDLLDQRRKLGQEHIAIVRIEQLYPLPEERILAEIDKYPNLEEIMWAQEEPLNQGAWYYLAPELFRMVVPAPTKAKIITPSARPAAAAPATGSPKLHTEQQKALIAGALGVTVEALK

SEQ ID NO: 63224 - protein, 482 aa, Moraxella catarrhalis
MKNSYDLVVIGGGPGGYEAAIRGAQLGFSVACIEKRVHKGEPALGGTCLNVGCIPSKALLDSSHRFEATKHELTDHGITTGDVNIDIAKMLERKDSIVKGLTQGVAGLLKGNGVDWLQGWGTLVDGKGAEKQVKFTPLEGDESIITAKYVILAAGSVPIEIPVAKTDGEYIVDSTGALEFAEVPKRLGVIGAGVIGLELGSVWRRLGAEVVIYEAMPEFLAVADKDISKEAAKLLKKQGLDIRVDTKVTGAEVKDGQVIVTTDVKGETQTDTFDKLIVCVGRRAYSEKLLAENCGIELTERGLVAVDDQCKTNLDGVYAIGDLVRGPMLAHKAMEEGMMAVERIHGEKAQVNYDTIISVIYTHPEIAWVGLSEQAATEQGYEVKTGSFSLSANGRALAQGEGVGLIKVVADAKTDRLLGMHAVSVGAGDIVHQGMIAMEFVSSIEDLQLMTFAHPTVSEAVHEAALSADGRAIHAIQRKKRK

SEQ ID NO: 63225 - protein, 203 aa, Moraxella catarrhalis
MQKWVLASNNQGKLAEFQALFDDADLGVHIITQGSLGIGDVSEDGKSFIENAIIKARHAAKVSGLPAVADDSGLCVPILGNAPGIFSARYAGRHGDDAANNAKLLEQLKPYRSRAPIDAFFVCVLAYVRHGDDPMPLIAIGKWHGEILNEPVGEHGFGYDPLFYIPKLKKSSAQLDRAAKNAISHRASALQDLLRQLKETWLV

SEQ ID NO: 63226 - protein, 438 aa, Moraxella catarrhalis
MTTKEIPSCSFCGKKKTEVQKLIAGNDANICNECIAVCGDLLGDWSKPTKSSGKSSDRSADTSHQSDVQLSIETDSDKDEWLNKVLPKPKELRAHLDDYVIGQDVAKKALAVAVYNHYKRLKVANDKKDTDGVELSKSNILLIGPTGSGKTLLAQTLAKMLDVPFAMADATTLTEAGYVGEDVENIVQKLLQAADYDVQKAEKGIIYIDEIDKISRKSENPSITRDVSGEGVQQALLKLIEGTVANIPPQGGRKHPRQEMIQVDTSNILMIVGGAFAGLDKVIRQRTEKTGIGFHADVKAQDESSITELFREVEAEDLIKFGLIPELIGRLPVIASLEELDEAALVQILTEPKNALVKQYQYLFDMEGVQLTFEPEALTAIAKRAQERKTGARGLRSIIENALMDTMYELPSMTDIAEVIVTKGVIESGKPPVTKPKS

SEQ ID NO: 63227 - protein, 222 aa, Moraxella catarrhalis
MFTGIIETTGRLKSINQIGGDVQLVIHAPDMDFNDVHLGDSIASNGICLTVVDIGDKTYAVDVSRETLSKTALKNWRTGDTVNLEKAMRPTMRFGGHIVAGHVDGVGVIRHISKDARSIYIEIEIPSELMRYAADKGSITVDGISLTTNAIKPEQNIVCLNIIPHTAKCTNIDRHWSVGGLVNIEVDLISRYLERLLFASNQVQKPTSSISEELLNQAGFYL

SEQ ID NO: 63228 - protein, 412 aa, Moraxella catarrhalis
MKPLAERMRPTTLDAVIGQTHLLSEGAPIFNIVRQGFLPSLILHGSAGIGKTTLAMLLADAVGRPFRPLSAVSSGVKELREVLRSDDGLFHEPPVVFVDEIHRFNKAQQDALLQAVETGEITLIGATTENPSFSVNNALLSRCQVYKLEPLSDDEIYALIVRAIRQDTLLKTKDIQINDLAALIDLSQGDGRRALNLLELVAAAPEPIIIDNASVAAVAGQPLVRYDKSGDGHYDLISAMIKSVRGSDADAAIYWMARILAAGEDPAFVARRLVILASEDIGLANPNALLLADAGLRSVQSIGMPEARIILGQVIIYLANSPKSNSSYNAINRALKLAETDQSPVPLHLRNGVTKLMQAEGYGMGYIYPHDYPNHYHPQQYLPDALIGTRFYEFADNQKEQANFAFINCLKT

SEQ ID NO: 63229 - protein, 213 aa, Moraxella catarrhalis
MPFYPSTHEYTMHQINPELLTKSKQWRHDIQFSQEVLGKPFNFTSTWGIFSPEKLDDGSLMLLDYIDFQTQDNSIDLGCGYGVLGMTAARECPKGHHLLIDKDFVAIEYAKLNCKNNGLGNAEVMLSNGFYHVDKSRQFSLVMSNLPAKASKEQHYLYLLDAYNAMTSGGRFYVVTINGLRDFMKRSFTEVFGNADKIKQGKTYTVTMAIKES

SEQ ID NO: 63230 - protein, 1251 aa, Moraxella catarrhalis
MSHLLDQLRFFKRKQGEFANSHGETRHENREWENSYRARWSYDKVVRSTHGVNCTGSCSWKIYVKNGLVTWETQQTDYPRTRPDLPNHEPRGCPRGASYSWYMYSANRLKYPKVRKPLLKLWREAKAKHTDPVLAWASIVENPTKSAEYKSKRGLGGFVRSSWQECAEIIAAANVYTAKTFGPDRIIGFSPIPAMSMLSYASGSRYLSLIGGACLSFYDWYCDLPPASPMVWGEQTDVAESADWYNSDYIIAWGSNVPQTRTPDAHFFTEVRYKGTKTVAITPDYAEIAKLCDLWLNPKQGTDAALAQAFCHVIIKEFYLKSQSDYFQDYAKRYTDLPMLVVLEEKDDKFKAGRFLRASDLIDNLGQENNPEWKTIAMNQNGELVSPYGSIGYRWGETGRWNLENKEGQHNGDVDLTLSLKGSGETASVGLDYFGGDEHPYFTAAAGDAIQYKNIPCHTISLANGQTAKVATVFDLMVANLGVDNGHGGQNVTDDYNDANIAGTPAWQEKITGVSREKVIQIAREFAENAHKTQGKSMVIIGAGMNHWYHLDMNYRGVINMLMLCGCIGKSGGGWAHYVGQEKLRPQSGWAPVAFGLDWHRPPRHMNSTSFFYNHSSQWRHETVSAHELLSSHANKSQFPEHMLDYNIKAERAGWLPSAPQLNQNPLTIAPQAKAKGMSVQDYVVESLHNGSLRFAAEQPDNPQNFPRNMFIWRSNLLGSSGKGHEYMLKYLLGTKNGLLGDETVQTGFKPNEIDFVENAPTGKIDLVTTLDFRMSSTCLYSDIVLPTATWYEKEDINTSDMHPFIHPFTAATDPAWEAKTDWEIYKYIAKAFSRLCVGHLGTQTDVVTLPMQHDSADELAQPFGGTDWKSAGEKPIPGINCPLIKVVERDYPSTYAKFTSLGPLMDKLGNNSKGIDWDTKEEVQQLGQLNYRIHDDSVANTRPNMSSVVNAIETVLMLAPETNGHVAVKAWAELSKKTGRDHTHLAKASEHEKIRFNDIVAQPRKIISSPTWSGLESDKVSYNAGYTNVHELIPWRTITGRQQFYVEHPWIQAFGEQMQQYRPPIDTKTTQAFKKYQSNGNKEIVLNFLTPHQKWGIHSTYSENLLMLTLSRGGPIVWISEIDAQKAGIEDNDWIEVFNANGAITARAVVSQRVKEGMTMMYHAQEKLVNIPGSENSGTRGGIHNSVTRTILKPTHMIGGYAQFSYGFNYYGTVGCNRDEFVVVRKMANIDWLEGRADDELPRPLPTTLD

SEQ ID NO: 63231 - protein, 512 aa, Moraxella catarrhalis
MKIRSQVGMVLNLDKCIGCHTCSVTCKNVWTSREGMEYAWFNNVESKPGIGYPKEWENQGKWKGGWIRNADGSINPKIGGKFRVLANIFANPDLPMIDDYYEPFDFDYQHLHTAPIGEHQPIARPRSLITGKRIQKIEWGPNWEEILGSEFAKRRRDKNFDDIQADIYGQYENTFMMYLPRLCEHCLNPTCVASCPSGAIYKREEDGIVLIDQDKCRGWRMCISGCPYKKIYYNWKSGKSEKCIFCYPRIEAGMPTICSETCVGRIRYLGVLLYDADKIHEVASLSNEQDLYQAQLDIFLDPHDPKVIKQALQDGVPMSVIESAQKSPVYKLAVDWKLALPLHPEYRTLPMVWYVPPLSPIQNAAEAGQVGMDGLIPDVDSLRIPLKYLANMLTAGDEEPVRLALKRLLAMRSYKRLQLVEKQDAQEVLDAVGLSVAQVEDMYRYLAIANYEDRFVIPTAHREEALSDAFAERNGCGFTFGNGCTGGNDTHMFGQKKNNKRDFIKTVQTWEL

SEQ ID NO: 63232 - protein, 234 aa, Moraxella catarrhalis
MNTTNPEDWLHVFLFGIYPYIALTVCIFGCWARFDLSQYTWRAGSSQMLSDKGMRLASNLFHIGIIVVLLGHFFGMFTPHFIYERIITAPQKQLMAVIVGGIAGIMCLIGLIMLIWRRFTNPRISHTSTFSDKMLLLIILLQLVMGLATIWSYPTHRDGALMLSLAGWAQNLAILRPVYAASLVEDAGLVYKMHMFLGTTLILLVPFTRLIHIISAPIWYLGRRYQIVRQKRSQ

SEQ ID NO: 63233 - protein, 425 aa, Moraxella catarrhalis
MISVDELQKSIISRVDEYLNIDNPLVSRQRVVLALNDALNHILAVDINANLDIPRQNVSAMDGFALVAQSQLQQGDGFTVIGESCAGTPFSGEILPNQAVRIFTGAVVPEGCDTVVMQEHTTFDQINITDKSQPYYIVLTKPAKASANIRYQGEEIAQGDTLLSAGKRLNPSDISLLSSMGYDEIEVFSPLRIGLIATGDELVSIGQPLSDLAQIYNSNTPTLKALLRKLPIIIKDYGIVKDVFDETYEVVKRAIEECDIIISSAGVSVGDYDFLTEVVRSLGKINHYKVAMKPGKPFVFGEFAADARKVLYFGLPGNPLSTVVGCINFVRPALWQALGAIDAPLTLHLPAITTANIKKSVGRREYQRGYFEMGEKKLQVTPSSAQDSHRIKQLSQANCLIVLDENSVGANKGEQVIIQLFDWVV

SEQ ID NO: 63234 - protein, 189 aa, Moraxella catarrhalis
MCNLCNDPNHQPQAKKSDKPFTPLNIAVLTVSDTRILDEDTSGKFLVDSLVEAGHVLVDRKLTKDDIYQIRAVISAWIADERIHAIITTGGTGFYHRDNMPEAVGVLFDKEVQGFGEMFRYLSHGEIGMSTLQSRAVAGMANNTVIFCLPGSTGACRTGWEGIIKQQLDNRTRPCNFVPHLMRQNPSHG

SEQ ID NO: 63235 - protein, 861 aa, Moraxella catarrhalis
  MISC_FEATURE (420)..(420): X=any amino acid
STVAFTICFMTWIMFAVLGIPIQQALDLNETQFGLLAATPVLTGSLVRLPLGIMTDKYGGRIVFFVLMLATVLPIFLMGYADQYWQFLLLGLFVGLSGGSFSVGIAYVAKWFEADKQGFAMGVFGAGNAGSAITKMIGPAIIAVGASTAASAAEGWRFLPKVYAGIMLITAIGFWFFSYDNKTHRTASNATLASQLAVLKDKNVWRYSQYYSIVFGGYVALALWMTKYYVGEYGFSLQTAAFLAACFSLPGGVLRALGGWLSDKYSAHTVTWWVLWSSFLLLFALSYPQTFLTIQTVDGEKSFYIGLNAIVFTVLIFLLGIAFAIGKASVFKYLSDEYKDNMGAVSGVVGLAGGLGGFILPIMFGAAVDITGIRSSAFMIMFGVVWVSLIWIYLSEVKAKNRTRPSIKNPKIIANILETXMNNQLKGGRRIDDWRPEDEKFWQNGGSRVATRNLFISIPALLLAFSVWVIWSVIVVRMPEVGFQFDKAQLSWLLALPALSGATMRLFYAFLVPVFGGRRWTTLSTASLLIPTIWLGLAIQNPETSFTTFAIIALLCGFGGANFSSSMSNISFFYPKSKQGMALGLNAGLGNLGVSVLQFVVPVIIGFSLFGALAGDGQVTESGKVLYLQNAAFVWVIPIAIMTVLAWFGMNDLSNAKASFKEQSIIFRRQHNWIMCILYLATFGSFIGFSAAFPMVIKQSFPEIDPLKVAFLGPLVGALFRPVGGWLSDKVGGACVTFWNYIIMTIAVIAVMFFLKNGNFTGYFAGFMLLFITTGIGNGSTFRMIPVIFRTMHERLHSPDAITQARKESAAVVGFSAGFAAYGGFFIPKMFGSGLGVNGTFLVLIAFYIICIALTWWYYSR

SEQ ID NO: 63236 - protein, 358 aa, Moraxella catarrhalis
MKKLALATAEAALSEYAVQATPTVYGKAFLTIDANNTDTTYNSGLVQLSEDTNESGLNSNTSRIGFKGSEALNANTDVVYQLEYKIDIDADRGDNFKSRDTYLGLAHKQYGTLLAGRLTTIDDSVDFASMLEGNNVADIGPTFNAPRANNAFAYVSPEYNGTQFLAMYAFDSDTDKGGLAKDDQFGVGATYSTGPINAGATYIHYGDDSHIRLSGNYAVSPALTVGALYQISEFGVAAKNQKASPLSEGKVGDKKENTLIVSGEMKTATPWTAYGQATLIKNVAGNDGDESVGVGIGGKYAFNKATTGHVYTGYVNSERKNVKYEGSNETHKNAHKDTKFDGYKPSGFGIGAGLEYKF

SEQ ID NO: 63237 - protein, 221 aa, Moraxella catarrhalis
MEAYLKQTPAVHRLIVSESATVHDEVLPLLSQIDPKQITIISDTLYQQIRTLGESISVMAVIDIPHRSLPTISGDCLILDGLQDLGNIGTLLRTASAVGIQTVITSPNTAHLWSPKCLRAGMGAHFSISIYEHIAVNEILQKLKTPLYATSSHTNKVIYDHDLTSPIAWVLGHEGQGVRDEFLNNAIPIALPQPGGQESLNVGIAGSVCFYEMLRQRHYLV

SEQ ID NO: 63238 - protein, 351 aa, Moraxella catarrhalis
MLRVLADENIANLDDYLLCHQVELIKMAGRAIDRQSLITHQPDALFIRSVTQVTQENLGDLSNTPLKFIGSATIGIDHIDTKYLADHHINFANASGCSKHSVAQYVITAILHAHQSPKTNLRLGIIGLGNIGNTLARYAKRLGWQVFGFDPFLATDSINNASLDEILDCDVISIHTPLTKTGSHPTYQMLNAQTLAKIRPKALLINSARGEIIDESALLAAINQKQLSVVLDVFPNEPFISQQLLYALKLATPHIAGYTLEGKIRGTDMIYQAFCQTFNLPILQHFLALLPPNPYHFSMLLNHQNQQPLAWFYDIQADFEALKAAACPHILGSQFDILRKNYHLRREWIFD

SEQ ID NO: 63239 - protein, 390 aa, Moraxella catarrhalis
MIEQWNREFVLQRLLALTLLVILIVLCFKVVRFFIVPALWAGILAYVTFPIYTFFHTKVRLSPSFSAFLMTFCISLMIGVPLIVGVFYLQHEVLSFVGMVIRRLQAGYLDLPSQIKDLPVIGQTIKDTLWEINKNPETTMEAVRAWVQSHLYYGKMAFDAVLKNLAKLGMALMTLFFFYRDGKSLVRQIRQAMRNIIGDRIDDYIDSVGATTQAVVYGIGLTALAQAILAGMGYAFTNAPNPILLTLITFVVALIPFGTPFAWGGVAVWLLSQGHTTEGIGLGLWGILVISWVDNLIRPIVISGATKIPFIIIFIGVLGGLTAFGFVGLFIGPVVLAIGLAVWREWISQHKNEIFINQASGFVVADGKALLADTNPTPSNKQQPNLTKDD

SEQ ID NO: 63240 - protein, 324 aa, Moraxella catarrhalis
MMASEYAPTLTLMNAKKRAQMLQHIRAFFEARNIMEVTTPILSQAANTDVYIQSVQATFQGATGQAKGYLHTSPEFAMKRLLAAYQTPIYQICQVFRDNEKGHRHNIEFTMLEWYRPNFSLDALADELSELLSVVYQKPIHLSQISYAQAFVHYLGIHPFDDMSTPDILRQCAVAHNIHLDMGDDKQGWLDLLFSHLIEPKLGLQNPTLVINYPKLTAALAKTAVDADGYEIARRFELYIHGVEIANAYDELANSQELLKRFEQDNHERRRQGLPIMPIDHRLLAACDHLPDCCGIALGIDRLFMVLQGQLNINQAIAITTDNA

SEQ ID NO: 63241 - protein, 90 aa, Moraxella catarrhalis
MSDNTQTQEVGVVTGKVISNKMDKSIVVLVERQIRHPMYGKQVRRSTKIKAHDENNICQEGDIVRIKETRPFSKTKTWALVDVVETAVKI

SEQ ID NO: 63242 - protein, 216 aa, Moraxella catarrhalis
MSRKIVLVTGASRGIGKAIAKRFTDEGHFVIGTATSKKGAEAIGDYLSESGGIGRILDVCNHEDIDKLFEEIDSVYGGINVLVNNAGITKDGLLMRMKDEDWASVIDTNLTAVYRMSRRAVRGMMKARQGRIINITSVVGQMGNAGQANYAATKAGVEGFSRALAREIGSRGVTVNCVAPGFVETDMTEALDERLVNSMLDAVPRGIHYVLRAPAT

SEQ ID NO: 63243 - protein, 572 aa, Moraxella catarrhalis
MKASQFIFATLKETPNDADIASSQLMLRAGLIRKLASGLYVWMPMGLRVLKRVERIVREEMEKIDSQELLMPVTQPGELWHESGRWEDYGAELLRFKDRHSRDFVLGPTHEEVITDIARNELKSYKQLPITFYQIQTKFRDEIRPRFGVMRAREFTMKDAYSFHIDKESLANTYQDMYDAYNRIFTRLGLNFRAVQADTGSIGGFASHEFHVLADSGEDDIAFSSDSDFAANIELAEAVCYDKRAAPTQARTDVDTPNMTTCEAVAEHLNIPLSQTVKTLIVKGRHSQDNPEAPKFIALVLRGDHTLNEIKAEKIADAHTPLTMATEDELKEIGLIKGYISTDLQLPVYVDRAAAALSDFVSGANIEHKHTTGMNWDRDATITQIVDIRNVVDGDPSPDGKGIISIKRGIEVGHIFQLGDKYSKALNCSVLGKEGKPVTLMMGCYGIGVSRIIAAAIEQNHDDNGIIWAEPEDKADSIAPFYVAIVPMKSKDGDAEAKAQSLYQTLKARGINVLLDDRDERAGVKFADLELIGIPHRIVVSQRNLAENKYEYTNRATGDQQMLSLDELLALF

SEQ ID NO: 63244 - protein, 709 aa, Moraxella catarrhalis
MNFLIIGSETVMTDSATYRQPYTAKVFDEILTMRPDTPILDCIASPDDLKALTNDQLIQLADELRAYLLYSTGVSGGHFGANLGVVELTIALHAVLNTPYDKLVWDVGHQAYAHKVLTGRRERLPSIRSKDGLTAFPEREESQYDTFGVGHSSTSISAALGMSLAARLLGENRTVAAVIGDGAMTGGMAFEAMNDAVQQNADLLVVLNDNDMSISAAIGGFSRHLAKLWQRGLAMDIDKHGNILMVKRTISSDDRRIRHYLHMANGAFEDVSSRLPSKISEKISELFHGVTSSPLPDKIAEKIGDKLFADNLFKAIGFTYLGPYDGHDLPKLIQVLERAKQLKGAILIHVHTIKGKGFLPAEADPIGYHAIGKLPKAGKNQAPASAPTAKKYSQIFGDWLLHWANIDERLVAITPAMAEGSGMVEYATKYPKRFFDVAIAEQHAVTLAAGMATSGKIKPVVAIYSTFLQRGYDQLIHDVALQNLDVTFAIDRAGLVGEDGATHAGVFDLAFLRCVPNVIIAAPSDEHECHQLLNTCYQYDGVAAVRYPRGVGVGRKVDMTDEHYPIGRANVVWQSSNFDTKSTKKLAVLSFGTRLKDALTAAQRLSESQAIACIVVDMRWVKPLDEALILRLLEMGVTHIATVEEHQITGGAGSAVNEFIVSLQALVKLLNIGIKDAFIHHASHEEQLLYCRLDTDGIYQSLSNLIIKN

SEQ ID NO: 63245 - protein, 103 aa, Moraxella catarrhalis
MANQRIRIRLKSFDHRLIDQSAQEIVDTAKRTGAQVCGPVPLPTRIERFNVLTSPHVNKDARDQYEIRTHKRMIDIVQPTDKTVDALMKLDLAAGVDVQIALG

SEQ ID NO: 63246 - protein, 548 aa, Moraxella catarrhalis
MSLCFLILNQSIGIKIMTLQSPNDFDQAGKTSHMQRFLKGVEWLGNLLPHPVVLFIWMSVILLGLSAILSAMDVAVIDPRPEGAKGRAEDGMIYVVNLLNGEGLAKIVENLVKNFTGFVPLGTVLVALLGVGIAEYSGMISAALRGMVMNAPKKIVTLVVVFAGIMSNTAAELGYVVLIPLAAMIFHALGRHPLAGLAAAFAGVSGGYSANLLLGTVDPLLSGISQEAARIIDPNYMVGAEANWYFMVVSTFLISALGYLVTEKIVEPSLGKYNPHDADDPTVLDNKIEQLNALEKKGLVWAGVSMLIFCLLLAWTVVPENGILRHPETGLIAGSPFLHGIVVFIFVFFAIPGYIYGKVTGSIKTNQDVVNAMSQAMSSLSMYIVLVFFAAQFTAFFNWSNLGSVMAVSGANFLNEIGLTGPLLLIGFILICALVNLMLGSASAQWAITAPIFIPMLMLTGYAPEMIQAAYRIGDSTTNIITPMMSYFGLIMAVAIRYKKDTGVGTLMAMMLPYSMIFLFGWMLLFYLWVFVFGLPVGPGSATYYHMG

SEQ ID NO: 63247 - protein, 506 aa, Moraxella catarrhalis
MSEMKCPYDHTHLTMSNGAPVIDNQNSMTAGARGPLLAQDLWLNEKLADFAREVIPERRMHAKGSGAFGTFTVTHDITQYTRAKIFSEVGKKTEMFARFTTVAGERGAADAERDIRGFALKFYTEEGNWDMVGNNTPVFFLRDPKKFPDLNKAVKRDPRTNMRSATNNWDFWTLLPEAFHQVTIVMSDRGIPKSYRHMHGFGSHTYSFINADNERFWVKFHFRTQQGIENLTDAEAEMVVGKDRESNQRDLFDAIERGDFPKWTMYVQIMPETDAQTVPYHPFDLTKVWPKGDYPLIEVGEFELNKNPENFFLDVEQSAFAPSNLVPGISVSPDRMLQARLFNYADAQRYRLGVNRNQIPVNAPRCPVYSNQRDGQGRVGDNYGGRPHYEPNSFGQWQDQPHLAEPALKIHGDAKFWDYRENDDDYFSQPRALFELMSDEQKQALFGNTARAMGDAPDFIKYRHIRNCDKCHPDYAMGVAKALGLTVEDAKNAYESDPARHLPSFL

SEQ ID NO: 63248 - protein, 240 aa, Moraxella catarrhalis
MNKQILLIEDDPDLAELISDYLSMNYYEVHHAATGQGGLDILDTKERDISLIVLDLMLPDMDGMEVCQKVRGSKNTMINKVPIVMLTAKGDTTDRVLGLEMGADDYIAKPFEPRELLARIRAVLRRHETPNQADTNSGSLTFGRLTVYPDSHEVTIDEKTVRLTTHQFQLLHYFATHAGKVLNREQLWQAMPNDDSSENIDRAIDVHISRLRALIEDNPRQPKRIITVRGVGYQFATDQV

SEQ ID NO: 63249 - protein, 322 aa, Moraxella catarrhalis
MSNFTNNHPKRPPFHRIGVMGRAGKASIVETLNELIRLLKMRQLSIVIDAQTAAIEGILIDGEHTDDSIIITPRHTMGEQCDLVIVVGGDGSMLQAASVMAGTGVPVLGINRGRLGFLADINPDELTEKVGQVLDGQYWLVERFLLKLQIIQNTTNDNALTQVLHEDIALNDIVLHAGKSVHTIDFKLKINNKDVYRQHADGLIVATPTGSTAYALSAGGPIIHPTLDAICLVPMHPHTLSDRPLVVAGSSQIMINIHKDNRTQPMVGADGKTSVPLENDQTLIIAKHDKTLLLLHPNSYSFYEACRTKLHWNLYSEEFSLD

SEQ ID NO: 63250 - protein, 106 aa, Moraxella catarrhalis
MHCDVYKFPKNEGWYVYIARPDYPNDTENLKDWLGVLPAAMRTKLGFGQFIMHLDLSSRQKLAQADIHQVKAKLNEQGYYVQAPPSEMLAAQAAIKAQDAQDKQFD

SEQ ID NO: 63251 - protein, 560 aa, Moraxella catarrhalis
RVIKAPTGTALTCKSWLSEALYRMIQNNLHPDVAENPQSLVVYGGIGRAARNWECYDQILASLKQLEDDQTLLIQSGKPVGVFNTHENAPRVLIANSNLVPRWATWEHFNELDRKDLFMYGQMTAASWIYIGTQGIVQGTYETFAEAGRQHFGTKKGDKSTDNWKGRWILTAGLVGMGGAQPLAATFAGATSLNIECQQSSIDFRLRTGYVDKQANDLGHAYELIKEHTSKGEAVSIALLGNAAQILPQIVQRAKNGDIKPDFVTDQTSAHDLIHGYLPIGWTVDDWRAAQQDPSQHAKLTQEAAKSCAIHVQAMLDLQKMGVPATDYGNNIRQVAFDAGVKNAFDFPGFVPAYIRPLFCQGKGPFRWVALSGDPEDIYKTDQKIKELFPENTHVHNWLDMAKDRIHFQGLPARICWLGLGERDKAGLAFNEMVKNGELKGPIVIGRDHLDTGSVASPNRESESMKDGTDAVSDWALLNGMLNVAGGATWVSLHHGGGVGMGYSQHSGMVIVADGTEAAAKRLANVLVNDCGSGVMRHADAGYELAIETAKNYGLNLPMV

SEQ ID NO: 63252 - protein, 517 aa, Moraxella catarrhalis
MNSLILTPRNLTFAQLRQVYDGPVKISLDPTAYEAIDASRQAVQAIIAKDKPAYGINTGFGLLAKKRISDNELELLQRNLILSHSVGTGDRLPDEVVRLIMVMKVSSLAQGVSGVRREVVDSLLGLINHNIIPHIPAKGSVGASGDLAPLSHMTLAMLGFGDVSVNGENMSAKKALDDAGLTPIVLAAKEGLALINGTQTSTALALRGYFMAQDLLAAATVVGSMSIDAAKGSDAPFDARIHDARGHHGQTQIASAHRQLIADSQIRASHKEDDERVQDPYCLRCQPQVMGACLDVINQAGKTLLIEANAVTDNPLIFNDNDGPVAISGGNFHAEPVAFAADMLALAISEIGSMSERRIALLIDATLSGLPAFLVKNPGVNSGFMIAHVTAAALASENKSHAHPASVDSIPTSANQEDHVSMATYAGRRLYDMACNTATIVGIELLAAAQGVDFHLEEGLHTSPKLASVHQTLRQSVAHYDKDRYFAPDIENAKQLVIDGKLIDSWRELRTDWFLAK

SEQ ID NO: 63253 - protein, 428 aa, Moraxella catarrhalis
MYDKTMKNTMMKTHFDLLITHANIATMNSDFGFHLDNQSNQTTKTATPYGQLTNHAIGINDGKITWIGHHDDASSFTTDRLIDAQGKWLTPALIDCHTHLVYAGNRSDEFEARLTGVSYEQIAKNGGGIISTVNATRQASFDELYAQSEKRLKALLAEGVATLEIKSGYGLDLQNERKMLQVARKLGQDYGITVKTTYLAAHATPPEYKDDDGNAQNDAYIDKVCEWLPILHQEGLVDAVDAFCENIAFNKQQVKKVFEVAQSLGLPVKLHAEQLSDMSGGALVASFDGLSADHIEYLSDDSIQRMAQSGTVGVLLPTAFYVLKETQLPPIDKMRQQGVSMAISTDCNPGTSPSTSILLAMNMACTLFQLTPEEALAGTTLNAAKALGLQDSKGKIAIGYDADIALWDIERPADLSYLIGQNKCVDVI

SEQ ID NO: 63254 - protein, 841 aa, Moraxella catarrhalis
GYAMSQMLTEYRAHVAEREVLGVPPQPLTDVQTADLIELLKNPPQGEEEYLIDLLENRVPAGVDQAAYVKAAFLNAIVKGDATSPLVSKERAVYLLGTMLGGYNVAPLVELLDDDELGEMAAKALKKTLLVFDAFHDIEEKAKAGNANAKAVLESWAEGEWFTSRPKVPEEMTITVFKVTGETNTDDLSPAQDAWSRPDIPLHANAMLKNEREGIHPEKNGEVGPLTQIQELLDRGHPVAYVGDVVGTGSSRKSATNSVLWFFGEEIPHIPNKKDGGVCLGGKIAPIFFNTMEDAGALPVEIDVTEMNMGDEITLKIDHANATVAAFKDGTQIAKSKLKTPVLLDEVRAGGRINLIIGRNLTSKARESLGLEPSTLFRTPEQPADTGKGFTLAQKMVGRACGLPEGQGIRPDTYCEPKMTTVGSQDTTGPMTRDELKDLACLGFSSDLVMQSFCHTAAYPKPIDVVTHHTLPDFIMNRGGVSYRPGDGVIHSWLNRMLLPDTVGTGGDSHTRFPIGISFPAGSGLVAFAAATGVMPLDMPESVLVKFKGKMQPGITLRDLVHAIPYYAIQAGDLTVEKKGKKNIFSGRILEIDLTEMENDLTVEQAFELSDASAERSAAGCAITVSEEKVAEYLRSNIVMLKWMIAEGYGDARTLARRAENMQKWLDNPSLLKADADAEYAKVYEIDLADIKEPILCCPNDPDDAKLLSEVAGDKIDEVFIGSCMTNIGHFRAAGKLLQEVPAGSLTTRLWIAPPTKMDERQLMDEGYYNTYAQAGARTEMPGCSLCMGNQARIAPNCTAVSTSTRNFPNRLGQGANVYLASAELASVASVLGRLPTVEEY

SEQ ID NO: 63255 - protein, 486 aa, Moraxella catarrhalis
MCKTFVLFYKEVWTVLHIVRTDFLEKVMSLKFGYKALSLAVFSTLTATAAQAAGLDRSGQDVTAFLQDGTYAETVYTYIDANVTGKDTSGKDTGDIAEAYDFFRYGVKADINDTFSVGVLYDEPFGAAIKYDGNSNFVADKNATATIFAQAINQATKAQLNDSLAYKSIKPVLDSVKSPQRALAVASIVETNSAQAKPIADRLRAAAAHAEATDGQKTNVEIRTNNLTMLVGAKLGANKNFQIYGGPVAQRVKGEVHLRGPAYQVMTGYDAKIATDTQLGWAAGLAFYKPEIALKAALTYRSEIEHDSEIAETIPVTGYAGKKDFKVTLPDSWNLDFQTGVNPTTLLTAKVRYVPWSDFDIRPTQYTETTKLRYPQGLPIISYDKDQWSAEVGLGKRVSDRLAVSGAVGWDSGAGNPASSLGPIKGYYSLGLGARYNVTPEWSLSLGGKYFKFGDAQAQLPTKDKVGNFDSNDGYALGVKLAYHAK

SEQ ID NO: 63256 - protein, 381 aa, Moraxella catarrhalis
MGIYLTATGLYKPAYQISNDELVAAFNTYVDNYNAEHAKAIAAGDKVALQHSSSEFIEKASGIKSRYVIDKKGILDPKIMAPIFPARKLGEELSVMAEMGLAALKDALDRAKLTADDLDGIICASSNFQRCYPAIAIEIQHAIGMQHGFAYDMNVACSAATFGIAQAVGSIKAGLGKKIAVLNVEITSAHLNWRNRDSHFIFGDVAAATIVEELSTPKGYEILDSKLYTQFSANIKNEYGFMDRSEFLAADTQMYADIKEPVTDKLFLQEGRKVFREVCPKVSEIITIHLTENNLSADQIKRMWLHQANINMIDLILRTVVGKDADKSIAPVVIAEYGNTSSASPVVAFHETQDGVESEDLCVMCSFGAGYSIGSVLLKTV

SEQ ID NO: 63257 - protein, 243 aa, Moraxella catarrhalis
MKKHNFMTDLQINSDKPIIITIDGPSGAGKGTLAYRLAEHFGFELLDSGALYRIVGLMAYQAGLLDNTPDELALSDLVQSLHLSFCPNAKTRAIDIYVDKKPLRDDIRNETVGGYASIVAAFPKVRSALLDLQRNIADNKLGLVADGRDMGTVIFPHAHAKIYLTASAQARAKRRVTQLTQAGKQANFDDILADIIARDERDENRSVAPSRPADDALLIDSSDKSADLVFEEAMQFIEQKLSE

SEQ ID NO: 63258 - protein, 579 aa, Moraxella catarrhalis
MTIHHLNRTVLDRLRLIFKVNIMVSFAELFEASQSEQGLNIERGSVISGTVVAIDSDWITVDTGLKSEGIVAREEFLNEAGELEVAVGDSIDVVVEAVDNGMGQTVLSREKAKREESWRALEQLHENDEIVKGVISSKVKGGFTVEIGSVRAFLPGSLVDVRPVRETTHLEGKELEFKVIKIDKQRNNIVVSRRAVMEAENSAERDELLAKLEEGMEVEGIVKNLTDYGAFVDLGGIDGLLHITDMAWKRIKHPSEAVEVGQDLKVKVLKFDRERNRVSLGLKQLGADPWTEVEQTYPVGTITKARVTNLTDYGCFAEIAEGIEGLVHVSEMDHTNKNIHPSKVVQVGDEVNVMVLEIDGERRRISLGIKQTMPNPWAEFDKNHEKGQKISGTIKSITDFGLFIGLEGGIDGLVHLSDISWTESGEEAIRNYSKGDTVEAVVLSVDAEANRISLGIKQLNSDPFNEYLLSNDRGAIVKGTVKEVDAKGAVITLADEVEGYLRVADIARERTEDASKVLSVGDEVEAKIVGVDRKSRNISLSIKAKDEADERQAIKELSNTAAETQPKTLGDIFGEQLKG

SEQ ID NO: 63259 - protein, 528 aa, Moraxella catarrhalis
MTTHLTNEINQRRTFAIISHPDAGKTTMTEKLLLWGKAIQVAGEVRGRKADRHATSDWMSMEQERGISITTSVMQFPYKNHVVNLLDTPGHADFSEDTYRTLTAVDSALMVIDGAKGVEERTIKLMEVCRMRDTPIISFVNKLDREIQNPLALLDEIESVLKIKCVPFAYPIGMGQDFVGVYSFVDNKTYFYKKGFGSQIVEIESKDGYDYADIKDRLGQILWDEFIENIELAQMAYEDWDEREFLAGRQTPVLFGTALGNFGVNMILDVLTQYAPPPKDHVAVERTVKADEPAFTGFVFKIQANMDPKHRDRVAFMRVCSGKYERGMKMNHVRLGKEVRVSDALMFLAGDRETLDEAYAGDIIGLHNHGTIQIGDSFTSGETLNFTGIPHFAPELFRRVVLKDPMKSKQLQKGLQQLSEEGATQVFMPQINNDLILGAVGVLQFEVVAHRLLEEYKVQCTFEPISIATVRWVYSDDKVAFEKFKKKAHDQLSVDGGGYLTYLAPSRVNLQLMQERYPEVEFRATREH

SEQ ID NO: 63260 - protein, 852 aa, Moraxella catarrhalis
KSLVIVESPAKAKTINKYLGKDYVVRSSVGHVRDLPVGGSATKTNKTQDVGLSREEKAQKALVRRMGVDPEHDWAAVYEILPNKTKVIRELKALAKEADKIYLATDLDREGEAIAWHLKEVIGGSDDKYSRVVFNEITKTAIQTAFEHPDQLNIDRVNAQQARRFLDRVVGFMVSPLLWAKIARGLSAGRVQSVATRLVVERDEEIRAFVPVEYWKIHTNNTAAGETLNLEAVKKNGKTLKLGNKAQADEVVLALGSSDFIVSAIEEKPTQSRPSAPFITSTLQQAASTRLGFSVKKTMILAQRLYEAGHITYMRTDSTFLSQDALNLVREYITDHFGDDYLPQKPNFYGNKQNAQEVHEAIRPSHVLVKSSQLTGMERDAQRLYELIWRQFVACQMMPARYQSVNLMVAAGDIELKAKGRTLVFDGYTKVQPPAKTDDILLPAVKVGEKLPLIEILPTQHFTSPPARYSEASLVKELESLGIGRPSTYASIISTIQERGYVKLENKRLYAEKMGDIVTERLVESFPDLMDYAFTAGLEDKLDEVAVGEEDWKTVLDRFYHDFKQKLDYAKTTDGMRPNNPTNVPDIHCDLCHRPMQIRTGSTGVFLGCTGYNLPPKERCKGTKNLMPVSAFEFDADDDSAEVNALMEKKRCPKCNTAMDGYIVDGGLKLHICGNNPDCDGHVLEKGVFEIGGATSDTPTIDCDKCDGQMELKTGRFGAYFACRKCDNTRKVLKNGQAAPPRMTPIDMPKLRSQKFDDHYVLREGAAGLFLAASKFPKVRETRPPKLSEFVEIKDQLEPKFYYLYDAPDTDDVGNPTILRWSRKNQKRYVCSKKDGKATRFALVWRDGAWVQ

SEQ ID NO: 63261 - protein, 130 aa, Moraxella catarrhalis
  MISC_FEATURE (43)..(43): X=any amino acid
  MISC_FEATURE (107)..(107): X=any amino acid
QRCHHYAIRAGRNLPDKEFRYLRTVIVTAAVYWGFDQELRLRXPHQLTFQHRAGITPYTSTFVFAECCVFNKQLQQPGICDCQQLKEQVLSPSAAYLLPKLRYHFAXFLQQSSLKRLGILYLTTCVGFGY

SEQ ID NO: 63262 - protein, 192 aa, Moraxella catarrhalis
MKRLSLIALLAVAGFANAATYELDPYHTNARFSIDHFGTSTNVAGFYELSGLMQFDRAAGKGSIDISIPVSSLTASSSLFTQHLKGADLFNIEQHPTMRFVSTKFYFKGTGKNRQLQSVSGNLTLLGKTHPVTLTATKFNCYQSPMLNTEVCGGDFTTKIDRTKWGMNYLVDMGMPKDVRIDIQVEAGKKAH

SEQ ID NO: 63263 - protein, 220 aa, Moraxella catarrhalis
MTLQSIDKVPKLYLLTNDDELTTLLDKLERVFDTGAVSLLQVRRKSTLKLYDLATVYREAEMIVSLANDYDIKVVMNDSLELASHFGTGLHLGQRDGSVRVAREILGDHVVIGRTCHTDLALFKEAKREGATYGAMGTAFASITKPRAKIISKDILKKACELDFPLCVIGGITLENIHQLRDKLNGAAIDYIAVTADIMGHSVDTIADKCLAWQQKLNTW

SEQ ID NO: 63264 - protein, 364 aa, Moraxella catarrhalis
MNFDINLVIVPITLVFLLIWLVDKLVLKQHFAIKHHAKEVKFTETQLSMHKQKLELALANYGMRSDAQSYTPDAHAPSDLYSAYQDYQASRVKLAALVGNPPNHIAVVRWAYEFLPILLAIVIVRAFVIEPFNIPSSSMVPTLYTGDFIIVNKAAYGLRLPIIHTKILDTGNPKRGDVAVFRYPVNDNIYFIKRVIGLPGDTVSFNRGVLSINGEKVETTAVNYQMPSVLLDKMLPNMIHGQTLSDADRAGFGRQEEYLARYQTENLGNHTYTVRYVINSNSSAEAPFLIEHSPEVVDSHGEQWSIVIPEGQFFVMGDNRDRSDDGRFWGFVPESNLSGKATYIWMHKESGFRLPSFGRNGTID

SEQ ID NO: 63265 - protein, 322 aa, Moraxella catarrhalis
MDNSKKIKVLAISIAAVLHGLVGFGLANMTIKPITPPPVTPPLEIEFIKEPVPEPIALNDLESPEPPGEPVVTPEPVVEPEVATPEVIEPPEPIPEPEPLPEPIPEPEPEPEIDVEAILEQQRLQEAWVAQQQQLAKIQEQERLEQERLENERREQERLEQERLENARREQERLDNERRAREQAQKEAQVAAARRAAAQAAANAAKKAGNHGGGQPGQNQTVEGGINISNASWKTKPRVNNFCSARSDIDTTLQVSFRVDAEGKISNVNLNGSTGDAKLDRQIIRQIGRGRLHPFREGNITRVGTAIYPITLKLQKDESCTN

SEQ ID NO: 63266 - protein, 312 aa, Moraxella catarrhalis
MSIHSSTNTPQQTDGLVDLVTVLAAVTDHKARILTVSGGDKLPSGQLTPIHHSLQAGVKDWVRTQTAQPMGYVEQLYTFVDGERKNAQGMPVLYVSYLGLVKEATAHSLNPDATWQDWYDYFPWEDRRNSSKPIEILSGLYAWVDAGNDTQERQERLRRVQLCWGLPPYSWSEEQVLLRYELLYETGLVAESPWQNPNFDFRHTGRFMQHSHRRVLATALARLRAKIKYRPVIFELMADEFTLFQLQKSVEALSGQELHKQNFRRQVQQQNLIEAIEGRFAHERGRPAQLYRFKDTVLLERLLSNTRLPVSK

SEQ ID NO: 63267 - protein, 416 aa, Moraxella catarrhalis
MTDITLNQSHKLTWRSFGPGILMASAAIGGSHLVASTQAGALYGWQLAIMIILANFFKYPFYRFGTEYAYSTGSSLVAGYAKISRIYLWAFFVLCIISGIISTGAVALLCAVILGQILPWELSTLELSCIVMVTSGILLVAGHYRLLDGLTKWIIALLTVATVAAVFIAAGKPSAISADFIPASPWNLAALGFIVALMGWMPAPLEFSAVTSVWTAKKIRTDYTNRFQGFVDFNVGYFTSAVLAIFFLALGVFVQYGTGTEIAMQGGAYVPQLINMYTETIGNWAKMLVATIAFLCMYGTVITCADGYGRTNSESLSLILTNSTKATEKYVVIWTVFTIVAGYGLIAFFLGQMAALLKFAMISAFVTAPIFAYLNYALVKKEGHLSTIMKWYALAGIVFLTGFTVLFLLQFFGMIG

SEQ ID NO: 63268 - protein, 184 aa, Moraxella catarrhalis
MMTMKKAVMFSVAALLAVSTMATQAQEAVAPAETQTADATEVTTAEAPAQAAAPVEEAPKESPQVQKLVAMYPNLIARIAPYGKVCFDGEECDINITVLAPAVEGQARDGESLYKAICSTCHDAGLIGAPKIGTSDWASRIGKGTATLYNHAINGFNAMPARGGADISDEEVQNAVDYIIQQSS

SEQ ID NO: 63269 - protein, 1199 aa, Moraxella catarrhalis
MRLKSLKLAGFKSFANPTTFTFRHDITAIVGPNGCGKSNVIDAIRWVLGETSAKQLRGGAMSDVIFAGVEGRAAKSLASVELIFEHTQDETHGIRHELNLYQELSLRRQVTKEGKSDYFINGQRVRRRDVVDVFLGTGLGARTYAVIEQGMIGRIVESSPMQLREFIEEGAGVSRYQARRAETEKKLGETQDNLKRLSDLQGELKKQHKTLIRQAQSAKQYQALNDELKTLQKEELIRRLFEAWHHHEQKKIEQGKSGEVLAKLDAKANQVRRELDLLSARVAEAQWLKDDAKDNYHNAQMAEQTAQHNFYTVNSQITQNDEKIARLQAQHQEALTKINQAQDELLQINQSLDVITPKVEAMTHEITHAKQAQSEVQLTWQSHRDELSSLMQEKNNLENLKKLAQSQRQRLEIGLNKWQVRYDELITAKNLFSDTIEVQNQLSADTLKAVALRQKLEHLNDDEMLKSLVDELTQAVQTSQIHVQSQEKRHASLMGEYEILHKLVHTKIPSHKITTPPDADTSIALNALPSLKESLVLTEMGLDYADVLDQFLGFWLNARLSDELPTAVLGHVMDDNDYMILKSGKTRNTTYTDEMLSQLPTSIQQQLVRFDRLFSMPTLELFGRCYLYVGDEPLTDLDTNVPFGMIIMTKAGWLVGSFGMLHLSKLGDTSSQFLSDRKKHLERLEVLEDELNTLEDSLEKDQKQLKQVLTRLQSSKIELEEITAQKNVVTQQLHQLEQGLTMLTAKLDSEKARRESIDSQLKRLDDENSSIKNELQELNMQIETCDFGLRELEPKVEQANQAMAVQTVRIDEAVAKLKTQNDTYQALQIKLGTLTQAKTHAERLLEMAKHSASQTQADIETTKSTQQELSQKLPVLEEAFKAAKAVSHELKIASDEYELAAKAQQIAQSQLQETLTEAHTKFATAQATLAQISADTAVGESRVQDIGGELMRLDESFNLASKLADFRTNPNQNFTDNSARQNQIKSKIAELGAVNLAAAAELAELEARVSPMDEQINDITQSMKKLQDAIRAIDEKTKTLFLTALEAVNKELNALFSKVFGGGQASLTLMADDDLPKSDKWRAGLVLMAQPKGKKNSRLAVLSGGEKTLTALSLIFAIFKQHPAPFCVLDEVDAPLDDANVARFTGLIRELADDVQFIFISHNKLAMQIADELKGITMPTAGISSLVTVDLQEAQKYLE

SEQ ID NO: 63270 - protein, 913 aa, Moraxella catarrhalis
MIKKPLVCAISATFAMPAVADNTKLGEEPTTTLKGVLVSSQTNQNTGFVSNDSKQSSDLTLSKDKLKYRSATLGNALSGELGIHSNPFGGGSSAPVVRGQEGVRLKILQNGTDVIDVSSISPDHVVATDTLLASKVELVRGADTLLYGLASPAGVINVVDDRIPNRMPSGAIHDKIEGETMLRYNTNNHEKLATAGVSFGVGDRIAVRVEGLKREADDYQVPHFQADRMLDYVPGSANNSTVGMIGVSYIHDNGHIGASYSHRKDRYGIPGHIHCDSQREHFIKWHNITKSNYYLPIYPHLMEDSDIDDNPHTHCRHNHEDHIGEHNPTGVPINHEHHSPWIDMKTNRYDIRGEVYRPIQGLDKIKLSLTYADYYHDEKDAGNEQDPNNHKPSERDTTVDKGHASSIFTKKGVNGRLELYHTPTKRLSGVLGIGYQTQKSAAGEAYLPSYFQSEAEWQKAQSQNINQYRPYLLVPNTNKSLGIFGLEQLKLNQMTFKVAMRHERQKTPIEYDQHLLDHALQYFLSKAQLKAPDHPDLTTYKQHATSYAGSALWDITPNHRLSLTYSHNERIPSPMELYYQGGHLATSSFEHGNKNLVKEKSDNYELGFMHTADKVSYKASTYYSNFDNYIFNETIAKEGNLYIRRYNQTTAKFYGVEGSLTYQPNANHSVMFFGDMVQGKIGALSDIKGKLVYAGRKWVYFDDDIKDMTVDDNGDYDADGGLTCALKTPEQWGQINDNNDCSTTINVYKNGTTTSGEEDYDRLARNPTYAPRVPPSRLGIRWQGYFGDHWSANAEFNHVFAQNKVATSTVAIKPQFKQPEGCQRHESHCRISDYGSDNNPLMMQPRYITENKTAGYNLLNVGLDYNNAYRNVDYTLSIRANNLLNEQIYIHNSFLPFVPQMGRNLTLGLTAKF

SEQ ID NO: 63271 - protein, 122 aa, Moraxella catarrhalis
  MISC_FEATURE (19)..(19): X=any amino acid
MLSAVIPSEHSYSAMPLAXQPKHQRFVHSGPLVLGADPLKFPTPTVDRDRTVSRRSKPSSRTSLNGEQPYPWDLLQPQDEMSRHRGAKHRRRYELLGGISLLSPEYLLSVERWPFHTEPPDH

SEQ ID NO: 63272 - protein, 88 aa, Moraxella catarrhalis
MAMFSMIWALIVGFVVGLLARALKPGVDGMGWILTMILGIAGAYVGAFIADFVGVNAQSGFSYLIFSVIGAIILLFIYEILAGKRHLK

SEQ ID NO: 63273 - protein, 273 aa, Moraxella catarrhalis
MSTLATIIETAFDDRANFTAQTVSPEIRAAVDEVIEALDNGSLRVAQKIDGEWVVHQWVKKAVLLSFKINDNKPMNAGELGFYDKVDTKFNGWTEEDFKNAGVRVVPPAVARKGSFIAKDVILMPSYTNIGAYVDEGTMVDTWATVGSCAQIGKNVHLSGGVGIGGVLEPLQANPTIIEDNCFIGARSEIVEGVIVEEGSVISMGVYIGQSTRIYDRETGEIFYGRVPAGSVVVPGNLPSPCGKYSLYAAIIVKKVDAQTRAKTSLNDLLRTE

SEQ ID NO: 63274 - protein, 59 aa, Moraxella catarrhalis
MGKWPVSASFGYINTMKTIITNFIKKGNYFSSLMTNKVIAIKNHGNPSSIHHLIKLNLN

SEQ ID NO: 63275 - protein, 466 aa, Moraxella catarrhalis
MSEQTSSMWGGRFSEATDSFVAEFTASVNFDKRMARQDIQGSIAHATMLGMCGIITQDESCQIINGLTQIQAEIDDGKFQWSVVLEDVHMNIESRLTTLIGDVGKKLHTGRSRNDQVATDIRLWLRDETDNILVLLAKLQSGLLDLAANHTKTIMPGFTHLQTAQPVSFGHHVMAWFEMLVRDSERFVDTRHRINQMPLGSAALAGTTYPIDRTITARLLGFEGICQNSLDAVSDRDFAIEFTANASILMMHLSRMSEELILWMSAQFGFIHIPDRFCTGSSIMPQKKNPDVPELVRGKAARVFGQLTTLLTLMKNQPLAYNKDNQEDKEPLFDCVDTLTGSLLAFADMLPNIIPNVDNMRAATMKGYATATDLADYLVKKGLPFRDAHEVVGKAVGLGVSKGVDLSELSLDELQSFSPLIECDVFDCLTLEGSLTARNHIGGTAPNQVLSAIKRGHERIINPKTA

SEQ ID NO: 63276 - protein, 46 aa, Moraxella catarrhalis
MQVLSSLKSAKNRHEDCQIVRRRGRTFVICKSNPRFKAVQGGKKRK

SEQ ID NO: 63277 - protein, 318 aa, Moraxella catarrhalis
MDSGETLTFQALILTLQNYWASRGCVVLQPYDMEVGAGTFHTATFLRALTPERWNAAYVQPSRRPTDGRYGDNPNRLQHYYQFQVVLKPNPANIQELYLGSLKAIGIDTLTHDVRFVEDNWESPTLGAWGLGWEVWLNGMEVTQFTYFQQVGGIECFPVTGEITYGLERLAMYIQGVDSVYDLVWADGEFGRVTYGDVFHQNEVEQSAYNFEHADVAKLFELFDFYEEQADKLVAVNLPLPAYEMVLKASHAFNLLDARGAISVTERQRFILRVRTLARKVAISYTEARAKLGFPLADDAHKAEALEKWLPKEPKLVL

SEQ ID NO: 63278 - protein, 265 aa, Moraxella catarrhalis
MKFKTFGLMAAIVGTFSISACSGQNEQSTKASGDTLRIATEGTYAPFNYTNPDGSLGGFDVDIANALCNKMQTECQIIAQDWDGIIPALKTGKFDAIVAAMSVTPERSEQVDFSEPYFVNSLVFLAKKGSNFDPSSTDAINNAKIVAQRSTISSQWLTQTYPNSKPQLYDTLDNAFIDLGNERADAMISDKLPALTWLSSDLGQNFEIKGGDININDKVSIAVDKGNTALLQKFNEALAAIKADGTYKQIVIKHFGEAGMPTNIE

SEQ ID NO: 63279 - protein, 240 aa, Moraxella catarrhalis
MFDLQGYGPILLQGTILTIKLGLASLVFGLLFGLLGALAKLSGVWILQKIADAYTTIVRGIPELLMVFFIFFGGSIILVTIAKQMGYTGRIDVSQFWAGVTALSIMFGAYATEVFRMAIQDIPKGQWESAQSIGMTPIQTLTRIILPQMWMVALPGLGNLTLVLLKDTALVSLIGLQDLMYFAQRAAQSTQKPFTFYLAAAFIYLALTSVITLFIMWCESRANPAARYAKLLHKRSGGQS

SEQ ID NO: 63280 - protein, 76 aa, Moraxella catarrhalis
MSKTKNKAVQRLIEFFGSQMKLADALDVEQSSVSGWLNNRFYISRDNADLAESLTNGVVRSEELRPRKKAKTPRSN

SEQ ID NO: 63281 - protein, 447 aa, Moraxella catarrhalis
MIKKLLIANRGEIALRIVRACKQLGIATVGVYSTADKDLMHLRFVDEAVCIGNAPSAHSYLDINALLAAAEITAADAIHPGYGFLSENAEFAERVEEAGLTFVGPHPEHIRLMGNKVSAINAMKEAGVPTVPGSIGAITLGNAEEQAREIGFPLIVKAAAGGGGRGMRVVERFEELLIQVQAAKTEAQNAFGDDTVYMERFLKNPRHVEVQVLGDGNGNALHLFDRDCSLQRRHQKVLEEAPAPDIPDEVRTPILEACVHACKKIGYRGAGTFEFLYENGEFFFIEMNTRVQVEHPVTEMITGIDIVVEQLKIAAGYGLSYHQDEITIRGHAIECRINAEDPKTFMPSPGQIQRLFTPSGSGIRFDSHLYQGYTIPSYYDSLIGKLICHAQTRRQAIAKTLHALDELVIEGIKTNIPLHRDVILQDEAFCEEAQNIHYLEGHMLKTQ

SEQ ID NO: 63282 - protein, 167 aa, Moraxella catarrhalis
MIDWSKMDMRVSRTEIKKSHERLQALSEPLAKLSKKQLANLPVSEYFLDELKHLTNIDSHAAKNRQIKRVGKLIIEENRHALTQALFECQFTPEQIAKIETWYDRLKLSDESTIKQFVKQFKKAEYNSIYQLLLWIEYAKHLGDDELLAESVADFESYVKEVAILSK

SEQ ID NO: 63283 - protein, 144 aa, Moraxella catarrhalis
MNQKLLLASVVAALTLTACSKPADESSQANPSAEHATMQDEHTHAHEHHDDHAGHMHIHTDGDAYQCGDQTVHIVVHNHEGEIEAHLNHDGIEYDFNQDPSNKNQYTSNHGFADNQKTILTIDGNKAVVTGDTNQVLLDCVKAS

SEQ ID NO: 63284 - protein, 950 aa, Moraxella catarrhalis
MSFNDFSELFYENAFVHRHLGKDANEQQALLQTVGFDDLDSFVDAVVPKAVRLNKDLDLPEAMSEHNALAKLRAMADNITVAKSYIGQGYSPTRLPAVIQRNVLENPGWYTAYTPYQAEIAQGRLEALLNFQQVCIDLTGMDLAGASLLDEATAAAEAMAMARRVSKSKSNAFFVDERTYPQTLDVIHTRAKYFGFEIVMGDFDVAKNGEFFGAFFQYVGKDGDVVDLTDVITAVKDNGAYAIVASDIMSLVLLKSPADMGADIALGSTQRFGIPMGFGGPHAAYFAFKDKDKRSAPGRIIGVSKDAQGNTALRMALQTREQHIRREKANSNICTSQVLLANLAGMYAVYHGAAGLKRIATRIHALAVAFAKAVKSSELAVRHDVFFDTVLVECGGQAQTIFKTAKDKGYNLWQHDNGGISVSFHELTDEAEFDELCQIFGVKGSLDALQIQLGDLLRQDDILTHPVFNSHHTEHQMLRYLKSLEDKDLAMNRSMISLGSCTMKLNATSEMLPITWDEFANVHPFAPSEDTKGYIQMIESLQAQLKAITGFDEISMQPNSGASGEYAGLLAIRRYHESMGQDERNVCLIPRSAHGTNPATAQMMGMKVVVVATDDNGNVDIDDLKAKCDEHSDKLGALMITYPSTHGVFEEGIRDICDMIHAHGGQVYMDGANMNAQVGIMQPADVGADVLHMNLHKTFCIPHGGGGPGMGPIGLKSHLAPFISNHRINPVFNAQSDCSAVSAAPYGSANILPISWMYITMMGRDGLLSATKQALLNANYIATKLSEDYPVLYTGKNGRVAHECIIDIRPLKAQTGISETDIAKRLMDYGFHAPTMSFPVAGTLMIEPTESESKAEIDRLISALKQIKQEALKVQTGEDGWTPDDNPLVNAPHTAFVITGEWAHPYSREEAAFPLPYIKAHKFWPSVGRVDDVYGDKNLICACPSIENYE

SEQ ID NO: 63285 - protein, 265 aa, Moraxella catarrhalis
MNKLKIGIMGASGRMGRMLIESTMNHPNTELGGAYVRSTSSLIGVDAGEFIGGKKSGVALSTLDGSQVDVMIDFSLPEAFDEALNQCVTHKIPLVMGVTGLSDDQEAKLQDAAKHIAIVYAGNYSTGVNLSLNLLATTARVLGLDADVEIIEHHHKHKIDAPSGTALMMAQAITEARGQNITNAAIYGRKGAAKRQRGDIGIHALRGGEIVGEHTVEFMMDGEIIQITHKAQNRATFATGALRAALWAAQQPAGLYDMQDVLELK

SEQ ID NO: 63286 - protein, 278 aa, Moraxella catarrhalis
MNGTLYIVSTPIGNLSDMTEHAISTLKSVNLIACEDTRTSSKLLKHFNITTPTIAYHEHNADKQTVHLIEKLNSGQSVALISDAGTPLVSDPGYRLVKASHEHGINTVPIVGACAAIAALSVAGLPSDRFTFAGFLPAKSHGRLKALQHWQACTQTLIFYEAPHRIVDSLTDMMTVFGATREATLCRELTKTFETIKKLPLGELVQFVQNDSNQQKGEIVVVVAGCDDTVHQSTDYDAWLLAITKELPPKKAASIVADVLGLKKTTVYDRLLALQNHI

SEQ ID NO: 63287 - protein, 305 aa, Moraxella catarrhalis
MISRPIGRFAPSPTHHLHLGSLTTAVASFCHIKSLGGDWLLRIEDVDFERCQPKYTDSILHDLDKLGLHWDKEVTYQSKRTDIYDEILSNRLSDITYACQCSRKQLEAHRNQNAKPHALNQPTLYPRFCLHKDLDKSHPKSKIRLQLPNVETAFVDELQGVIWDNPALSLGDVVVKRQNQMINYILACAIDDGLQNITHIMRGLDIMPMTVAQINILHKCRLPIPSYFYHLPLLMNTDGQKLSKQNLATPINTTKPSEMLLYALKLLGQHTVKQMHAAKPHEILRHAIEHWDNTPLKHRHTLAII

SEQ ID NO: 63288 - protein, 287 aa, Moraxella catarrhalis
HEIIGRIAKVGDNAQKFKVGDLVGVGCMVDSCRTCSPCSYGLEQYCEHRQYSTYGSLDRHDGTLTQGAYSTSIVVSEDFVLKVSENLDTQAVAPLLCAGITTYSPLRHWKVGKGTKVGVVGLGGLGYMVVKLAHAMGAEVTLFTRSLGKSDDAYCLGASRVVLSTDENQMFEVANTFDVIIDTVPYAHDLKPYVPTLALDGTLVLVGLMGELEQTINTVPMIMGRRSISASMISGIRETQEMLDFCAEYNIVPDVEMINMQDINTAYEHMQKSDVKYRFVIDMASLK

SEQ ID NO: 63289 - protein, 157 aa, Moraxella catarrhalis
MSDNKDNLDIQSGTSASGSQHTKDPITVAKESVVEVAKKHSAKDFLLWLIAIIAMISATLVSQYLPRYWAPANNVWTQIAITVSLVVFGFICLAFTNQGSAFKTLLKDAGIELRRVTWPTKDETARYTWQVILIMIIFGIIIWLLDMFFSYIVGLII

SEQ ID NO: 63290 - protein, 210 aa, Moraxella catarrhalis
MKHITFKDGSTAPVNNIYCIGRSYAEHISELGNTPTGEPLVFLKPTTALTTDNTLSLPSYSEDIHHEVELVVYINQDVADDQIPDLSCIAGYGIGLDLTARDIQNSLKAKGMPWTTAKGFRHAAWLSVLTKGIPTTHQLSLMVNGDIRQDDSTDKLLFDMTYQLNFLHEKFGLRQGDIIYTGTPKGVGRLVSGDTLVAKLDTESYTIHII

SEQ ID NO: 63291 - protein, 683 aa, Moraxella catarrhalis
MTTSRKILVTSALPYANGPIHLGHLVEYIQTDIWVRAMKAMGHNVTYVCADDAHGTAIMLKAQDNGITPEEQIATVKASHEKDFAGFLIDFDNYHSTHSSENQYFSQKIYTTLKQNGYIFTKDVEQLFDTEKGLFLADRFVKGTCPECDAPNQYGDNCEVCSSTYNATELKNPYSTLSNSSPIIRSSKHYFFNLPQFDEFLRTWTKSQGRLQSSIYNKLSEWFDAGLAPWDISRDAPYFGFKIPDTPADEPDKYFYVWLDAPVGYMASFKNLCDRTDMDFDEYFNKDSQTELYHFIGKDIVYFHSLFWPAMLEGAGYRTPTAVNAHGFLTVNGEKMSKSRGTFIKAETYLTHLDPEYLRYYFASKLSANVEDINLDLEDFMQKVNSDLVGKVVNIASRSAGFIHKNHDGKLSDELTEPKLIDEIICAGDEIAAAYEAREFAKVTRLIMACADKANEYIDTQKPWALNKAGKFDEVQKVCTVSLNIFHKLIIYLAPILPKLSEQAREFLNIDSLEFDTRHRHLLSHHINPFTPLMQRIDKDKVNAMIHDSKENLTQTSGTDNTKKTVLDDTDTAKSAYIGIDEFAKVTMKVAHVVKCQSVEGADKLLQFTLDVGEEHTRNVFSGIAKFYQPEELTDKKVICVTNLAPRKMKFGISEGMILSAEKQGVLTVITLPDTMPIGAVLA

SEQ ID NO: 63292 - protein, 1240 aa, Moraxella catarrhalis
MSFVHLGIRSEYAIIDSIVRIKDLVKAAVADGQDTLALADWNNMFAAVKFYKACIGAGIKPIIGAEVVVGEHSDKDAADARHSVILYAMSHHGYQNLMRLISDAYTNRPMNNHGSVEFETPVITKAALAEYSDELIAILTHRSEIAQPLLGNNPDNALPILQTWQDIFGDRLYIGIRRVKASDDKFNESAIIQAAKLGIAIIAHNDVRFIHASPTETNDKNNTVSTDFDAHEARVCIANGYTLADDRRPREYTELQYFKSQKQMAELFADLPQAIKNTRLLASRCNITITLGINVLPDFPIPKGETIETFFKKVSADGLNRRLEKLYPVDQRDDDWDKVRKPYDERLDYELDIILKMGFPGYFLIVMDFIRWAKANGVPVGPGRGSGAGSLVAYSLNITDLDPLSYDLLFERFLNPERVSMPDFDIDFCIEGRDRVIDYVAQTYGRQAVSQIITFGTMAARAVVRDVTRVQGKPFGLGDRISKMIPKTPGIKLEDAFDQEPQLKELLTNPDAPDHELALEIWEMAKKLEGLTRNVGKHAGGVLIAPNRISDFSAIYCDGEGHPVSQYDKDDVEAVGLVKFDFLGLRNLTVLQAAVDNINQTRQAQGQSSIDLETLPLDDTDVYTSVLQEAKTSAVFQLESSGMKKYLAQLKPSNIEDIIAMCALYRPGPLESGMVSDFIDRKHGIQEVAYPHPQFQHELLQPPLESTYGVIVYQEQVMQIAQVLAGYTLGGADMLRRAMGKKKPEEMAKQRSTFVDGAIEQNIDGGLAAQIFDLVEKFAGYGFNKSHSAAYGVLAYQTAYLKHYYPAEFMAAVLTSEMDDTDQVVFLLSDCRDNFGLTIIPPSVNHSQWKFVVRDAKTIVYGLGAVKGVGEEAVNSIVAARKDGAFKDLYDFCNRVDIKKVGKRSLEALIKAGCFDILAETLKPHYITDHSDCSYQIRRGLWRQLPEAMAAADQNRQNQLIGTMDLFTDVDDSLFVAPPLEDVYWQPQDRLRYEQATLGLYLTGHPLDEYRSELPLYTTVKSVVDLKDTAKGFAWIAGLIYDVAFFGERIVVKLDDGKGRIEMSCYGETFNQFKEVLTAGKRVLGIDEEYKPLYTKGERANMTIANIVIAKISVRENDDGRIFTRLHHIESIENARIRRLKEIHLKLACDDTQALEGILSVIKENSPPPELIKRGSHPTSEHDDIDISQVGDLCVPLSLYLYDECSVARIQTNDRLRLYPSDHNIAQLKNHITDDHLVFR

SEQ ID NO: 63293 - protein, 490 aa, Moraxella catarrhalis
VRTRIAPSPTGFPHVGTAYIALFNLVFAKSMGGEFILRIEDTDQVRSTKQSEQMILDALKWAGLSWAEGPDVGGPHAPYRQSERADIYKKYAEQLLDDGHAFRCFCTPEELDAMREAQMAAGLPVKYDGRYANLSREESDALVAQGKPFVIRMRVPSSGVCTIKDMLRGEVVIPWEQVDMQVLLKTDGLPTYHLANVVDDHLMQITHVLRGEEWLPSAPKHQLLYEYFGWQMPELCHMPLLRNPDKSKLSKRKNPTSITYYRDAGILPEALINYLGRMGYSLPNEQEKFTLDEMIQSFDIQRISLGGPVFDIEKLYWLNGEYLRTLSVDDLKNKILAWASDDTKLTAIARAIQPRINLLSDAINWAGFYFQNLPAITAEDFAHKSLDNEQILEILYLATWQLENLPIWSEENIYQTLKGLAAHFDIKLKDFMQPFFVAIAGSTSSTPVMNSMYIIGADMTLARLRHACEILGGLGKKKLKKLEEKNKSLP

SEQ ID NO: 63294 - protein, 274 aa, Moraxella catarrhalis
MTTNTPSILQKIIATKHQEIAAAKAIKTTNELLKSAACHMPRGFADALRAVDTTTDIGVIAEVKKASPSKGIICQDFNPVTTAQAYEKAGATCLSVLTDRDYFQGHDDYLIKARKAVRLPVLRKDFMVDEYQIIESAAMGADCILLIMACLDADTALHLHQTATDLGLDVLIEIHTDDELTQALNLPKSAHNIYGINNRNLNTFQVDLENSIRLSQRLFANLGQDALVVSESGIHHATDIHRMQQNHIHHFLIGEQFMKTDNAGGALSQLLKTI

SEQ ID NO: 63295 - protein, 748 aa, Moraxella catarrhalis
MDKQYQVLARKYRPKNFSELLGQSHVAQALSNAIDTGRLHHAYLFTGTRGVGKTTIARILAKCLNCETGMTSQPCGVCDTCISIDQGRFLDLIEIDAASRTKVEDTRELLENVPYPPVQGRYKVYLIDEVHMLSTHSFNALLKTLEEPPDYVKFVFATTDPQKLPITIISRCLQFVLRPLPQACLFDHLAKVLDAEKIPFTENALWQLASTAKGSVRDALSLTDQAIAFGGGQIQTDTVLSMLGLVNRTDVLEIIETIYHDDRMAISQLITNMRDKMVDATAIFDELIDCIHQMALMQVLPDIPLDMNDEQAHQIKRLSSAISSDILQLYYEILIKSRDGIRLASTPMQALEMGILRLLAFRPLAEGQVTVLNDTPAKQPEDADNHNNMPDDIVDGLKDQACAAGEINALSTDSHFDSDKQDDLNDLASQIGTELILDQLDNDNVNTKDGQDTNQFAHTDQAQSTNIAVNLTVSEENFWVKQPQSDPPEQLQTDEDLPSDHDTLTQMATEPSLAVMSDSSDTDELTADFTEDLQSVPAVTVAALVKVDSKKKASHQADLTAHQPASHNLDQQPISHFDHINPSKPLAHLPSQPMTKAQMLEQLKPTPIELEGGWTSEKWDYWVHLAREEGHFAPDELALMSTSVMAGDIAGESRLLVAEINSQVQSSFENLHAKFLEHYPQIKLSLEPVLVDCALEVPKSRLSDRHSQVQMQAQHQLVDSPVFQTLWQGGFIIDDGTSVLNQSKLLID

SEQ ID NO: 63296 - protein, 1296 aa, Moraxella catarrhalis
MKILKLSFENINSLKGKWQIDFEDAAFYHHALFAITGPTGAGKTTILDAICLALYGETPRLSISATQNELMSIGTAFAASSVIFRANDKIYQVSWSQRRAKQKTDGNLQAVSREISLLQHADDTHGEILEEKASLVNKEVERILGMNKVQFTRSVMLVQGEFAAFLQSDATERGQILEQITGTHIYAKIGQAAFEKHKEQLNLLKNLQIKLGEVNLLNTEEYDGLIKKISEITQQKNLLETQIKLMSDRQKIANEYQTLNQEMAHYQAKLIEHQEALTNFEPNIQRMKHAHDAKNLQPLYTAFHEYHLEYNNKQDQLIILNHRLNEIQLSHQKRRQTHSELKEKFNKITDDYENLKPTLQAVRRLDQHIASLRKEHQSMIQTLEKTKQDYTSTQNLLKETQSNQSALVQDIDTIQQKIKGIDSENLKKNLKLCDNHISQYDTLIQAITHAHQQQLWRINVFSNHLHELKDKREHFKSVNLNLQSIDNQIGTINIKIIDNLNLTKKDDINVDILQKNIEDQYEKIKQQTHHLYTLERILKDYEQYARIQSDISDTNRKIINLQEEKIKIQDILETVSQNIHQASQTHKAILENYELHKQILYMKMHFDQLQDGSPCPLCGSTEHPFKLQPNHLDDEHAKQAKEKLVFCENQLNELNHTATQHTTTLHKLQMALDDHQEHLNTAQNTSNSLYHDLNALWQTIASECSLEHANTLPSRNTIGKFIKNSQDKIKNLEESYQLSSRLLHELNQLIAQKDRQMIEKENLKINGLKLRDDALVLMREIYDGKVHFCDQLLSAFYQLIQAQNTISLPNELNAIKQHVSKITTWYDNIAHHTQGDVLPEAEAFNPSPLTLKEEEFGKVQYVLSQTKQMLENQANQATALNEDYINKQTKLIHLDAQINAHTKKIQELTPVIAELEHTMANKVLEIKTQTNERITLLGDKNPDHTENNYQDKLTQIRQQLENATKNVHDDIADLHAQKATIESLNLTIKELANKLSQSKVSFEQALMASEFDTQAEFLAALILEDELIELKTAHDTLINQLSQTTISINNCQEKLDNLIKSNPNVHQFKLEDLHTELINLQQQLESVNQSIGELNAIKNSELQNRQRHTQILKDIQRQEQENAIWAKLDMLIGSADGKKYRNFVQGLTLDLVLHHANQILAKMNDRYLLTFDADSSRTLEILVTDLHQGDAVRSSKNLSGGESFIISLALALGLSQINSQNIQIESLFLDEGFGTLDETALDLALNTLFELQQSGKSIGIISHVASLKERIDTQIIVEKHAGGYSTLHGAGVKNLS

SEQ ID NO: 63297 - protein, 223 aa, Moraxella catarrhalis
MTQTAQTQTAQTSKDDPLIFDCQFQLALGRLDLSVDLQSSQPVMGLFGISGSGKTSILHTIAGLNAPKNGSIRINGQTWFDGEKKINIPIQQRRVGLVFQDAQIFPHKSVMNNLLFGYHNIDDDQRRFHPDEIIELLKLGHLTQRMPTKLSGGEKQRVALGRALLYSPNLLLLDEPLSALDSIHKQEILPFFEQIIHTTHIPMLYVSHDKSEIQQLTDEIYYL

SEQ ID NO: 63298 - protein, 191 aa, Moraxella catarrhalis
MNMISIKYRINEKSLMDNYDDILSKPIIYGVFIIESDFEFYLRDKCMIDDGLFELFKFNDDLFDWFFNLNKINIELMRDDNKYIMLGYDLDSAYIKNYILFTKNNQYLKISIIECDNQDGTLKLLSKKLPDNYRIINEMAPININIWLEEIYKKTKQFLDDITSIYKDFDNYIYIKKLNDFLKVYENNVKA

SEQ ID NO: 63299 - protein, 233 aa, Moraxella catarrhalis
MTDFCYFEMTGTDSEKFLQGQITANIADIGEQFLPTAICNLKGRVQFGIWIARTLAGFDIVMSSDMADNFIMHIKKYGAFSKITLSSANPIYPDVIDDIPTFNKTQQTDTKLWEQLSIKTGNYWLTAKTSEMYQPQELRLHQKGGVAYDKGCYLGQEIIARLYFKARPKAYLHRILGVGAIPPTGGNMGRMSIVNALATDTGFEALVIARPEDLTTVEILPLPKALQEDIGRN

SEQ ID NO: 63300 - protein, 260 aa, Moraxella catarrhalis
MNDFFSQIKTHADPNFVDKTAVYLPPEHRFSTLSHALSEYHGVDILSLTQNNDLIAGVDRQQLNQAYEQLLINKPQPHACVLVAITDEIGPRLLLTRRASNLSSHAGEVSLVGGKRDKTDRSSYEVATREAFEEVGLLRQDSTLIGFLPMQISKKGLLVRPVVVSMAPAIADSLIASEDEIQRLFWADLTYLKTTPPIDYYFERPNFGRAYLHTPAWLIDDRQIGEPEVVWGLTGRIIANFLHIGYGVCYQWYYHLQAHH

SEQ ID NO: 63301 - protein, 342 aa, Moraxella catarrhalis
MTKALSHLLKNIELTHDEMRQVMLIIMQGRCPDALMGAILIALRQKGESIDEITTCAKTMIELADTIDICNPNAVDIVGTGGDGSNLFNVSTASAFVAAAAGVTIAKHGNRGVSTSSGSSDVLSLAGVRLDINKTQTVKAINTLGIGFLFAPNHHPAMRHAVGVRRLLKVRTIFNILGPLTNPAKVSRAVVGVFSPELCEPLAYVFAKLGLTHVMVVHSQDGLDEFSLATGTHVAELKDGKVHTYLCQPEDVGIVSRTLYGLTVNDSKQSLEIIKNALGGTANDDISLKARAMIAINAGAAIYVAGHAKTHAEGVAIAKQIMTSRQALDKLNAFTNFTQHCE

SEQ ID NO: 63302 - protein, 221 aa, Moraxella catarrhalis
MVLTSHENLGDTGKKTGFWLEEFASPYYAFKDAGADITLASPAGGQPPLDPKSDEPDAQTEFTERFKQDAAAKEQLATTHKLADIKAADYDAVFYPGGHGPMWDLAVDEQSISLIQDFVKTDKPVAFVCHAPAALKNVKIDGEYFVKDKKVTGFSNSEEQAVGLLDVVPFLLEDVLKENGGKYEKVADWQSYVVEDGLLITGQNPASSEDTAKRLIQKLQA

SEQ ID NO: 63303 - protein, 88 aa, Moraxella catarrhalis
MTIQPTDAQRRIIYQARRGLKELDFYIDYYVKSHYLSADADEQQAFETLLSYEDPDLLVFFLGQETPSEAGVAALIDKMKSLRHTGTV

SEQ ID NO: 63304 - protein, 695 aa, Moraxella catarrhalis
MNIPESIIEQLNSQADLVGIIGKHTTLKAAGREYKGCCPFHGEKTPSFYVNPETNLYYCFGCHAKGNPITFLKEFERMSFIESVKFLSEQTGIELPKDDTDQKKFKYKKTVKTQGAKLPTQPSPDPSSRQNFIHHQSDTRPSPATDWVNDLSAYDTYSGLADPSHHAGQVNELYGTQAPILTQSPNAAQGDLYSLLTAVHDYYQLMLNNFTFAKQYFLDRGLSEETIQTFGLGYAPDGWQHLEQVFPQDIEGLKILGLVRESSKSNGRTFCLLRHRVIFPIRDNQGRVVGFAGRSLGDENPKYINSSESPVFQKQQILYGLYESRKQKAKNYLLVEGYMDVIALYQAGIYGAVAPMGTAANEKQIERLLRYNNQLTLCFDGDNAGQKAAWRTLEIAAPILNDGRELKFLTLPDHHDPDTYLKSHGAAVMRDAIEGAVSLSDYIYGVLASQYDLTRPESKAQAMATLRQLTELLPKGSSLKWWLNSDIYQKLKAIGREGQFSPKVELINYNRHDAADAITEIALHLIHTPILLKSDPLAFVIEHSGMAQAHLPLSNHLERQEISLPKLPNWASFKSPLLDEIIATVSTLPNEILQDDTKMVQSCAYFVIAALSDVHKSQIQRYWQRFIQSWSNQDLKAITPVFYGLICTALKDILLKQQTNSKNLILSEVYKRRLQALVHWDNIHNKSQLAEILTK

SEQ ID NO: 63305 - protein, 86 aa, Moraxella catarrhalis
MHEPRSKLILSANHMDAIICPLVMVDLDGIRLGMGGGYYDRTFAKAKNCLKIAWCYDFQVADRLPKQPWDMSVDIIITDQRLIRLK

SEQ ID NO: 63306 - protein, 305 aa, Moraxella catarrhalis
QSNLCMEIALPTAPLDNINDEKGEIALCTLSAINLGKIEKLSDIEEPAELIVRALDALLDYQDYPVIAAKKGSTNRRTLGVGVINYAYYLAKNGTRYSDAAALGLTHRTFEALQYYLLKASNKLAKEQSACPWFDQTKYSQGILPIDTYKKDLDSICTEPLHLDWESLRTNIKSYGLRNSTLSALMPSETSSQIANATNGIEPPRGLVSIKASKDGILKQVVPEIERLASQYELLWNIPDNNGYLRLVGIMQKFIDQSISANTNYDPTKFEGGKVPMKVLIQDLLTAYKFGVKTLYYHNTRDGAD

SEQ ID NO: 63307 - protein, 788 aa, Moraxella catarrhalis
MVQIRDSLPLLGGNSSSMDSATLAASLVAKQLHPDFKAQLANHKLISAVDHSSSTTNPCDINVSDIDIETWICHVAARIGKEDLPILRQACQFVQIHANKPHVTRSGAYITGIGMADILAYLFQNENALAAAMLYRTARRELVSIQTIRVNFGEDIAHLVMDALAMGRLSESIESNQRLEDYFESNQREQLSNIYSMLISTTNDVRAVLIKLAERTFAMRELSFAPPDRQKRVAREVMTIYAPLAHRLSIAQLKWELEDLAFRYLAPDEYKKIASLLAEKRSEREAYIQLVKSKLSEELERAGIQGEVSGRVKHIYSIWRKMKSKNLSFDQLYDIRALRVMVNTNAECYYTLGIVHGLWRHIPEQFDDYITNPKPNGYKSLHTAVIAEQRTLEVQIRTFDMHFEAELGKASHVNYKEGLKAKKDDYLTQKISSLRQLLGNEKADGEEDIELDIDNAERIYVFSRDGDITELPKGATVLDFAYYVHTEVGNRAQGARVNGRYVPLTHQPKTGDQIEIITRSNREPNRDWLMASLGYIHTARAKSKLRQWFNKQDRDKNIETGKALLLKEFDRLSISPNQISLSEYFTDLNVKHEDDLYVALVIGDITVTQISNLVAQKLNLTTQVPDKAKIEIKQPIRPNKYKIELEDLDNVEIHLARCCNPVHGEPIAGFITLSSGVSIHNDGCPEYLRLIEREPDRSVIAHWQESFGRYQPVVIHVEAKNTNGLLRDLVHVIDREKVNIHRAETVFNDGAISHMKFYVEVAGIAHLSRLLNKIEQQPSVLHARRATA

SEQ ID NO: 63308 - protein, 1018 aa, Moraxella catarrhalis
  MISC_FEATURE (236)..(236): X=any amino acid
  MISC_FEATURE (780)..(780): X=any amino acid
MNISAYSIKNPLVAIFYLMMILGIYGFLQMKIQQFPDIDLPGVVTTITLAGASPDQLENDVAKKVENKLANIEGVKSIRTTLQTGAVTIFTVFELEKPNDEHLDDVRSAVSEVQGQLPAAANPPIISKVSTAGFPVATYSVAVQGMSDTKLSWFVDDTITKQLSNIAGVGSVSRIGGVERQILIQPKMDMMTSLSMPINQLARQIYAKWQDASGGEAKIGNQIQTIRILGSGQRVXELNDLQITTPTGTAVRLGSLAVIEDTHADMTSLAKLDGEEVVAFSIIRSKGASETSVVAAVDDALADLQAQMTDLKIEKIVDTLHPLKKAYQATMRMLIEGCILAVIVVFIFLRDWRATFVAATALLLSIIPTFFIMYLFGFSLNMISLLALTLVIGVLVDDAIVEIENIVRHLNMGKSPMQAAIEAADEIGLAVVATTFTLIAVFLPTAFMSGVVGQFFSQFGWAAVIAIFISLLVARLLTPMMAAYILRPSIYTQKPAGKLMTAYLQMVAWTLKHRTMTVAFVSGFFITSLMLASFLPSAFIPPDEMNQTQVSIELTPDATFDDTLRIAQMAVNKVKAVKGVESVLLTVGSSHSSGDPSSMRSGSVNTAKLDVKLSDRTLRASKVDIESQINQALLTVPAARFNVGMSAGGGEAGYVFSITGADAKKLDATAHEIIRQIRVLPMVASVINNNAFPRPELSVIPDELSMADKGVTTADLVNTLRVATQGDYDNALPKLSLDTRQVPIVTRLSHEDKQSLTTLSNLYVPSSKAMPVQIKDVVSXKFTTGEASISRLDRERAIKITVLPTKDASLGDLIDRVKSTQIMQNLPEGIHLIDEGQAEDMAELFTGLILAMAVGIFCIFAVLMLLFHRFLQPLTILMALPLSVGGAFIGLIVTGSSMSMPAMIGLIYSWGIATKNSILLVDYAIIAQDEQGLSCFDVLIDACRKRAQPIIMTTIAMGAGMLPLVIGLGGVDSTFSRPMASAVIGGLITSTLLSLVVIPVFYALMDDLGNWLKKPFNK

SEQ ID NO: 63309 - protein, 349 aa, Moraxella catarrhalis
MNTPDLMELLRFAHQKNASDLHLSAQQPIMLRIDGNLLPMDITPIDTDGIMQMLRPVMDDTDYHQWQHNLEHDFVLSLDGIARFRVNVFFQAHGAAAVFRVIKTHIPSLQQLSYDEYIYDSMLKIAKLQAGLVLITGATGSGKSTTLASFIDHINQHQKKHIITIEDPIEYEHSSKLSLINQRQVGKDTRSFQNALRSALREDPDVILVGELRDLETIRLALTAAETGHLVLATLHTVNAPKSIDRIIEVFDAGEKHMIRTMLADSLKAVVAQRLLPAQGGGRVAAFEILTHTPAVAHLIRENKISQLPSVIQTSLAQGMIDLTQSLSRLAETGKITPATANEQINMLR

SEQ ID NO: 63310 - protein, 348 aa, Moraxella catarrhalis
MPKFNNLRYDKAFINDPFIIKYLNTMSNHFIFDLSTHHITAFIQNANHLDQVRQWQSKNLPNLLDIILTHSSLPEPLNKACRYAMSNGGKRVRPLLVLSTFLTLIKTGHQTDDLTKKIQMLFRAMMAVELIHSYSLIHDDLPCMDDDALRRGQPTCHIVYGEDVALLAGDALQSIAFEVLFECYDKNSADDAIAYKLAKLLSCRARRMVSGQMLDIKGENQMLSQDKLEAIHRDKTGALIEAAVMMGAICADVQTDTLGYLKHYARAIGLAFQVQDDVLDITADTITLGKPAGSDEKLEKSTYVKLLGVKGAQEYANQLFEEARSQVKYWGDNNLLLQITDWLQTRKF

SEQ ID NO: 63311 - protein, 382 aa, Moraxella catarrhalis
MAQDKIAIRGARTHNLKNIDVDIPRDKFVVITGLSGSGKSSLAFDTLYAESQRRYVESLSAYARQFLSQMQKPEVDSIDGLSPAIAIEQKSTNHNPRSTVGTITEVYDYLRLLFARVGVPYCPEHDEPMVAQTVSEMVDGIMSLPTETKLMILAPVVRERKGEHIALLEQLPSQGFTRVRIDGVIYETDELPSLEKNKKHSIEVVVDRFKVRDDLGNRVAESLEVALKLGNDIAILYHMDGNPVGDDEQILSAKHSCPVCDRAVSELEPRLFSFNNPAGACPACDGLGKRQYFAAERIVTHPEKSLNQGAIHGWDKRHAYYFGLLSTVCRHFGIDMDMPWQDLSNKHQAIILNGSGRQKIEFNFTDERGRKTTKNTPFEGIL

SEQ ID NO: 63312 - protein, 347 aa, Moraxella catarrhalis
MSCHHQHKQTPKHAISIKHMPSLTDTHKQSSQAEPKSFEWAFLHPKYWGVWLAFALILPLIFLPLRWQFWIGKRLGILVHYLAKSRVQDTLTNLQLTFPNQPKSKHKATARQVFINQGIGIFESLCAWFRPNVFKRTFSISGLQHLIDAQKQNKAVILLGGHRTTLDLGGRLCTQFFAADCVYRPQNNPLLEWFIYNARRCIFDEQISNRDMKKLITRLKQGRIIWYSPDQDFGLEHGVMATFFGVPAATITAQRRLIKLGDKANPPVIIMMDMLRQTPDYIAKGHRPHYHISLSAVLKNYPSDDETADAERINRLIEQNIQKDLTQWMWFHRRFKTQADDTNYYQH

SEQ ID NO: 63313 - protein, 154 aa, Moraxella catarrhalis
MAKKPSNQICANKKARHEYFIEETYEAGLVLEGWEVKSIRAGKMSITESYVIFKNNEAFLFGAHIQPLLTSSTHINPDNIRTRKLLLNRREIDKLYGMVNQKGYAVVALSCYWKHGRVKCEIALAKGKKLHDKRATLKERDFARDKQRGFKNQL

SEQ ID NO: 63314 - protein, 517 aa, Moraxella catarrhalis
MPKNTTIKHVEALGSTLDDPETLLNKHRQIAESFEAKLAKEAVFDENFNNLADAHLSLSDYLTAVKMVIDDSFDHEVWVRAEIRAMNTKGGHYYFELAETDDADQITASCRATLWRFRAKTVMSKFTKMTGQSLQAGILVLVKCSASFHANYGFSLNISDIDPNYTLGEIAAAYTQMKKRLSEEGLLHLNKKHAIPFDIRHVIVIAPEKAAGLGDFRAEADRLALAGACQFHYHYATFQGNHAPNEIRLAISEGMNNFKNTYDTLPDLLVIIRGGGAVGDLAYLNDFELAALVAECPIPVWVGIGHERDSVILDEVAHSSFDTPSKAILGIESHLVKMTRQAVATMERLTKMTNTHLTMAQANSQRQIEKIQRSSLHAVNMAKKDNLYQLSHIKSTAKFRHHQEKSALTALLAQTQKSSLAIISQAKHTTKIHLDQHNILFDYLSKLKKDCRHLQSLILIQHPSRMLKKGYTLIHNAQTNESIHSTKTLQQNQSVKITFKDGTVSAVIKDISTHKNT

SEQ ID NO: 63315 - protein, 448 aa, Moraxella catarrhalis
MKNNIKKLHNHQLSSRAKVILVIEEILNGKSLSELLDPLLESTEMSSRGFVHELLLGTLRQWWALSRISESLIENPVTDQGVQAAINIGLYQLIYMNIPEYAAINDTVEALKQLGKEYGTGLVNAILRKTQKSKTKFTKKVNKNHSLPNWLAKQLKQDWGEYYDELGCTLRFAAPIFLRVNTKFSDNVSYCQILDEHHIQHSLVSLGYNQAQAVRLDGGVRIGELPYFDEGWVSVQDAHAQLAGFLLAPTLQSQGSHQSVLDMCCAPGGKTTHLLEMFHMKHLTAIDSDRIRLKRVHENISRLKLDTKDISVVHADGTSWRSDQCFDVILLDAPCTATGVLRRHPDIGLLRQEQDIATTVNLQRSILDNLWSRLKVGGVLLYVTCSILKAENERQIIDFLRANDDANAIPFDLSLPHQIKQQVGYQCLPLDTKGGDGFYYALLTKTAK

SEQ ID NO: 63316 - protein, 716 aa, Moraxella catarrhalis
MPLPFLKQRLTKIIPTKALSTNPQAPIPNSNYPHLFEPLDLGFTTLKNRVVMGSMHTGLEDRFYHYGKLATYFEARAKGGVGLIITGGIAPNRTGWLIPAGGTLNRLGDIVHHARITRAVHKHGAKILLQILHSGRYGYHPFVVAPSPIKSPISPFKPRQMSQNNIQSTIDDYAHTAKLAKKAGYDGVEIMGSEGYLINQFLSARTNKRTDSYGGSLENRMRFAIEVVRAVRKAAGMDFIITFRLSMIELVEDGATMQDVITLAKALELAGVSIINTGIGWHEARIPTIVTSVPRAAFTRYTAAVKHAINIPVIAANRINMPQTAEEILSSGQADLVQMARPFLADSDWVNKAASNQDHLINTCIGCNQACLDHTFANQRASCLVNPLACFESEISVKPTKKPKKIIIVGAGVAGLSAAVTAASRGHQVTIYEQHTHIGGQFNMAKVIPGKEEFFETIRYFREQIKHLNITVHLNTKVDKAILNQSRADHVIIATGVVPRMLPSLEGANLPQVISYSDLLTGKKIAGERVAVLGAGGIGFDVAEFLTHGSSVSDAVNDATYKPKAMDVDTFFTHWGVDQQACYQTKGALVEPNYTTPVRQVYLLQRSEGKLGKTLNKTTGWVHKAAIKQAGVIQIAGASYDKVTNEGLWITIDGKSQLLRVDTVVLCIGQESVNDLMPKLGDTPKADYQVIGGAKSSAQLDAKRAIKEGFELAARL

SEQ ID NO: 63317 - protein, 239 aa, Moraxella catarrhalis
MQLPQVALGIIPIEVRKLIDEVGIDYLLTMNGQYNEFAGKKLFDFPLQYQQVKKILEVFEHHNIATAFMTRAEIFCFNQNHNLKTALGALDITPQPANKETFDFHQPIYQILAFYEDHEAEKIILPPDIKTTRWHRYAVDVLDYQSSKARSIARLLNQLNISKSGAVAFGDDLNDMEMFKLVGAAIAMGNAHPMLKQHAHIICPRHDQDGIEKNFKSAKLDLINPQTKPPFASAKRGLK

SEQ ID NO: 63318 - protein, 305 aa, Moraxella catarrhalis
MTFLSVRLVMAVFHCLSDKQQGYLFTFITMCIWGAFGLMARMNAYWHIQIWDVLLLRFGIAAAVLLPILWWKKDYQFLFDFKLLILALVGSIGYCIFVYNGFFYAPVAHGVVFLNGTFPLFAALIGYIMLRSPIDRQTGIGLSIIVMTLLLMTISIIIGDGYFGRGDLMFITSGLCWGLFSVLLRKWSFSAWHIMCGVAIWSAVIYSLIYAIFITPAFHTATPTHLAIQGIFHGIFVVIIATLTYAEAVAKIGIFKAGSIANLAPFIASIIAVPLLGEMLNTTLVMGLIGMAIGALQPWRWFIGR

SEQ ID NO: 63319 - protein, 476 aa, Moraxella catarrhalis
MNKNTNKKFRIFLAKLNYKLYSNTLQTLLMVCFIVFVSVALSISLFWRSLYLPELRNHASYLSTEIKLLTSVGDKWHDNPEFMQWLTDNTHIEIITNPQDFPSITDKPVVVYLTQIMAEEISQSLGREVEVYFKFKPTPKLWIHDSAHPDIWIREPMMYYSQYSTGVIYGFLFGLPLLTIMTILVLVRGLNRPLKKLERAANNYILHGHATTLPTQTGPNEIRKANTAFNRLFTTLNQAQKERTIMLAGISHDLRTPLTRMRLTAEMLPDEFFREGLVYDIEDMDAILEQFISFMKDGSDEPVKPTNLDAIFKEILVQFDGIQFIYNSTITQPVPVRTLSIKRLIVNLVNNAIRYGEQPIHLIAKIIPPAQNTQNDHIFDHYPTLVLCVKDEGEGVAEDQLERIMQPFERGESARTTQGSGLGLAIVSRIAHLHQGVVEAINHPNGGLQVCIKIPLMTQINDTPNDDFDTTSTNLA

SEQ ID NO: 63320 - protein, 269 aa, Moraxella catarrhalis
MDKNGNPFTVAAGENGKAVLHANGKVYSDFDSRRVDQHWFDCDVFDCDSPVDAYEANYGRFVRTTKVNLDRRKTDPNTNKTYATTSQYSHKILMPFPSSQGYLENLYSDRDLNTNTKQMNLDFKKWLDKGSVSHHMTYGASYETTEKSMVNKSGYNAWSSTWWSDKTLGWDFSEKLRTCDNSSTFNGLLCPRHTTFSFLIPVKTKDGSVYLNDSVLIGDRVRLGLGYRYNRIKYQPNYIPGQTAKIPDDLVKGLFIPLPSNDVGEEPKW

SEQ ID NO: 63321 - protein, 59 aa, Moraxella catarrhalis
MKKMKVTQVKSSAHRLASHKACLKGLGLRRIGHTVEVEDTPSTRGMVNRVHYMVKVEEA

SEQ ID NO: 63322 - protein, 1794 aa, Moraxella catarrhalis
MNRFCYRVIFNKNLGRLVVVSEITKAQGKSGNLGGGLGKKPTWLSISLMTKLAPLTIACWLGCSGSAFANVISDSQAPVFQRPIIAAAKNDRQQTVALVQIQTPVQGISHNKYTQFDVPNQGIVLNNARTGAGTQLVGAVAANPFLKQGEAHTIVNEVRSSKASQLAGSIEVAGQKANLVIANPSGITVTGAGFINVHEATLSTGQAINKQGHIHHTVNKGAIVIQTPKSANVATQTTTNNIGLGGPNKNADLVNLYSKTANINAQVQAEYAITTVTGTNQISDVGQVTPITSNQTTTNTTKPTTAIDIKSLGGMTAGSISLVGTDKGFGVNQAGSLNAKQAITITADGKITHSGQSSVQQGVVSLKSNTAVGLNGSTSNKTTIWASKDIAMSAPTIMANHASLNSASNITLQAKQELGTNNTTIHAGKKIEAIVFDNPTPKNTNGTASFTNTTFTTQGALTTANLQGNLTHNQSIIDAAGNVSSFAKGQQTLDHTNITSQANIQIQANSDLIVNNSQINSAKHTTIYVQGNQTTTNSTLIAKGIVSDVVKGDHRINGNGTYQGGAVLLDSTSLTLNGRLIARTTKSPLLNSNKNAQVLNGSLSIQTDRALTLNSTNHNLAIGGDISLVSQQGKLTLQNTNPVTNGNQAHYTLNAHQGNLTLQGSEVQLQGVNLKSKNNLTVYATQGSVVMDGVKREFSNKNQSGSDQKRALEAKLDEAARLSLTTRADAFTNTKSRIENQLGILNSNSTGFIHTPTTLVSQAGDIGVYAKQGILSQGALLNAVSGNITLEAQGVLPFAYQQTTKSSQSGSSNQSDAETQTDKAASIILTGSQNRYEIGQDGNDHHRLLSFGSPSMLTAGRDIDIRATKAATDKQDETPTLVLQGTKAKANGAIDIRANHHLLLDVGIDFEYSYDKTTRKHGRWYRRKYTTTETTNEWVDADVVELTAGDLRLQTTGNDSNNGQKHHLDIYGAELNTTGNITLGASGNINLYATKDTHTTQQNNQTKKKFLGIKTGTSNSKYNFSQIAAVPASLSAQFISSRSKGDTLLEGTRFEYLKGAQISAGGKIRLLAALSELQTATQREDNWVVWQRTQGEGQHTQTAQLPSFTGTAAPMFEAQGGLNIQIPISEKDVQKRQLKDEIITLASQPQYSYLNDLVNRNDVDWQQIILTDKDWDYKQQGLTPAGAAIVAIAVAYATGGLGSELSASIVSATNSTALGAAGKAALISISQKASISLINNQGNLKAVFKELGDDSTVKGVVTSAVTAGLLEKIGGTDWAKDLGKNTQNGFDDKLFKSIIDSTASALVQTGIQGGSLGNNLEYALKLGLATALQSEAANHIKGLEDTDWILHKIAHAAAGCAAGALQKDCESGAIGAAVGEVVAGQLSRSYYQNIDGDTILILTDEQRNSIIKQSQLAASVIAAYSGYDAQIAANTAETSVENNAIWAAIPVVIYVVDKVYTAYQVYQDIKALTDGKTSVDKLAKEKGESYIMQAIAGNIGKYGYKIIKSGGKRVVQAVQSKTVNHACTVYCFTAGTLIHTIHGLKPIETIEHGDLIWSRQEFGTEYGYRPVIATKVTPNQEIYEVVVKHSNNSTETFKTTKEHPFWVEGIGWLKASLLEQGMTLLDKHGNPNITIVSQSKLDHTDTVYNFEVQDFHTYHIGEYGVWVHNADCCGVDVKTSPLPVAGAKRSDKVNEIYKSNPKHTLGQTGNRPNAGIEPKNSFELFENSFQSGNKRYSIDSDGNIHQFANSNDGTWHWAGRTGKDQAVDQRLKGNNIPQDVIKHFNLNPKKVKKL

SEQ ID NO: 63323 - protein, 304 aa, Moraxella catarrhalis
MQGIITLLLILSPMFVGFALPTSQKLAAFGGQALTYLIYLILIVIGIELGLVDDLVQKVGDIIKYLVVLITLTIGFGAISLVFFDKFTQKNQLSKHTLPSQKPKISLRGSLAQLICLAIGFMAAKFLPAGFIPPEKTTTILLMALLFLVGVSLKGSGIGLKQALVNKTGLQVSVIFIFCTTLSGIIFASIFHEVTLMQGLALASGYGWYSLSGTIMTDAYGAVWGSVALLNDLAREVIALIFIPWVMRYSTSVAVSLGGVTSLDFTLPTILQAGGTQIMPIAISFGFIVNIVSPVLMVLFSSFG

SEQ ID NO: 63324 - protein, 346 aa, Moraxella catarrhalis
MKILISKEEIARLFELPLMDLLMQAQTVHREHFNANEVQISTLLSIKTGNCPEDCGYCSQSGHYRDKTGLTAEKRLEIKKVLTAARRAKSQGSSRFCMGAAWKHPSEKDMPYLVDLISEVKAMGLETCMTLGMLKPEQAKTLADAGLDYYNHNLDTSRNYYDTVTSTRTYDERLATISHVRDAGINVCSGSIVGMGESREDRIDWVYELTQMPIPPQSIPVNLLVPIAGTPLGDKVIAEGRLSVIEWIRTIAVTRICCPTSYVRLSAGRESLSDGEQALAFMAGANSFFYGDKLLTTGNQSTSHDDRLMAELGLTPSKPAPKPKIIDAMSGAVMTAEMPHNCPLSA

SEQ ID NO: 63325 - protein, 563 aa, Moraxella catarrhalis
MPKAKTDATDSTQTSFHTADTTTGQMTFAIIQTNFWVGDIAGNVKKMHALTLDAKARGADIVIFPELALVGYPPEDLLLRPTLGERVREAMAKLAEIEGIVVILGYPHIDHHGTFNSAAILQDGSQKGFYHKQCLPNYGIFDEQRYFQKGLNQVLFDYKGVTIGLLICEDIWHDEPIYMLKQAGADLVIVINASPFEIGKQTARKSLLTRHSSTHHLPIIYVNTVGAQDDIVFDGGSLITQSDGRVAHEGVRFLNQLLMARFDTQNKTFDTQAKAPLVLSEESEMYQALVVGLRDYVNRSGFKGVIVGLSGGIDSALTLCIAVDALGSDRVYAVMMPYEYTAQISLEDAEAQAARLNVSYTVCPIHDAVAGLRSALAPLLANSEPDVTEENLQARARGTILMALSNKFGHMVISTGNKSENAVGYSTLYGDMVGGFDVLKDVYKTDVYRLANYRNRLEDNPVIPERVITRPPSAELRPNQKDQDSLGDYETLDSILKMYIDDDLGYKAIVAAGFEPKTVEKILGMVDRAEYKRRQGAIGTKITKKSFGRERRYPLVNGWSIKG

SEQ ID NO: 63326 - protein, 1184 aa, Moraxella catarrhalis
MIDTFKPKLDLPTKANFKTTLPLLGGADLSFWLALAAKSEERLIVMIANHQNELNQLDTELSFFGIDAHVFPDWEILAYDQLSVHQDIISERIALLTRMPTTGVLLVSTQTLMQRIAPPSWLIGQHFDLAVGDKFDIHEQRLRLTKAGYVQTENVFEPGEFAVRGSIVDIFAVGQSLPFRLDLFDDNIETIKFFDPDSQRTLSDNDLAQLKKDAQAGMNTHHAQKLPSSAKITEFRLLPAREFPLEAGKEMFRQNFASLFPNASARKIEFYNDVMAAIAPQGIEFYAPLFFELDAWMKTGNLFSYLPDDTLVVSHDNLSACHDEYYQQIQARHHSRAHDKSLPIMPPDYLFLANNEFHQVLKAYPRVVINTNNDTAKIGAMESLPPPILPINHQAAKPLSELLSFIKSGQVPILLVAESAGRREIILELLKDKVAVKVVDNYQEFINNLDDFKTDCIALSVAPIERGLWLRDETGGLCIISETQIFGRQVLQTRRRRQSSVSQAFLIKSVTELTEGALVVHLEHGIGRYQGLVVLDVGEGEQEFIHLKYADDASIYVPITNLALIGRYSGSDLQTVSLSKIGSGKWEKAKLKALEQIHDVAAELLNVQARRNAKSGISFDIDMSQYELFASQFAFEETIDQAEAIHAVMHDMKQSKPMDRLICGDVGFGKTEVAMRAAFIAVQAGYQVAVLVPTTLLAGQHEDSFLNRFADWPIKIESLSRFGNKKHQDAILAGLADGTVDIVIGTHKLIQDDVKFKQLGLMIIDEEHRFGVRHKERIKALQTNIDSLSMTATPIPRTLNMALSGMQDISIIATPPARRLAIKTFLLPKSDETIKEAILREILRGGQVYYLHNDVASIEAAADTLRELVGEARVAVAHGQMNERELSVVMNDFYHKKFNVLVASTIIETGIDVPNANTIIIHRADKFGIAQLHQLRGRVGRSHHQAYCYLMVPSLKGLSSDAKKRLNAITRANTLGAGFMLASEDLEIRGAGEILGKEQSGNMQTIGFGLYMDMLERATNAIKQGKTPSLATPLDLVSDIDIHASALIPDEYLGDVHERLVFYKRISSLDDVNQLIDIRTEMIDRFGTLPTQTQNLFAVHRIRIRAKALGITKIDATQTTISIEFRADTPIDGLAIIKLIQSNDGYRMNGATAIRYTSQELMDTQARIDKVNELLLYFESTKTA

SEQ ID NO: 63327 - protein, 878 aa, Moraxella catarrhalis
MSQISLEDYNFSAIEKQLQTQWESDKRYHTNNETTDKPTRYMLSMFPYPSGKLHMGHVRNYAITDVLSRYYRQKGYEVMQPMGWDAFGLPAENAAIANAVAPAKWTFDNIANMREQLKALGLSIDWSREFATCTPEYYRWEQWLFLQLYKKGLVYKKLATVNWDPVDNTVLANEQVVDGRGWRSGAIVEKRDIPMYYFKITDYADELLDDLKTLEGHWPKQVLSMQQNWIGRSQGMELDFTYSIDDHDAVLRVFTTRPDTIMGVSYLAVAAEHPLAQHAAKQNPAIAEFCAECKQGSVAEADIAKAEKVGINTGLTAKHPITGTDVPVWVANYVLMSYGSGAVMAVPAHDERDFEFANKYNLPIPQVIDFKDKPSNYSTNQWQDWYSDKTGFCINSGILDGLSYHDAVTKVNEIITEKGLGQTTTQYRLRDWGVSRQRYWGCPIPMVNCEYCGTVPVDEADLPVVLPTDVIPDGRGNPLKNMPEFLQTTCPKCGQPAERETDTFDTFVESSWYAQRFVSPHDDSQMIERTAADKWLPVDQYVGGVEHAVLHLLYARFFHKVMRDEGLVSKDEPFANLLAQGMVLAGTYYRSNNDGSTTYYFPHEIDFVMNGTEIEGATLKADGKPVTIGKIEKMSKSKNNGVDPQEIIEQYGADTVRLYTLFTAPADQTLEWSDSALKGPHNFIKKVWRTVGEHLSAIQNHQSNDLTIHKDTLSKDAKNLRRKTHETIAKIDVSLGEHLALNTPVSSLMELCNEIASFKPTDNNDIAARHEAIVALLTLLSLYAPHVGEYLLEALKIDARTQAFPVLDKSALINDTITMVVQVNGKVRGKMEVASGTDQAELIREAKNIESVSKYLIGDIKKEIVVPNKLISFVVAGA

SEQ ID NO: 63328 - protein, 417 aa, Moraxella catarrhalis
MNTTNQPSNSQAYIDREEQYGAHNYHPLPVVLSRGEGVHVWDVEGKQYYDFLSAYSAVNQGHCHPKIITTLTEQAKTLTLTSRAFHSDKLGEFEAFACDYFGYDKLLPMNTGAEAVETAIKICRKWAYEKKGIDENQAKIIVCENNFHGRTTTIISFSNDENARKNFGPYTQGFIKVEYDNLQALEQVLTDNKDVAGFLVEPIQGEAGVYVPSEGYLAKAKALCDKHNVLFLGDEIQTGIARTGKLLALDHENVRPDILILGKAVSGGVYPVSVVMADDDIMNVIRPGQHGSTYGGNPLGAAVAKTALEVVRDDNLADNADKLGHIFREEMQKLVDKHELLTLVRGKGLLNAVVINDTEDSSTAWDLCLALKENGLLAKPTHGNIIRFAPPLVMTETQLRECVDIIAKTVAKFEADR

SEQ ID NO: 63329 - protein, 547 aa, Moraxella catarrhalis
MQKILRILIIIAMLITAYLLILAWRDDYARKPVVTQPVATQTTHADVPTTQVVGDIPSLTAGSVADLADTDLITVSTDRYEIKINPVGGDIVYAALKQHNATKDSTEPFVLLETDLRTYVAQSGLIGRDGIDTAEGRAVYHSPRSSYVLNPSAGSLQVPLTYHKDGLTITKTYTFNAGKYPINLSYNINNNSNQPWQGQMYAQLKRDSSKDPGLEDKGMLGMSTYLGGAWGVPSDPYNKLKFSNFDDNINISSKDGWVAIVQHYFVSAWTPSNSFEADFFARTTGKDFYIGYNSPVINVASGKQITLNSTLYAGPKVQSEMASVAEGLNQTVDYGLLWPISKVLFAILDNINKVIGNWGWSIIVLTLIIKVALFWLSNKSYMSMAKMRAIAPKLQALKDKHGDDRMAMSQEMMQLYRDEKVNPMAGCLPILIQMPIFLGLYWMLVESVELRHAPWIGWIADLSAMDPWFILPIFMGITMFVQQMLNPQPTDPMQAKMMKILPMIFVVFMLWFPAGLVLYWTVNNLFSMTHQHLVNKRVERQMKAKQA

SEQ ID NO: 63330 - protein, 621 aa, Moraxella catarrhalis
MLHNLTFGLFSKKDTASFMQLMVYVKPYKMRIVFALLAIIGVAFTESYLAAFIAPLVNQGFVLPDGTDMPMLIGDGILAQLKYYVDSFQHAIWGTKHKVWVVPLFFMGLVIFRGICRFISAYLMAWVATTAIGHLRQDMFDKMLLLPSEQYQSMSSGEMLMNMVQMVENSINHASGVFIVLTRDTLIVIGLVCVLFYLNWQLALLIMVMFPILSGLSRYYRNRLKGVINNAQKSIGSLNTVINETHQGHRVIKLFGGQQHSANKFNQVNTLIVQLGKKISQADAARSPISEVVGSTALAVVIFFALWQSQQGMTTIGEFMAFIVAMMQMFGPIKNLANISIPMQTMFLAADSVCAFLDTKSETDQGTTKLSNVQGYIHFNHISVQYGNETTKALDDFNLNIRPGEKIAFVGRSGSGKTTAINLLPRFINPVAGEILLDNINIQEVNLANLRSQFALVSQEIFLFDDTLFENVRYSRPAATEMEVMAALQAANLSELVHKHPKGIHQPIGTNGSLLSGGQRQRVSIARAILKDAPILLLDEATSALDNESERLVQQALERLMTGRTSIIVAHRLSTIEQADRIIVMDGGKIIEEGSHTELLAKGGYYAMLHNTSNAICGQSI

SEQ ID NO: 63331 - protein, 175 aa, Moraxella catarrhalis
MTIPNPQNDQFDINETGYKTSHTAVRKARRFAVQGLYEWLMTDYRFAKQRRDLLGGNEPHTIAARTRADNAMHTVHLGYYHELMRNIPAQIDELESLIVSQLDRELSKLDIIEHAILLIGTYELKHSLHIPYKVVLDEAMKLNVHFGATDAHKLINAVMDKIAKNVRQPEVQADK

SEQ ID NO: 63332 - protein, 229 aa, Moraxella catarrhalis
MWNEIVTKFVSEMHPRMWEMVAQSTWETIYMGLAATAIAVLVGLPIGFLAFLTDKGRILENRSVFVILDVIINIGRSVPFIILLIILMPVTRFLVGTTLGTTAAIVPLSVAAIPFFARLSANALLEVPTGLTEAAKSMGATHWQVVSKYYFAESLPILINAVTLTLVSLIGYSAMAGVVGGGGLGSLAINYGEHRNMVYVKWISTIIIVAIVMIFQKAGDVLAAKVDHR

SEQ ID NO: 63333 - protein, 140 aa, Moraxella catarrhalis
MDIKKIRELLDLMEEKDLLNLEYGYDDKYISLTRNTAVQTVATTQVVSAAPSATTPAVVKPSGQLETSPMVGVFYSAPSPNDPPFVKVGQKVEAGDTLGIIEAMKIMNPLEATQSGIIEEILVKNAEVVEFGQPVIRYKA

SEQ ID NO: 63334 - protein, 522 aa, Moraxella catarrhalis
MSKKPKTTQDTDPVALIETAPQTKKSQTFEHVENDQTHPSLISPLDGQRVGLDRSNKNKIKHNYEYDAIVIGAGPAGEAAAMKLAKSGHRVAVIDPRDQVGGNCAHVGTIPSKALRQSVFNIINFRRDPLFKQNKDSYQVPLSKVLSRAREVIRHQVNTHKLFYERNQIQVIHGWGSFIDAHTLEVYINDQEPTKTITFNQAIIAVGSRPYRPEILDFDHPRVFDSDKILQMDYIARKIIIYGAGVIGCEYASIFTGLGYVVDLINNKDQLLSYLDKEISDALSHDFRQFGVRIRNHEEIDHLETHDDCVVLHLKSGKKIKADAILWCNGRSGNTDSLNLEAVGLTANSRGQLEVDKTYRTSIPHIYAVGDVIGWPSLASAAYDQGRNAAGFMVGDEDAEFVNSVPTGIYTIPEISSIGKTEAELTAEKTPYEVGQAFFKHLARSQIIGERSGVLKILFHRETLELLGIHCYGNHASEIIHIGQAVMKCGHTLEYFINTTFNYPTMAEAYRVAALNGMNRIF

SEQ ID NO: 63335 - protein, 475 aa, Moraxella catarrhalis
MVFVNDEGQILGNLGDAQYISRATALIQQSHFKGTLGKSVTDYALDDQASPAISIVGVGKLDKLADNIAKVAVATYDVIKNSQSAAILWGDTICQIHFTQFVTALIGASYRFEHHKTKPKDADTLREIVIISNKDAQTDYDKALAFAQATAAGITTARDVANEAPNVLNPSELAKKAKQLAKDYADTVSVTVLNEKDMKKLGMGCFLAVSQGSDAEGKLAVIEYYGKSKKSDKKAKLDKPFALVGKGLTFDSGGISLKPAAGMEEMKFDMGGAASILGTVRAVAEAGLEIDLVAVLACAENMPSSRSARPGDVVTAMNGTTVEILNTDAEGRLVLCDALCYVQEHYDARIIIDTATLTGACVIALGSVRSGMYSNDEDALFALQAASEYTGDLVWHMPLDDAYDEQINSKIADVQNIGGREAGSVTAACFLQRFIKEGQAWVHLDIAGPAWKSGSTNTASGRPVALLTQYLRSQA

SEQ ID NO: 63336 - protein, 160 aa, Moraxella catarrhalis
MKLRILSIGHKMPNWVQQGFEEYLKRIQPMISVEMVELPPAKRSKTPSPAEIDKYKAIEATTILNAKHPKERLWLLEVKGKMLSTEHLSDKLSVAMQDGADIALVIGGADGVSPEILQAADFKWSLSELTLPHPLVRIIVIEQLYRAMSLINHHPYHRGG

SEQ ID NO: 63337 - protein, 635 aa, Moraxella catarrhalis
MAKVIGIDLGTTNSCVAVLEGDKVKVIENAEGARTTPSIVAFKDGETLVGQAAKRQAVTNPKNTLFAIKRLIGRRFEDKEVQKDISLVPFKIVKADNGDAWVEVNDKKQAPPQISAEVLRKMKKTAEDYLGEAVTEAVVTVPAYFNDAQRQATKDAGKIAGLDVKRIINEPTAAALAYGMDKKGGDKTVAVYDLGGGTFDVSIIEIADVDGDQQFEVLATNGDTHLGGEDFDLALIDYLVEEFKKEQDVNLKGDPLAMQRLKEAAEKAKIELSSSQSTEVNLPYITADSSGPKHLVVTISRAKLESLTEDMVARTIIPCKTALEDAGLSASDIDDVILVGGQTRMPLVQQKVQEFFGKEPRKDVNPDEAVAMGAAIQGAVLSGDKKDVLLLDVTPLTLGIETMGGVMTPIIEKNTMIPTKKSQVFSTAADNQPAVSIQVYQGERKIANQNKLLGNFDLTDIPPAPRGVPQIEVTFDINADGIMNISAKDKGTGKSQSIQIKADSGLSESEIEEMIRTAEANAAEDEKFANLANARNEADGRIHAVQKALKEAGDKVTTEETTAVESAISALEAAAKEDDADDIKAKLEALDNAFLPISQKIYADAGAQGAEPQQEQAKPADDGVVDAEFTEVKDK

SEQ ID NO: 63338 - protein, 382 aa, Moraxella catarrhalis
MKFTLHHTDGGNNHARRGTVSLAHGNVQTPAFMPVGTYGTVKGMLPRDIHGIGADIILGNTFHLWLRPGMEVIRHFGGLHHFIGWDKPILTDSGGFQVFSLGAMRKISEEGVAFRSPVDGAKVFLSPETSMQIQNDLNSDIIMQFDECTPYPATHDDAKKSLELSLRWGQRCLDEHHRLGNKNALFGIIQGSMYKDLRMQSLQGLLKMPFDGYAIGGLSVGEPKEEMIKVLDYLPCAMPNDKPRYLMGVGKPADIVEAVRRGVDMFDCVMPTRNARNGHYFVTGNHDNKGVIRIKNSQYRTDDTPLDEHCDCYTCQNFSRAYLYHLHKCKEMLSAQLATIHNLRYYQRLMVDIRQAIEHHAFDEFVVQFYARWGMAVPPFNS

SEQ ID NO: 63339 - protein, 368 aa, Moraxella catarrhalis
MTTTPKPKTATTSSTTATTVPKKTTSTRTKVSTATETKPKPSKAEAIMTQTVGQLEELLEHATPEELAEFGEALKEYLPTTHVISQVRTDKSRDTQLSDNWREGGYPYKYRLSRKNYEAQKYKLQIELLKLQHHIKTTGQKLVIIFEGRDAAGKGGTIKRFMEHLNPRGARVVALEKPTEQERGQWYFQRYVQHLPTAGEIVLFDRSWYNRAVVERVMGFCTDEEYRIFMHQVPEFEKHLVESGIHLVKFWFSVSREEQRVRFASRENDPLKQWKLSPVDKASLNKWDDYTLAKEAMFFNTDTAEVPWIVIKSDCKTRARLNAMRYVLNKLTYENKDIAQIGNIDPLIVGRAGALYEMDERTDLTVST

SEQ ID NO: 63340 - protein, 280 aa, Moraxella catarrhalis
  MISC_FEATURE (72)..(72): X=any amino acid
KATLLIVHGMSEHGGRYADFARFLADNGVLVATYDQLGHGQTVKDKYELGFFDEKHPVQTLCKDVIIMRINXKTRHARSPPAQFPIISMGHSMGSFIVRTVLTHHSTRFDGVILMGTADSFGLLNRMSLVSFGLLNQLFAKQVNQKAAHLMNHVLLSQLRSPISASPFAWLSENIDAVRAFETDPLTGFAFTNNGWMTLFALMQRAMRPDWYTNMPSNYPILLISGNNDPVGNMGQDIQTLQEKLIHANCSVSVQLYPNMRHEPLHEKQAQKVFVDILAW

SEQ ID NO: 63341 - protein, 366 aa, Moraxella catarrhalis
MTAPQRTPLFDAHTEHNGKLVDFGGWELPVNYGSQIDEHHAVRTDAGMFDVSHMLVTDINGDNAKAFLQKLLANDVAKLGFVGKALYSAMLNDDGGVIDDLIVYRMNEDESAYRIISNGATREKDSAHFAKVGGAFGVTLTPRHDVAMLAIQGPNAITKLLTVKPEWTDKVNALKPFVGVDLSDDWFVAYTGYTGEDGVEVVMPADEATGFFDELIKAGVAPCGLGARDTLRMEAGMNLYGNDMTDDVSPLEAGMAWTVDLKNENRDFVGKSALIALKNDGVKMRQVGLLLAKGGVLRAGMEVITEDGFGITTSGVFSPTLNQSIAIARAPASFTGEHAKVIMRGKEMDVRVLKLPFVRHGKKQFD

SEQ ID NO: 63342 - protein, 413 aa, Moraxella catarrhalis
MSAIIAIPKTLKTIIFYGVAFGSFRMLIGGISTLYLLSKNIDLIDLGLLKSFQFGLMMIIDLPLSYIADRYSRKLSTILGILFGSFWLLTTAFASEIWQFYVAEAFNAISLSLFGGAYISYLIDIKNKQYPDLDNKTLLSYDNKYNSLGMAICAFVGASFLEPASNIIWIIAGTLLFIVSMGAFLQLPSDIYQSTHNNISDLKINTPNFSENLGRLISILKTKQEICYGLIVLSILLIYFQTILQLWQPVIKNFNTGNLGWIYGMFFSIVSLAQLLSSYAINSNIKNKYTYILICLFLSLLLMLSAITLFQHSTKGVVLIVISLFIMFFGIKFLMIEASAKFHDIIPNNHRSLLDGMAFFISRTILLIIFPAITYLIQKMGFIALPLIFSILITLYMFIGHQFKTNINNNTSV

SEQ ID NO: 63343 - protein, 159 aa, Moraxella catarrhalis
MKIEEFRSLNDDIEVVINRSEKIKGLKEKAKDNDGELSKEDKKTLSDEEKKQKSLRKQIQEKLIKFATRIPIFMYLSDYREHSLKDVITVLEPELFTRVTGLTQADFSLLVSLNVFDEAVMNDAVYKFKRYEDASLEYAGIDKKEGYVGLYNTQIKRQW

SEQ ID NO: 63344 - protein, 137 aa, Moraxella catarrhalis
MERWFEFIGNHPVLVGLLIVLIIAFFAIEGKRSGRKVPPSELGLLVNNQNARIIDIRPANKFANGHITGSQNIPFNDLKNHLAELQAIEVPVILVCDIGMQAGAAVQLINRPNFMRLEGGIQGYQSAGLPLVGTNKK

SEQ ID NO: 63345 - protein, 310 aa, Moraxella catarrhalis
MTNKPTVALIGAPTDVGAGVRGVNLGPDALRIADIDKAIEQYGFTVIDRGNLQGPANPNQPPVNGYRHFDEVVAWNKMAHDAVYDELKNGNFPILMGGDHCLGLASLTAVARHCREQGKKLRILWLDAHADFNTSEMTPSGNIHGMPVACACGFGPDELTTIGGVRGAISPKDVYQIGIRSVDAKEKYFINEKGVTVFDMRYIDENGMRHTMEQALKDLDNDTHLHISFDVDFLDPSIAPAVGTTVMGGPTYREASLCMEMIADTGLMASLDIMELNPTLDERNRTAVIMVDFIESLFGKSTLVRPDTTQ

SEQ ID NO: 63346 - protein, 639 aa, Moraxella catarrhalis
MVAITLPDGSIKQFDGNTTVMQVAQSIGAGLAKATVAGRVNGRLVDASDPITTDATVEIITPKDDAGVEIIRHSTAHLLGHAVKQLYPDVKMVIGPVIDDGFYYDIYSERPFTLGDMAKIEARMIQLINQDYDVIKKMTPRDEVIKTFLERGETYKLRLVEDMPDETHMGLYHHQEYIDMCRGPHVPNTRFLKAFKLTKMSGAYWRGDAKNEQLQRIYGTAWADKKQLKAYLQRLEEAEKRDHRKIGKALNLFHMQEQAPGMVFWHPNGWTIWQVLEQYMRKVQKDNGYLEIKTPQIVDRSLWEKSGHWDNYGEMMFTTASEKRDYAIKPMNCPCHVQVFNQGLKSYRDLPLRLAEFGSCHRNEPSGSLHGIMRVRGFTQDDAHIFCTNAQIRQEALNFIKLTLDVYKDFGFDHIQMKLSTRPEKRVGADELWDLAEQALADALDNAGLDWELQAGEGAFYGPKIEFSLQDCIGRVWQCGTLQLDFNLPERLDAEFVGESGERERPVMLHRAILGSFERFIGILIEHYAGLFPAWLAPQQVVVMNITDKQADSVGDVVSKLNAKGYRAISDLRNEKIGFKIRERTLERIPFMLILGDKEVESGTVNVRTRAGENLGSMSLDDFIAVLDKAIEKKGRLNL

SEQ ID NO: 63347 - protein, 406 aa, Moraxella catarrhalis
MSDFLPIKDQLTLIMRGVQEIYSKEDLIKKLEKNRPLRIKLGMDPTAADLHLGHTVVLNKLRHFQDLGHEVLFLIGDYTARIGDPSGRNATRPPLTEAEVKANAQTYAKQVFKILDKDKTKIVFNSDWFGKMSAGDMIQLASQITVSRMLERDDFSKRYNSQTPIAIHEFLYPLVQGYDSIALDADVELGGTDQTFNLLMGRTLQGRYDKEPQVCITMPILEGLDGVQKMSKSLGNYIGINDPAGVMYQKILSMPDTLIARYFELLSFKPMSEVNALLDDMKNGRNPQEIKRILALELIERFHDKESADNAHKSAGNRLADGELPVDLPEVSLSLNGQDKLFITQVLNQAGLAKNSAQAKDMLSRGAVKVDGQVVDGSFALEQGQTVVIQAGKKAYARVWIQSAQI

SEQ ID NO: 63348 - protein, 350 aa, Moraxella catarrhalis
MNDKRLIQQDIYYMQLAIAAAKKGIYTTRPNPAVGCVLVKDSLVIGQGYHPKAGQPHAEIFALADAKAQGFDTKGATAYVTLEPCSHTGRTPPCADALIAANLRRVVVASLDPNPKVAGNGIKKLQNAGIEVLVGVCDQQAAALNLGFLKAMRTGLPYVRLKTASSLDGRTATASGESKWITGIEAREDVQRLRAKSAAIVTGSGTIIADNPALTVRSKQLGVDLHMIPKPKVVIVDRRNRLSDLDDYQVLNHDNTLIWRNDLMSLLKTLVSQYACYDVLIEAGSELSGAFITEGLVDELIVYQAPCILGQDARPMFACQLDQLVQQYRFGLHSADIIGNDIRLIYRSLT

SEQ ID NO: 63349 - protein, 234 aa, Moraxella catarrhalis
MRLDKFLSKATELSRKDAKKVLHAGEITVNGTIIKDSSHHVDLANDEILWAGEALSVADGNRYILLYKPDGFECTLKPKEYPMVTDLIAVPEVANLRIAGRLDVDTTGALLLSDDGAWLHRVTSPKRHQPKQYQLTLADAMDKDAQAYAIKQIANGILLEGETEKTRPAVLSFIDETHAVLTLTEGKYHQVKRMMAYFGNKVIKLHRASIGHISLEGLQMGECRFLTPDEINQF

SEQ ID NO: 63350 - protein, 137 aa, Moraxella catarrhalis
MTSVLIDTSQNLATSLPKAKNFQKYHRLLIPADFKAVFDSPVKKVHTLHLLAFIGQGQGLSARLGLAITKKKLKKAVDRNQLKRLCRENFRHRQASWVAIDVVVIVKAGYPREFDIATEVTELFNKINKLYSDELSV

SEQ ID NO: 63351 - protein, 466 aa, Moraxella catarrhalis
MTTSIQQLPTIAAIASPIGQGGVGIIRLSGKDAYRIGCLMTRRSNLIPRMAYFGGFYGQEGVIDEGVIIYFKAPHSFTGEDVVELQGHGGMVLQNMLLARVFELGARQAAAGEFSYRAFENDKIDLVQAEAISDAISATSVAQATSAIRSLTGEFSQKINELLDKLVHLRLYVEASIDFPEEEDVDFLSDGIIENKLTEILSGIDRILATAKQGQLLRDGVHVVLAGKPNAGKSSLLNRLSGTERAIVTEIAGTTRDTLEETLILNGLTVHLTDTAGLRKTDDHVEKIGIKRAFDAIRQADVLMMVYDLTTETDPLALADQLFCEGVTEDVGDIIRQKLILVANKSDLLVSKPVLQVSCETKSVPKLVYVSCETGEGLDELIEILTQKVGFHPPENSLIARTRHLDALNRAKGYAIEAYEQLTIYHAGELVAESLRQSQQALGEITGQMSADELLGKIFSSFCIGK

SEQ ID NO: 63352 - protein, 425 aa, Moraxella catarrhalis
MSKKVTLTVDGTEYDMPVLESTLGRPVLDISAVAKAGLWTYDPGFMATAPVESAITFIDGEKGELLHRGYAIDDLASKAEYLEVCYALLYGDLPNAEQKQAFYQRISDHMSVHDQLRKFFEGFRRDAHPMAIMVGVVGALSAFYHNHLDISDAEHRDNTAVDLIAKVPTLAAMSYKYSIGEPFMYPRKDFSYAENFLYMMFATPGEPDYKVNPVLVKAMDKIFTLHADHEQNASTSTVRLAGSTGANPYACIAAGIVALWGPSHGGANEAVLEMLDEIGSVEHVEEFMEKVKRKEVKLMGFGHRVYRNFDPRAKVMKETCDEVLGALGINDPKLELAMKLEKIALEDPYFVERKLYPNVDFYSGIILKAIGIPTSMFTVIFALARTAGWIAHWTEMHSESFKIGRPRQRYTGETHREFVPVDKRK

SEQ ID NO: 63353 - protein, 146 aa, Moraxella catarrhalis
MGVVDIQTALKAALDVNLDLVEIVADAKPPVCKIMDYKRYLYEQKQKAKEAKKNQKQTQVREIKLRPGTEEADYQVKLRKIVEFLENKDKVKISIRFRGREMAHQEIGKAQLDRIIEDTAEIAIVEQAPKVEGRQMGMLLGPAKKK

SEQ ID NO: 63354 - protein, 262 aa, Moraxella catarrhalis
MHRLLPPTLMASFLLLSACSSGNSHAKDTSNASQPTTQTSSQSDTTLVKTLQDNLTQAGVDITVTNALPTTMPDIYWVSFENAPAMFTDKSGEYLIQGQIVKLSGDYPTDITADIQSSLAKETLAKANTDDMIIYPATSQHKASIYVFSDPTCHYCRMLHKDIKQLNAGGIEVRYLAWPRSEQDIPLTEAIWCSQDRKAALTAAKLGQTVHAKHCKNPVQEHLALGRSLGVSGTPAVFAESGRQIGGYMPAKDLIHTAIEQR

SEQ ID NO: 63355 - protein, 656 aa, Moraxella catarrhalis
MLNNRLSGFLPKSLSVRAWLAVGVIVFFATVTASTSAVLAWVSKSDAQALNSVGSIRMATYRINYLLTTNTTLPIDDHVKLDPTLSINQQLIDDMQARLNVLYAYQNMPGNKDTEIDSQTKTIQHHWLKMLKPALVNNDSTAVLVASGKYIKEVHELTKKIQVRSETRQHWQQVLQMSALGIILLTLLLGMYELRRNVLRPIHFLIDSTQHFRRGHHVPALVTGYQEFQTLSNSFNDMADTISEHQAKLNQEVLNKTRHLTQANQLLKLLYDFSNQLNQEPVTLSKLHHLLENFSKINPSFGFTLCLHDHLKLNESSTSGPLLKNDTVLVSSKDSISIHSHSVEELQTGKTDLLSSEICSTGNCDQCALKARSTTRIYPISAQNNYWGELMVHQQSEEDDTTITKELVQVLVSLVSLVFTIQKQRQQEHQLILLEERNTIARELHDSLAQSLSYLKIQLSMLGTHARQLSDAAQQNQNDTLMDHNEAMLQVLGQARSGLDAAYIQLRELLVTFRLKIESGSFDNAIEQACDEFSAKGGFNITLDNRILSQNLSANEQIDLLQIIREALSNIQRHAYAKEVTVSLYQKTHLDTEQRIYLEIGDDGVGLPKHIDEQQHHGLKIMQERTHSLGGEFDISQNTPKGTLVRIWFLPKFYEN

SEQ ID NO: 63356 - protein, 302 aa, Moraxella catarrhalis
MPELPEVETTKLSLEPLIGQTVTCVQVRHPRLRYDIAKDLDSLVGFVLTKLQRRAKYLLLDFYHAHDSRQKTLLIHLGMSGSLQQHINEPPRKHDHVLIDFADSHGKIITLHYHDPRRFGMILWVVNDDYIDQPNTYARFLAHLGPEPLSDDFDANYLIRYIMRPKSHQKPLNKPIKSLIMDQSVVVGVGNIYAAESLFLSGIHPLTPAYLVHEDKLVRLTHHIKQILARAITQGGSTLRDFTVGSGKTGYFQQTLLVYGRQGESCATCGSLLENIKISGRASVYCPNCQPYHDHNNPSSQN

SEQ ID NO: 63357 - protein, 204 aa, Moraxella catarrhalis
NTLEIVQDSRNRWYACITVKEYPKTQCGTGSVGIDLGLKDSATTSKGGKLTIKQTLKYAKELAIAQRAGKKKRVRAIYAKIKNTRQDLIHKFTTQLVKDNALIVVGDVKSRSFTNKKTKLAQSTYDAGWFELKRQLEYKCKHAGCRFEIVNEKYTTQTCSCCRQIDSNSPKGRAGLRIREWTCAKCGTRHDSDLNASRNILAVG

SEQ ID NO: 63358 - protein, 310 aa, Moraxella catarrhalis
MTIKTLSEVLAEMGESPVSADNHQIQVLDETNFYQLTTTKPPKLNRLPKNNTLKKPSQPKSLVTASSHDTAPISHTPTDKTQPPKALKNQKPKSLSKSQIGELLKHTQGGQDSIAMPKKLADSLSDVAIEPLIQTDKATNYLRWLAFYYLSRREMSQHELQKKLLAKGCEPQAVEDLLQEFAHKGYQSDERFAMMLVRESIRKGRGKNHILQVLKSAKVNLPESVDSIDQLIQQAGADSLTDGTILTCDESETVNWLKLAVEVRTRKYGDTIPTTPKDKAKQLRFLQYRGFEFWVCLEALKLSLADFQEA

SEQ ID NO: 63359 - protein, 501 aa, Moraxella catarrhalis
MKSMIDTLNGIIWSPALIYLCLAAGLFYSILTRFVQLRHFKEMIRLLFSGNQSPEGISSFQALTVSLSGRVGMGNIAGVAAAIGFGGPGAVFWMWVVAFLGAATAYTESTLAQIYKENDRGQYRGGPAYYFEKFFGGGFGKFYGILVAISFIISCGLFLPGVQSNGVVKAITGITGEGTMVNTAFGAVGTNTLVVTLVMVLILGLIIFGGIKRIARVAEFVVPLMALGYILMAVLIVLFNINQLPNIISLIVGDAFTAQAGLGAAIGWGVKRGVYSNEAGQGTGPHHAGAAEVEHPAQQGMVQAFSVYVDTLFVCSATAFMILMTGMYNIQGTLPEGQFLVQNVDAATIISGPAFTQMAVSSIFGSFGNTFVAVAVFFFSFTTIMAYYYIAEVNVAYLTRSIKTTGALFFIKLVLIFAVAYGAINNSGYIWNMGDVGVGLTAWLNIVGILAIFFMAKPAILALKDYEAQQKAGVTKFTFDPIKLGIKNATFWEERNKKEQN

SEQ ID NO: 63360 - protein, 143 aa, Moraxella catarrhalis
MTTTISAKPAEVVHDWYVVDAEGKTLGRLASEIASRLRGKHKPSYTPHVDTGDYIVVINADKIAVTGKKAQDKKYYRHTGYPGGIKETNFTKLLAHKPEDVLFKAVKGMLPKGPLGYAMIKKLKLYAGTEHPHTAQQPKALDI

SEQ ID NO: 63361 - protein, 391 aa, Moraxella catarrhalis
MSQFSDKFLGFFDKLNPRTVLLTSLSLIICISLLMIASASIPFSAARDLASLRFFWYQLAYVVIGTMIAMIVYRIPLRVYYQRTHINVVFLMWVTALGLLILTAMFGDVINGSRRWLDLGIFNLQAGEVAKAVMVFVTADYVVRRSAELRSNVFTGVRLLAWYLPVGGLLLFQPDFGTVLVLFATLIVIIFVSGAPALQYAWILFMAIVLGGIAAWLEPYRRERILSFTDAFDDIQGSDFQLARSLIAYGRGQLSGIGYGDSVQKLSHLPEAHTDFLLAITGEELGFLGVATVLFLEMLIILSIMVISLRALKCRQLRLSYTIFGFAVVIFGQVIINAGMTMGLAPTKGLTMPFFSFGGSSMVVLLIMIGFILRVDKESLEIHAQRLNDKY

SEQ ID NO: 63362 - protein, 330 aa, Moraxella catarrhalis
MSRLSHFIAPTHSSHQSDPSSPAWGYLSSWCDELRLQNYSKHTITTYQTALIQFFNFLESDNYLGGDPLACRRQDLTRFFSTRLEEEKIKPISAKLSLSAIRIFYQFLIKQGVIAVNPTTGYKIKSAPRKLPTVADELLIKQLLDQKTPEDTAKACLWIRDKAMFELMYSSGLRLSELAGLNMGDVNFDIGIVRVLGKGNKTRQVPVGKKAMIALQDYLPHRNLWQKKNCKALFISERHGTRLSTRAIQLRLKVCATMAGIELNMYPHLLRHCFASHVLSSSGDLRAIQEMLGHQNISTTQIYTHVDFGTLTKVYDHAHPRAYRTKNNHG

SEQ ID NO: 63363 - protein, 45 aa, Moraxella catarrhalis
FDKITVINKNILGWLAQLVEHLPYKQRVSGSIPLPPTICSGSSVG

SEQ ID NO: 63364 - protein, 449 aa, Moraxella catarrhalis
MNTLPLFFNLNNKTVLIVGGGDIAYRKAQLMAKAKAKLVVIAKHFEAEFLDFLQSHHHVFFQKSFEPIDLNQHTPTLVIGATDDHEVNLVIHRASKAYGVPVNIVDTPDLCDYIFPAIVDRNPIVIGVSSNGKAPVLARLIRAKIESSLPSRLGELADKAGKFRDTIKNSLPTITERRYFWESIFDRALKDETIGTLSDELNQFKNHDTRLGEVYIVGAGAGDPDLLTFKALRLMQQADIVLYDALVSNDILELCRRDSQKIFVGKKRKDHTKTQDEINQLLVDYAKQGHRVLRLKGGDPFVFGRGGEEMLACQAAHIPYQVVSGITAALAASSYAGIPLTHRGIATSVRFLTGCYQTNEPFNGLNSTYQTDETLVFYMGLHALTKIIDSLISAGLPNDLPIAIISNASLPTQQVLTGTLTDIIDKKHQSNLIAPAIIIVGHVVDLYQP

SEQ ID NO: 63365 - protein, 263 aa, Moraxella catarrhalis
MLVIFLLCLILYIGSGLYLAYALFQDTPIHRLVLGILIFAILLHGWVLTPEIITLYGLNFNLFNTLSLTSLFFVLFYVLFGLYRPILSLGILAVPMAAVGVSLGYFGQVAYKPLTDLSNTLQIHILLSFAAYCVLLMAAVQGVLLRLQIRELKRKTIHRFWVSRLPSLQSMESLLFDMVLTGFVILSIALGFGLVATYDILDQHLAHKMVFSLLSWLLYGLLIAGHYRYGWRGKRAANFAVYGFLLLAIGFVGSKAVMEFLIG

SEQ ID NO: 63366 - protein, 516 aa, Moraxella catarrhalis
MAKSRLFRSTVIVSSMTMLSRILGLIRDMVLMSVFGAGGLMDAFLVAFKIPNFLRRLFAEGAFSQAFVPVLTEYKEARTLTEVQLLIARVSGVLSLVLLVLTVAVIFLAPQVVYLFAPGFADDPQKFDTTAKLLRLTFPYLLFVSMTAFFGSILQSYGRFAAPAFAPVLLNLCMIGGTLILAPMLDKPIMALGYAVAISGILQLLIQLPQLWQQKLLIPPSISFKDEGVRRILKLMLPAIFGVSVTQINLLLSTVFASLMIAGSVSWMYAAERLSELPLGLIGVAIGTVILPSLSSSRAKSDDENFRQTLDWAARLILVIGIPASLAIFVLSDILMDALFVRGQFTHQDALMSGIALKSLSGGILGFMLIKIFAPAFFANQDTKTPVKIGIISVFANMIFSVVFIGLFYLMKLPLHGGLALATTAASFVNAGLLYAVLHRRGIYRFGTHWKKMIRQFVIANIAMVISLSVILPLYPIDANHWLKIAILLGICGFGAIIYGITLLITGFRPSQLKHG

SEQ ID NO: 63367 - protein, 643 aa, Moraxella catarrhalis
  MISC_FEATURE (635)..(635): X=any amino acid
  MISC_FEATURE (636)..(636): X=any amino acid
  MISC_FEATURE (639)..(639): X=any amino acid
LSDMVKNTLLWLAIIGIVVVIFSNLDSGKADADMMNYSAFVTAVSQGEIKDVKISGEEITGTKVNGSEFETVRPEITDNELMPLLREHNVEVQGTLPERQGIGMQLLMAAFPILLIVGLFWLIMRGMSGGGAGGGMGGRNPMSFGKSKAKMLSEDQVKVTFADVAGVEESKQEVAEIVDFLRDPSKFTKLGANIPRGVLMVGPPGTGKTLLAKAIAGEAKVPFFSISGSDFVEMFVGVGASRVRDMFEQAKKNAPCIIFIDEIDAVGRHRGSGMGGGHDEREQTLNQLLVEMDGFEGNDGVIVIAATNRVDVLDKALYAPGRFDRQVSVGLPDIKGREQILMVHLKKLPATIGVDINALARGTPGFSGAQLANLVNEAALFAARRNKDSVDMHDFEDAKDKLFMGPERKSMVLREEERRATAYHEAGHALVAELLPGTDPVHKVTIMPRGWALGVTWQLPEQDAISNYKDKMLNEISILFGGRIAEEIFVNRKSTGASNDFERATKLARAMVTRYGMSDELGVMVYEAEEHGGYFGGSTRTISEATQQKVDDEIRHILEAQYGVAYQLIDENHDKMHAMVEALMKWETIDREQLLQIMAGETPREPKNYQHIVQTPVAAEEPADDDTLPPPLPVXXPDXNHEQ

SEQ ID NO: 63368 - protein, 110 aa, Moraxella catarrhalis
MNIQALMQQAQAMQKQVEKNVEAAKASLATKEVQGEAGNGLVKVTMTGRHVVKRLAIDPSLMDDEPDMIEDLVAAAINDAVRQADELYEEVMAGATTGMGLPPSMKGLFG

SEQ ID NO: 63369 - protein, 183 aa, Moraxella catarrhalis
MSTALQAYPSHQIVYNYLILGFTMSGFCTLNIASTDLTMTVLMTPDMANFSGNVHGGTILKLLDQVAYACASRYAGGYVVTLSVDQVIFKEPIYVGELVTFLARINHVGTTSMEVGIRVEAENIQTRTARHTNSCYFSMVAVDQAGKPVPVPPLVVDDSLAKQRYEMAKKRKELRIKLQQHDW

SEQ ID NO: 63370 - protein, 215 aa, Moraxella catarrhalis
MTTSLNIHVIDHPLVRHKLSIMREKETSTYKFRTLTNELGRLMAYEASRDFEIESFSMQGWCGEITGEQIKGKTVTIVPILRAGLGMLDGVLDLLPTAKISVVGLQRDEMTLEPVPFFEKFVSDIDRRPALILDPMLATGGSMIATIDMLKKHGCTNIKALVLVAAPEGVRLVNEAHPDVKIYTAALDSHLNENGYIIPGLGDAGDKIFGTKQIG

SEQ ID NO: 63371 - protein, 377 aa, Moraxella catarrhalis
  MISC_FEATURE (209)..(209): X=any amino acid
VGLVGWRGMVGSVLMSRMVEEGDFQHITPVFFSTSNAGGQAPSFDGVDGGTLKDATDILELSRCDAIITCQGGDYTKQVHSALRDSGWHGYWIDAASSLRMQEDAIIILDPINRDVIDKALADGKKDFIGGNCTVSLMLMAIGELFRRGWVEWVSAMTYQAASGAGANNMRELIKGMGVLRDSVSDQLDDPASAILEIDRTIADTQRRXIFPSQHFGAVLAGSLIPYIDSQLDNGQSREEWKAQAETNKILGKSADETINIDGICVRIGAMRCHSQALTIKLTKDIPLAEITTALRESNNPWLDVVENDKAASPNLEGRAGLLEHPVAVTGTLNVAVGRLRKLNMGGEYLTAFTVGDQLLWGAAEPLRRMLAILQGR

SEQ ID NO: 63372 - protein, 612 aa, Moraxella catarrhalis
MCGIVGAIRTHHNVVDFLTDGLKRLEYRGYDSSGIAVQTESGIRRVRRVGRVALMEEAAKQKQIHGLTGIGHTRWATHGGVTKPNAHPHISAGLISVVHNGIIENFETERTRLQHLDYEFESQTDTEVIAHSVHQEYTTNGGDLYHAVQTACSRFHGAYAIAVIANDAPNQMVIARMGCPLLVAFGDNEVFVASDVSAVIAFTRRVTYLEDGDIALLQADGIQKLLDKDGNQVNRSIKTSEMSLASLELGPYSHFMQKEINEQPRAVSDTAEIFLEGGFVADNFGEEAPEIFAKIQSIKILACGTSYYAALTGKHYLESIAKIRCDVEIASEYRYRDVISDPDELVITISQSGETLDTMEALKYAMAQGHRYSLSICNVMESALPRTSTLAIFTRAGAEIGVASTKAFTTQLVVLFGLAVTLGILRGHVDESQAQDYAEDLRLLPGSIQHALNLEPQLASWAQSFANKPSALFLGRGIHYPIALEGALKLKELTYIHAEAYPAGELKHGPLALVDENMPVVVISPNDGLLDKVKANMQEVSARGGELFVLSDLDSDYTASEGIHIIRTPRHIGTLSPIVHTIPVQLLAYHVALVKGTDVDKPRNLAKSVTVE

SEQ ID NO: 63373 - protein, 560 aa, Moraxella catarrhalis
  MISC_FEATURE (41)..(41): X=any amino acid
DAHTPEHATGLTEQQQVIASDFMVASANPLVTQAGYDILKXGGSAADAMVAVQTTLSLVEPQSSGLGGGAFVLYWDNTAKTLTTFDGRETAPMRATPELFLDKDGQPLKFMEALVGGRSVGTPAIPKLMEIIHQRYGVWPWGKLFDTPIRLAKQGFEVSPRLAISVEQNWQHLARYPKTAAYFLPNDVPLQAGSLLKNLEFADSVQALAVQGAKSLHTGKYAQNIVSVVQNAKDNPGQLSLQDLSDYQVVERPPVCVTYRIYEVCGMSAPSSGIAVGQILGILNEFSPNQVGCDAEGLRLLGDASRLAFADRDVYLGDPDFVPVPIRQLISKDDLKHRSQLLKQSDKALPSVSAGDFIHEWVSSQAIELPSTSHISIVDKAGNVLSMTTSIENAFGSTLMANGYWLNFDGKWLLLNNELTDFSFEPIKQGKQVANHVEPGKRPRSSMAPTIVFKAGKPYMAIGSPGGSRIIGYVAKTIVGIVDWNMDIQDAISAPNLLNRFGSYELEMDTTAVQWQHALNDLGYKTDVRKLNSGVQAIIIEPSRLVGSADPRREGRVMGD

SEQ ID NO: 63374 - protein, 44 aa, Moraxella catarrhalis
MKRTFQPSVLKRKRTHGFRARMATKKGRQVLARRRAKGRHRLTV

SEQ ID NO: 63375 - protein, 264 aa, Moraxella catarrhalis
MMNTNTKPHPKTELCDAELMRYSRQILLDGWDIESQLKIKQSSVSLIGMGGLGCMVAPILVRAGVGEVHLFDFDTIDDSNLQRQLLYTQADIGLPKAQIAKQALIEQNSWAAVHSHNIALNDDTIKENLISIKSDLWIDCSDNFDIRQTLNRHSIITSTALLSLSAIGETGQVALFEPKKTGCYACLFGTSMRAAQNCATSGVLASTVAVIGALGADIALHFLGKDQNTLKDTLMVWQGSRANFQKMKFTKNPSCPICQKSIAL

SEQ ID NO: 63376 - protein, 277 aa, Moraxella catarrhalis
MPNITNNHTFNIVQLSDLHLTGDIGQAPSYQRFLAVFQTAKHLNPDLWLLTGDLVNDGNSDAYDWLFNQLQATKIPYLAVAGNHDVTHEIGIHLAHQERIHVPILPDRRLKNCFRYTFQAGHDWQILLLNSSVSGEIFGLLTHETLLWLDQTLTTHSEQTIIALHHHPTKVSSDWIDAHLLKNHQDFWCVIKKHAHVHTILCGHVHQVHTLHPLPAHQVQLLSCPSTDRQFMPFVDNFQIADTPAGCRMIQIDNKGIVSSYIQIVQNTHSFCLNNAN

SEQ ID NO: 63377 - protein, 307 aa, Moraxella catarrhalis
MSVRHFRNLLDMTPAELEAIISRASKLRQMQQCGEIYRPFVGRTLGMIFEKSSTRTRISFEAGMGQFGGHAIFLSPKDTQLGRGEPIEDSAKVISSMVDIIMIRTFEHDKLDLFCKHSSVPVINALTDDFHPCQLLADMQTFHEHRGSIKGKTVTWVGDGNNMCASYILAAHQFGFQLRVTAPYGFEPNPKLIEEYSHCVTYVEDPQEAAKGAHLITTDVWASMGQESEQMTRARRFAPYQVSPAMLDKADPDVLFMHCLPAHRGEEISFDLLNDPRSVVWDEAENRLHTQKALMEFLLKDKINLSS

SEQ ID NO: 63378 - protein, 263 aa, Moraxella catarrhalis
MQHFIVIGNPIDHSKSPQIHTAFARSVGLPVSYQKQYCPNDADSFTAVVSAFFAGGGVGANITLPFKEMAFEMIKSNGRLSTHALAAGAVNTILQDQQGLYGDNTDGRGLVADLYAQAIELDNKKIALIGAGGAARGVILPLLEAGAHISIFNRTFLKATNLVNEFQSDKLSAHSLDELKTGGKFDVIINATSATTIGQILDLGDCSANFAYDMMYGKPSEFLTHFKQQGADISDGFGMLIQQAKLSFEQWTGKTIDLSQVQF

SEQ ID NO: 63379 - protein, 466 aa, Moraxella catarrhalis
MSKKYAVVGLGSSGLSAVNFLVNHGHKVSIIDGNPNPTLADKLPTGVHCHFGSLDSELLSSADQIIISPGINPRTPSIVAAKAQGIPVISDVQLFIDTLKARDLTQATNTPIIAITGSNAKSTVTTLVGEMAKHAGMIVGVGGNIGTPALELLTIQNMDLVVLELSSFQLEHISNLAAQGATILNLSADHLDRHDGMVDYLAQKLRIFENCQTAIIYQDDANLAKQCLTTLTSVAPNHTIITTNSLLSHQTADFYLFDDGDGMALYHQKNKLLPIHQLKIKGKHNLLNALSALALGTAANLPMDAMLDTLKTFKGLPHRCEYIDDIDSKAYFNDSKGTNIGSTIAAIDGLGTVYGISSLALILGGLGKGQDFSELSAYVMQWVDSVYLIGQDAPIIEQDLLKGDAHLASKIYQVGTLDRAVLAASQSTARAVLLSPACASMDQFKNYNERGDKFVNMVHALAHAPI

SEQ ID NO: 63380 - protein, 288 aa, Moraxella catarrhalis
MYVHTPTPAQQEKQSNIRSAFFISDGTAITAETLGKSLLSQFSDVEFDIQVIPYVDTPLLAREAVQRINNAYQSSNLRPLVFDTIVSDDIREIINAADAHNLDIYEGLINRIATEINHKPNPHTGMAHSRVDSDDYKARIDAVHFALDNDDGARTNHYDGADIILIGLSRSGKTPTSLYLALQYGIRAANYPLTEEDLDTSQLPRVLKPYHHKLFGLTIDTERLVRIRQERKAGSRYASLAQCQEEQRAIQAIYSHQKIPSLNVSEMSVEEIATRILQITGLKRRIGV

SEQ ID NO: 63381 - protein, 303 aa, Moraxella catarrhalis
MLGIGDDCAISNIPSNSQLVSCVDTLVAGRHFVHETSPHAIAYKSVAVNLSDLASMGATPYAILVGLSLPKSMANDDFCQAFAGGLAAACTPFGIELIGGDTTSSPILTISVTALGFVPHGQAITRQGACVGDVVCVSGTVGLASLALHGILDDLHGDGHANRPPKSLPEKLRQAMQYPAPQVALGRQLIGFANSMIDISDGLGQDLGHILTASNVGAVIDLDAIPSDALLDALPHAQKWQHQINGGDDYQLCLTMTKANFKQFNQSYPNSIFAIGEIVAQQGLTLMNHHQKVDLTVQGWEHF

SEQ ID NO: 63382 - protein, 254 aa, Moraxella catarrhalis
MTATIKSAIKPLFIAMMVMGATSAHADLTVYAAASMTNAVEDINKLYEKKYNSKVKTSFAASSTLAKQIEQGAPADIYISANTSWMDYLAKKDKIVSSSYKNLLGNRLVMITPKNNPIKTNIKIDKSFDIGNAFTGKLCTGNTASVPVGKYAKEALTNLGWWDTIGPRLVETEDVRAALNFVNRGECQLGIVYATDAKVVKNVQVINTFPITTHTPIVYPISMVKQSREAQQYYNFLQTKEAKAVYRKYGFSVL

SEQ ID NO: 63383 - protein, 1094 aa, Moraxella catarrhalis
MTESIDYKNTLNLADTTFAMRGDLAKREPLWLEQWEKDDVYGQIRQARQGRKTYILHDGPPYANGQIHLGHVVNKVLKDIIIKYKTLDGYDAPYVPGWDCHGLPIEQKVEQKIGKVGQKVNATKFREACREYAKSQVQLQMADFKRLGVLGDWDNPYLTMNYQQEANIVRALGKIYDNGHIVRGMKPVNWCLDCGSALAEAEVEYQDKTSDAIYVGFDIVNRENLPIIANISGTLQAVIWTTTPWTLPANQAISVHGDFDYAVIKGKKTPIFALPSQIDSKNFTLRTLTKADKQALQACASDPAIWQFMPTKRHLPEVFEPFFEQAVKDKAYAIIDKRTGNIIGTTRFCHDNAKDDTIGIGFTFITPEFWGKGVNDEIKHTLLNHAFKYRNAVCFQIHEGNDRSKKAVEKLGAVYQKDVENDFGKMWVYTITNPSTINHTAHFIVANDLVADFSKNVALDDVETITTIKGADLTVLNAQHPLISERQVPIITGEHVTADSGTGLVHTAPAHGVDDYIVGNKYNLPVENPVSDAGVYLDNAKVFVGEHIYKAQPKIIETLGSSGHLLDHKKIRHSYPHCWRHKTPIIFRATPQWFISMEQNGLRQKALNDIKNITWTPAWGQNRIEAMIDGRPDWCISRQRTWGVPITFFIHKETDQLHPRTSELIEKAAQIIEKGGIEAWFDADISDFLGDESGEYYKVTDTLDVWFDSGATNFAVLNHRKELSNPADLYLEGSDQHRGWFQSSLLVSESIYGRPPYKQVLTHGFTVDAKGHKLSKSKGNTKGFEPSDIANKMGVDILRLWVGSSDYRYEMAVSKEGFDRTTDMYRRIRNTIRFLLANTDDFDPKTDMVSTDKLISLDKYILYRTKHIQQEIIQAYHSMDFHQVCQTVMGFCSQDLGGFYLDIIKDRTYTTKADGLPRRSAQTTLYHIAHALLRWIAPVLSFTAQEAWQVLKDTQGYIFTAEWYQLPDFQMNDISHEDWDKVALIKDTVNKSIEQARSDKIVSSNLTAKVTITAPQDITDILNKFGDELRFVFITSDATVRSGDTLSTTITPADGTKCVRCWHVRTDVGTHAEHPEICGRCVQNLDDGEMRLYA

SEQ ID NO: 63384 - protein, 361 aa, Moraxella catarrhalis
MKNSLLFQPAQPAHQATDCFDTVFYGNEFTLATSNSTEKLTDNFQRKLTYLRLSITDFCNFRCNYCLPNGYQGKRPNNELTQQEIATLLAGFAALGTTKVRLTGGEPSIRHDLPDLIRLIKNTEGIKTACISSNGYKLGKHLSAWHDAGLDKLNLSIDSFNPTTFHKITGYDGLPTLLRDIDKLLYSTSITLKLNGILMAHTAYDNLMAALDFVKDRPITYRFIEFMQTSDNSQLFFAEHTSSQHIKTYLIKHGWRAQMRATDGGPATEYSHPDYVGKIGLIEPYSPKFCDHCNRLRVSSQGQVHLCLFDSQNYDIRPYLTQGDTQGLIQALQALMPIKPEHHHLHSADSGMMYNLSLVGG

SEQ ID NO: 63385 - protein, 148 aa, Moraxella catarrhalis
MTLKDSLTQTIKSSMKAREMEVVKILRNVQAAIKKVEIDTQTTLDDNAVLELLQKQIKQRQESLDIYQANGRDDLAAKEKFEIEVIGQFLPAQLDEAALNDIIAATITELEANSMKDMGRVMNAVKEKTVGQADPAIISGLVKKALTA

SEQ ID NO: 63386 - protein, 276 aa, Moraxella catarrhalis
MNFGKIFGICALASGIALAGCSNQSNEPAAISDTAAQTIKVGVMAGPEQAVAEVAGQVAKEKYNLTVELVEFNDYAMPNSAVSKGELDANAMQHKPYLEKDSQEKGLNNLVIVGNTFVYPLAGYSTKIKTLNELKDGATIAVPNDPSNLARALILLEKQGLIKLKDNTNLFSTTLDIVENPKKLVIKEVDTSVAARAIDDVDLAVVNNNYAGQVGLTASENGVFVEDKDSPYVNIIVARADNKDSKAIQDFVKAYQTDEVEAEAKKQFKDGVIKGW

SEQ ID NO: 63387 - protein, 471 aa, Moraxella catarrhalis
MQYISTRGKTQPMQFSDVLLMGLAPDGGLMLPETYPSIDEATLQKWRNLSYSELAFEIMSLFVTDIPADDLKNIINKTYTKAAFGSEDITPVTRLYDRLALLELSNGPTLAFKDIAMQFLGNAFEYVLKQKNERLTVIGATSGDTGSAAEYALRGKDNIEVFMMSPEGKMSAFQRAQMYSLDDANIHNIAVEGMFDDCQDIVKALQEDAKFKAKYSLGTVNSINWGRILAQIVYYFKGYFGATTDNAQKISFCVPSGNFGNICAGHIARQMGLPIDRLIVATNENDVLNEFFNTGKYTPRTSVETYVTSSPSMDISKASNFERFVFLLLDKDSVQVAKLFGDVKSGKGFDLSDNLKLVSEKFGFIAGKSTHQDRLATIKKVYDDTQRLIDPHTADGVKVAIELQKADEMILVAETALPAKFQETIVEAVGEMTLLRPEHTQGLEDKPQYVTVVPNDTKAVAALIEQYITAC

SEQ ID NO: 63388 - protein, 361 aa, Moraxella catarrhalis
MTVQTYTPSPKPTPKKAVQGEKLRGYDKVARIPIKVIPTVETPKKPDWIRVKLSSPAEVERIKGTLRKQKLYTVCEEAACPNLPQCFGDGTATFMIMGDICTRRCPFCEVAHGRPNPLDKDEPKHTAETILGLGLKYAVITSVDRDDLKDGGAGHFVDVINESKALSPNCLIEILVPDFRGREQVALDLLTQTAPDVFNHNIETVPRLYKAFRPGSDYEHSLSLLKQYKARRPDVATKCGFMVGLGETEDEVYALLDDLKAHDVDIITIGQYLAPSKNHAPVDRYVHPDEFARYTEYGKKLGFFNIWANPMVRSSYFADRQYYGEDCPPPVRTQKSLPKRNWQRQSVAKKLGVFDCHKIGV

SEQ ID NO: 63389 - protein, 240 aa, Moraxella catarrhalis
MSEAITAPEDDLTVITTHARTKTDISHIHEFLGCRTSERWLNLACEHLPLLLQDHANCEKKAAGTAMNLIFRYEFHRTLQERLAQLVREEMLHYEQVLSLMKERNIDWYYLPAGRYAKGLLKHKRTYEPAAMVDVLIIGAFIEARSCERFGALSEVIDDEKLARYYKYLLKSESRHYEDYLMLARSITDDSIDERVAFFRDIECELIQSPDDELRFHSGTPSDTLMANGVPPIISSPNKL

SEQ ID NO: 63390 - protein, 164 aa, Moraxella catarrhalis
MTTYTEQKNAVTHIDGALHENANLRIGIAVGRFNGFLVESLVEGALDALLRHGVLGENITVVRVPGAFELPLTTKRMAVTGNYDAIVVLGAIIRGATPHFDIVASESAKGLSHVALHHDIPVINGILTTENIEQTIERAGTKAGNKGYEAAMTAIEMVSVLKAL

SEQ ID NO: 63391 - protein, 420 aa, Moraxella catarrhalis
MTTQIKSHYLGRISKINWKAFGPGILMASAAIGASHLVSSTQAGALFGWQLAIVIILANVLKYPFFRFGIDYVYDTGDSLIAGYAKKSKVYLWVYFILSVISSIITLAAVGLMSAVILTFMFPSLGLTPLTASVIVLAISWVLLIAGRYNVLDGITKIIILALAITTVAAVFIAAGKPTVMAVDFVEPSPWNLASLSFIVVVVGWMPAPLEFSVITSMWTAKKIQTDHTTHEQGRLDFNVGFATSTILAVLFLALGVYVQYGSGQEIQTAGSAYVGQLIDMYTATIGEWSRLLVAFIAFMCMFSTTLTSGDGYGRANAECWRLIKGEHEISRGQLIFWISWAVFGGFIIIAFFEGQLSNMLKFAMSSAFVSAPVFAWLNYSLVRSEQKLSSGIQALSIIGLMFLLGFALLYVANTMGVFG

SEQ ID NO: 63392 - protein, 349 aa, Moraxella catarrhalis
MDENKEKALKAALAQIEKQFGKNTIMHLGDETAKLDVDVVSTGSLGLDIALGIGGLPKGRIIEIFGPESSGKTTLTLQTIAECQKQGGTCAFIDAEHALDPIYAKKLGVNIDDLLVSQPDNGEQALEIADMLVRSGAIDLIVVDSVAALTPKAEIEGEMGDSHMGLQARLMSQALRKITGNAKRSNCMVIFINQIRMKIGVMFGSPETTTGGNALKFYASVRLDIRRIGSVKDGDEIIGSETRVKVIKNKMAPPFRQTEFQIMYGEGINRLGEVIDLGVDIGAVGKSGAWYSYGDGKIGQGKANTVKYLQENPAIASEIEAKVRESKLATVTPIVESDEPEEHLEDDNF

SEQ ID NO: 63393 - protein, 359 aa, Moraxella catarrhalis
MITLLKKTTLLATAFGIFFGLTACSNNTKTSIQNTDTTASSTEANQDPIELLNVSYDVSRDFYKAYNEVFINHYLTNYPNTKIKIKQSHGGSSKQALSVKNGLQADIVTMNQGSDIELLADAKLVDGNWRHAFPNHAIPFTSTIVFLVREGNPKGIKDWNDLATSGIDIIIANPKTSGNGRYAFLGAYGYGLNAYHNDEAQTHAFVKALLSHVKVFENGGRAATTTFAQRGIGDVLITFENEANVIKSKFGNVDIIYPSYTVNAENPIAVVKSVTDNKGTTKAATEYLNHLYSDEAQELATKFFLRPSSPDILAKHADKFPVMTTFFPNDVFGDWASIMKTYFSDGGLYDKLAVQAQNQ

SEQ ID NO: 63394 - protein, 364 aa, Mycoplasma genitalium
MNNVIISNNKIKPHHSYFLIEAKEKEINFYANNEYFSVKCNLNKNIDILEQGSLIVKGKIFNDLINGIKEEIITIQEKDQTLLVKTKKTSINLNTINVNEFPRIRFNEKNDLSEFNQFKINYSLLVKGIKKIFHSVSNNREISSKFNGVNFNGSNGKEIFLEASDTYKLSVFEIKQETEPFDFILESNLLSFINSFNPEEDKSIVFYYRKDNKDSFSTEMLISMDNFMISYTSVNEKFPEVNYFFEFEPETKIVVQKNELKDALQRIQTLAQNERTFLCDMQINSSELKIRAIVNNIGNSLEEISCLKFEGYKLNISFNPSSLLDHIESFESNEINFDFQGNSKYFLITSKSEPELKQILVPSR

SEQ ID NO: 63395 - protein, 650 aa, Mycoplasma genitalium
MEENNKANIYDSSSIKVLEGLEAVRKRPGMYIGSTGEEGLHHMIWEIVDNSIDEAMGGFASFVKLTLEDNFVTRVEDDGRGIPVDIHPKTNRSTVETVFTVLHAGGKFDNDSYKVSGGLHGVGASVVNALSSSFKVWVFRQNKKYFLSFSDGGKVIGDLVQEGNSEKEHGTIVEFVPDFSVMEKSDYKQTVIVSRLQQLAFLNKGIRIDFVDNRKQNPQSFSWKYDGGLVEYIHHLNNEKEPLFNEVIADEKTETVKAVNRDENYTVKVEVAFQYNKTYNQSIFSFCNNINTTEGGTHVEGFRNALVKIINRFAVENKFLKDSDEKINRDDVCEGLTAIISIKHPNPQYEGQTKKKLGNTEVRPLVNSVVSEIFERFMLENPQEANAIIRKTLLAQEARRRSQEARELTRRKSPFDSGSLPGKLADCTTRDPSISELYIVEGDSAGGTAKTGRDRYFQAILPLRGKILNVEKSNFEQIFNNAEISALVMAIGCGIKPDFELEKLRYSKIVIMTDADVDGAHIRTLLLTFFFRFMYPLVEQGNIFIAQPPLYKVSYSHKDLYMHTDVQLEQWKSQNPNVKFGLQRYKGLGEMDALQLWETTMDPKVRTLLKVTVEDASIADKAFSLLMGDEVPPRREFIEKNARSVKNIDI

SEQ ID NO: 63396 - protein, 836 aa, Mycoplasma genitalium
MAKQQDQVDKIRENLDNSTVKSISLANELERSFMEYAMSVIVARALPDARDGLKPVHRRVLYGAYIGGMHHDRPFKKSARIVGDVMSKFHPHGDMAIYDTMSRMAQDFSLRYLLIDGHGNFGSIDGDRPAAQRYTEARLSKLAAELLKDIDKDTVDFIANYDGEEKEPTVLPAAFPNLLANGSSGIAVGMSTSIPSHNLSELIAGLIMLIDNPQCTFQELLTVIKGPDFPTGANIIYTKGIESYFETGKGNVVIRSKVEIEQLQTRSALVVTEIPYMVNKTTLIEKIVELVKAEEISGIADIRDESSREGIRLVIEVKRDTVPEVLLNQLFKSTRLQVRFPVNMLALVKGAPVLLNMKQALEVYLDHQIDVLVRKTKFVLNKQQERYHILSGLLIAALNIDEVVAIIKKSANNQEAINTLNTKFKLDEIQAKAVLDMRLRSLSVLEVNKLQTEQKELKDSIEFCKKVLADQKLQLKIIKEELQKINDQFGDERRSEILYDISEEIDDESLIKVENVVITMSTNGYLKRIGVDAYNLQHRGGVGVKGLTTYVDDSISQLLVCSTHSDLLFFTDKGKVYRIRAHQIPYGFRTNKGIPAVNLIKIEKDERICSLLSVNNYDDGYFFFCTKNGIVKRTSLNEFINILSNGKRAISFDDNDTLYSVIKTHGNDEIFIGSTNGFVVRFHENQLRVLSRTARGVFGISLNKGEFVNGLSTSSNGSLLLSVGQNGIGKLTSIDKYRLTKRNAKGVKTLRVTDRTGPVVTTTTVFGNEDLLMISSAGKIVRTSLQELSEQGKNTSGVKLIRLKDNERLERVTIFKEELEDKEMQLEDVGSKQITQ

SEQ ID NO: 63397 - protein, 417 aa, Mycoplasma genitalium
MLDPNKLRNNYDFFKKKLLERNVNEQLLNQFIQTDKLMRKNLQQLELANQKQSLLAKQVAKQKDNKKLLAESKELKQKIENLNNAYKDSQNISQDLLLNFPNIAHESVPVGKNESANLELLKEGRKPVFDFKPLPHRELCEKLNLVAFDKATKISGTRFVAYTDKAAKLLRAITNLMIDLNKSKYQEWNLPVVINELSLRSTGQLPKFKDDVFKLENTRYYLSPTLEVQLINLHANEIFNEEDLPKYYTATGINFRQEAGSAGKQTKGTIRLHQFQKTELVKFCKPENAINELEAMVRDAEQILKALKLPFRRLLLCTGDMGFSAEKTYDLEVWMAASNEYREVSSCSSCGDFQARRAMIRYKDINNGKNSYVATLNGTALSIDRIFAAILENFQTKDGKILIPQALKKYLDFDTIK

SEQ ID NO: 63398 - protein, 210 aa, Mycoplasma genitalium [sequence omitted]

SEQ ID NO: 63399 - protein, 442 aa, Mycoplasma genitalium
MKSEINIFALATAPFNSALHIIRFSGPDVYEILNKITNKKITRKGMQIQRTWIVDENNKRIDDVLLFKFVSPNSYTGEDLIEISCHGNMLIVNEICALLLKKGGVYAKPGEFTQRSFLNGKMSLQQASAVNKLILSPNLLVKDIVLNNLAGEMDQQLEQIAQQVNQLVMQMEVNIDYPEYLDEQVELSTLNNKVKLIIEKLKRIIENSKQLKKLHDPFKIAIIGETNVGKSSLLNALLNQDKAIVSNIKGSTRDVVEGDFNLNGYLIKILDTAGIRKHKSGLEKAGIKKSFESIKQANLVIYLLDATHPKKDLELISFFKKNKKDFFVFYNKKDLITNKFENSISAKQKDIKELVDLLTKYINEFYKKIDQKIYLIENWQQILIEKIKEQLEQFLKQQKKYLFFDVLVTHLREAQQDILKLLGKDVGFDLVNEIFNNFCLGK

SEQ ID NO: 63400 - protein, 262 aa, Mycoplasma genitalium
MEYFDAHCHLNCEPLLSEIEKSIANFKLINLKANVVGTDLDNSKIAVELAKKYPDLLKATIGIHPNDVHLVDFKKTKKQLNELLINNRNFISCIGEYGFDYHYTTEFIELQNKFFEMQFEIAETNKLVHMLHIRDAHEKIYEILTRLKPTQPVIFHCFSQDINIAKKLLSLKDLNIDIFFSIPGIVTFKNAQALHEALKIIPSELLLSETDSPWLTPSPFRGKVNWPEYVVHTVSTVAEIKKIEIAEMKRIIVKNAKKLFWH

SEQ ID NO: 63401 - protein, 589 aa, Mycoplasma genitalium
MEGSWSYKLLYVFLCIVLGILYGIANPILLAQGLGFIFPITSSNGRAVDSIYSLIYPTNLNVFIRLTIVSVTVFVAYALIFVFNVAQNYVGIKLYQQTCATLRWKAYLKMQSMSTSFFDTQNNGDLMSRLTNDMYNIDNLFTQAGGQAIQSLFNILTTSVLIFLLSPVIALISLSILATLITFSFAFLKKSKTSYSQVQNNLGDMSGYIEEVLTNHKVVHVLKLQEIMIKDFDQYNKSMIKPTVRGNTYSIFLFSWFGFISNITYLVSISIATAFSVNSIPSFGISVINYSFMLSYIASLRQITLALDQIFTLWNLVQLGVVSAERVFKVLDLNVEKDTATIDKLPDIKGNIRFENVAFGYNKDKPTLTGINFSVKHGDVVAIVGPTGAGKSTIINLLMKFYKPFEGKIYMDNFEISDVTKKAWREKISIVLQDSFLFSGTIKENIRLGRQDATDDEIIAACKTANAHDFIMRLPKGYDTYISNKADYLSVGERQLLTIARAVIRNAPVLLLDEATSSVDVHSEKLIQESIGRLMKNKTSFIISHRLSIIRDATLIMVINDGKVLEMGNHDQLMKQNGFYARLKQSSVR

SEQ ID NO: 63402 - protein, 512 aa, Mycoplasma genitalium
MKRCYITTPIYYASGKPHIGHAFTTILADVIKRFKIQNGYEAFLLVGSDEHGNKIESKAKSLNLDPKTFVDINAQAFKLMWKTLNISFDHFIRTTDEIHKQQVQKTFQDLYDKKLIYQSEWKGAYCVECEQNYFTFNKQTMLCEIGHNLSLVQEPCWFISFSSTKNWIETTIGKNQLNIIPKSRASELKNNFINNGLNDLALTRKNVTWGIKVPFDPNQTIYVWFDALFSYITNLGFRNGDPNFIKWWNNDNKEREVIHLISREITRFHCIYWPIFLHLLDIKLPTQFLSHGWIVDGEGRKMSKSLNNVISPEQLIDQFGVDGTRYCLLKEMRLDKDNRCSVSILKEIYNADLANSFGNHVSRTFGMIKKYLNGKLEYQIITDNALQKIMILIDESIVQFDHYFNSYEFYRAINLLLKIVFELSKLIDDFKPWELFKNQEFSLLKQLLFTCVRCVQVCYVLLTPILVNTASKVFHLFNFADDACRKDQLRDATLLKKIIISNSMEVLFKRVD

SEQ ID NO: 63403 - protein, 288 aa, Mycoplasma genitalium
MLVNFKLMLQKAKLGKYAIPHININNYEWAKAVLTAANQANSPIIVSVSEGALKYMSGYSVVIPLVKGLIESLSVKVPVTLHLDHGSYDACIQALQAGFSSVMFDGSHLPFEENFNKSKKLIEIAQKTNASVELEVGTIGGEEDGVIGQGELANVDECKQIASLKPDALAAGIGNIHGIYPKNWKGLNFPLIETISKITNLPLVLHGGSGILENDVKKAISLGICKLNINTECQLAFAHEIRKYIESNKDLDLNKKGYDPRKLLKEPTQAIVDTCLEKIDLCGSRNKA

SEQ ID NO: 63404 - protein, 367 aa, Mycoplasma genitalium
MLSAGIVGLPNVGKSTLFSAITNLQVEIANYPFATIEPNTGIVNVSDERLDKLASLINPEKIVYTTFRFVDIAGLVKGASQGQGLGNQFLANIREVDLICHVVRCFQDKKIVHVNNTIDPVFDFEIIVNELIQADFELITNRIGKLKRKAESGDKIAKEEFVLLEIVLNGLKQGQMPIQTLSESELKTIKSLNLLTAKPILIVANVSENDLLNLDNNEALKKLNAFLDQKKIPKAITVCSLIEKELSGLKLEQRQYFLDELGLKNYSGLNRVIQAAYQTLNLWSFFTFGKKEVRAWTFKKGWNAPQCAGQIHSDFEKGFIKVEVISWDQLFAMKSLQEAKKQGLIRLEGKNYLIKDGDVCNFKFNVT

SEQ ID NO: 63405 - protein, 206 aa, Mycoplasma genitalium
MIKKVQHALILNELTKLRDKNTTTSQFRMALNQITSLLFFEATKQLPLATVEVETPFAKTKGYKLKNDIVLVPIMRAGLGMIDAIVRYSDKIRVGHLGIYRQTQTTSVISYYKKMPENISDSHVIILDPMLATGTTLLTAIKSIKEDKPIKISVIAIVAAPEGINKVEKMHPHVDIFLAAIDEKLNDNRYIIPGLGDAGDRLFGTK

SEQ ID NO: 63406 - protein, 1451 aa, Mycoplasma genitalium
MVFNLENEKDKKVLALSNFLIDNNILDHNELNSLIERIESIYFNKYIEEKVFLFAITISRPLTIDIWNALYEGFNELNEGFKADNESFKLTITFKENEPFFKSKNSFSSVTIAIIKDYFHSFFSKDKKYKILIEQELSNPNFLSYENDELKAQCQTKELTEWLVQKSKSFIFWMNNAGFKNFNFIALYPIDKNESKLKVKAVTVSQYDKQFETKVFATEFIPIHKINQQIDDVKIIGQIFELKTHESLTGKKTLNIYVTDFQLGGSLILKWSYTDEKKIEGITIGNWIKAHIQVERDPNTQILYGIVREINPVEIPNNYKRLDLSKQKRVELVFHTKMTAFDGINDIEEYAQFAKERGWKAITVTDKDNIHIYPKFYEVAKKYDLKAIYGLEFNLTDDHIKIVHNPDNTKLSDATFVIFDIETTGLHGRYDDVIEFSARKIKNNSEIDHQQFFLKIDKPIPKTITEITKITDEMLEGGIDQQQGLEKIRNYLDDCVMVAHNGINFDLPFLQTQFEKYNIKPLTNPLIDTLCLSWALNPLFSSHTLSNICSKLKLEFDDERLHRAEYDTEALKKVFFYFKKQLKEMGINTLTEIDQNLNKKCQIDLMKRVFTNTAIVYVKNQRGFQNLYEMLSIALTDHNANRPLVLASSLAKFRKSFLLTENPVQGDIFKAALTKPINELEKAIEKVDFVLISQPNAYLGYTLREGLKKELINDAIKLVIKTATKLKKLVAVASDAYFIHPWENEYYKAIVCAKGLGGKWHRHFNNKEKEQTVPEVFLHTTDEMLKRMSFLGEDIAYKLVVENTNKIVKLLDLNELVPTKNKLYPPVMQDSNQKLIDKTWKQAEKRYGKNLPKLIKERIEKELNAIISNGFGIVFWISHLLVEQSVKDGYFVGPRGSIGSSLIANLIGISEINPLAAHYLCEQCHYFEVSDSVDDGYDLMIRDCPKCHEKASFKGDGHNIPFATFMGFSGDKIPDIDLNFSSEYQAKAHDYVRKLFGVNNTFRAGTIATVAEKTAYGYARNYFEIIKRVDLATTAEIERFKQKLIGIKRTTGQHPGGIMIFPSDHSVYEFTPCGFPADDVESEWKTTHFEYDALGDAILKLDILGQDDPTMLKHLADLTKINPQNIPHFDKNLISMFSSNKPLNLKPGIVDEVTGAVGIPEFGTKFVRKILEQTKPKDFADLIRVSGLSHGKNVWADNAQKLIKSNRLTLRDVIACRDDIMLYLINKGMQAKDAFEIMEKVRKGIKVNAKEVSLMQNCGVEQYWINACLKINYLFPKAHAAAYVLMAWRIAWFKLYHPLSYYACLLSFKLKEHDINGFEKGYEFIKNRLDELNKLYRIKKIKPKEAELLTSYEVYLEMMARNIKLQQISIQNSNARMFVEHNGVLIAPFITIPGMGEAVASSIVEARNEKPFASLNDFKKRTKITKKHVETMEQLQLFDEFEHQDDHKLFN

SEQ ID NO: 63407 - protein, 258 aa, Mycoplasma genitalium
MYFQNSTQLGWWFLAELIGTFILIIFGNGAVAQVNLKKMATSETKAKFLTVALTWGIGVLFGVLTANAIFKGSGHLNPAISLFYAINGSIKSPTALIWPGFVIGILAQFLGAMIAQTTLNFLFWKQLSSTDPQTVLAMHCTSPSVFNITRNFLTEFIATLILIGGVVAASHFLHNNPNSVPPGFMGLWLVAGIIIAFGGATGSAINPARDLGTRIVFQLTPIKNKDANWKYSWIPVIAPLSAGLVLSIIIGFSPAPVL

SEQ ID NO: 63408 - protein, 213 aa, Mycoplasma genitalium
MGKYQPSFQTKKGWTEVICGPMFSGKTEKLLHKIKRWKIAKISVVIFKPIIDTRQTNIVKSRNGEYDQAITINSPFEIYDHLVDKNYQIVAIDEAQFFSNEIIEVVTTLNEIGTNVIISGLDTDFRAEPFGCIPQLLAIADVVNKLDAICNVCGSLAQRTQRLVNKNTNDNLVLIGDAEAYEARCKLHHSFLTKKHVTVKTKNFKEQVQGKTQ

SEQ ID NO: 63409 - protein, 414 aa, Mycoplasma genitalium
MNFLQKPRGVKDWFGDELVYFNWIVKKIRSLAFNWGFSEVKTPLFENAQLFQRSNANADIVQKELYQFFDKSQRELALRPEATTPIVRLACENKLMQEANFPLKLFCIGSMYRYERPQNNRFREHWQFSCEVFGFSNLFIFLDTLLFANSLLEALGITGYVLKINNLANFETLSKWNKALKDYLTPYKLELTELSQKRLEKNPLRILDDKIDQKKSFVKNAPKITDFLDASAKQDSELLKTQLKKHNISFEWTDNLVRGLDYYTGFVFEYVKNQDTILAGGVYDNLVEELSSNPTPALGFACGIERLINCLEIDKKAFILNTKPKQMLVICLFEEALEELVWLAKLWREYNQVTIYPKVIKVDNGIRLANRLGYTFIGIVGKTDFDKKAITIKNLVSKQQTIYTWNELGERNVF

SEQ ID NO: 63410 - protein, 550 aa, Mycoplasma genitalium
MCFNQRILIGSISTEQLNKTIVIIGWIKRIKKLGEINFIIVGDKSGTIQVTCKDKEQIQQLTREDIVIVKAKLQRLDSVRFELINPTIKLFSKSKTPPLIIEDETDALEEVRLKYRYLDLRRRLMQKRLLLRHQFILAIRNWFNQQGFIEIETPTLSKSTPEGAQDFLVPARIRKDCFYALVQSPQIYKQLLMIAGVEKYFQIARVYRDEDSRKDRQPEHTQIDFEISFCNQKMIMNLVEKLFFSVFLDVFQIKIKKTFPVFKFSELFERFGSDKPDLRYGFEIKDFTSLFQDHQNQFTKLIEAKGIIGGIELTNIELSTDKIKALRKIAKDHDVSLEVHNKNNSTLKTSIKCDEKNTLLLVANKSKKKAWTALGAIRNELKYHLDIVKPNQYSFCWVVDFPLYDFDEKTNQWISNHNIFSKPKQEWIDNFESNKNEALSEQFDLVLNGFEIGSGSIRINDPIVQKRLMNSLNIDPNKFAFLLEAYQYGAPVHGGMGLGIDRLMMILNQTDNIREVIAFPKNNHGIEVHTNAPDKIDKEEVKWWIKELVK

SEQ ID NO: 63411 - protein, 508 aa, Mycoplasma genitalium
MDLKKQYIIALDEGTSSCRSIVFDHNLNQIAIAQNEFNTFFPNSGWVEQDPLEIWSAQLATMQSAKNKAQIKSHEVIAVGITNQRETIVLWNKENGLPVYNAIVWQDQRTAALCQKFNEDKLIQTKVKQKTGLPINPYFSATKIAWILKNVPLAKKLMEQKKLLFGTIDSWLIWKLTNGKMHVTDVSNASRTLLFDIVKMEWSKELCDLFEVPVSILPKVLSSNAYFGDIETNHWSSNAKGIVPIRAVLGDQQAALFGQLCTEPGMVKNTYGTGCFVLMNIGDKPTLSKHNLLTTVAWQLENHPPVYALEGSVFVAGAAIKWLRDALKIIYSEKESDFYAELAKENEQNLVFVPAFSGLGAPWWDASARGIILGIEASTKREHIVKASLESIAFQTNDLLNAMASDLGYKITSIKADGGIVKSNYLMQFQADIADVIVSIPKNKETTAVGVCFLAGLACGFWKDIHQLEKLTTLDKKFKSTMDPNIRKTKINSWHKAVERALKWKEID

SEQ ID NO: 63412 - protein, 88 aa, Mycoplasma genitalium
MKKFQAVIKDPVGIHARPASILASEASKFKSELKLVAPSGVEGNIKSIINLMSLGIRHNDNITIKADGADEEEALAAIKACLEKNKVI

SEQ ID NO: 63413 - protein, 315 aa, Mycoplasma genitalium
MEQPLCVLGIETTCDDTGLSIVIDQKIKSNIVISSANLHVKTGGVVPEIAARCHEQNLFKAIRDLNFEIRDLSHIAYACNPGLAGCLHVGATFARSLSFLLDKPLLPINHLYAHIFSCLIDQDLNKLQLPALGLVISGGHTAIYLVKSFYELELIAETSDDAIGEVYDKIGRAMGFDYPAGSKIDSLFNKELVKPHYFFKPSTKWTKFSYSGLKSQCLNKIKQISANKTRIDWSELASNFQATIIDHYIDHVKNAIKKFAPKMLLVGGGVSANSYLSNRISTLNLPFLIADSKYTSDNGAMIGFYASLLINGDKN

SEQ ID NO: 63414 - protein, 383 aa, Mycoplasma genitalium
MAIRIKSTRVGRFVSESVGLGHPDKICDQIADSILDQCLLQSKTSHVACEVFASKNLILIGGEISTSGYVDVVQTAWRILRNLGYNETDFSFLSCINNQSLEINQAVLKNNEINAGDQGITVGYAVNETKQLMPLGVLLAHSFLKQAEKLTKQFDFLKNDMKSQVVLNYSLNQVECEEVLLSIQHTNAISLTELRKVIENNVILPVLNQYGFQDKKPTCLVNPGGSFVLGGPMADTGLTGRKIIVDTYGPYAHHGGGSFSGKDPSKVDRTGAYFARFIAKHIVSLGWASECEVSISWVFSKPNPQSITVKCFNTNIQYDEVLINRVVNNYFNWSITKIIDKLKLLDFVKYSDYAVYGHFGNDLSPWEQPTELDKLECLIKNFH

SEQ ID NO: 63415 - protein, 446 aa, Mycoplasma genitalium
MFKAMLSSIVMRTMQKKINAQTITEKDVELVLKEIRIALLDADVNLLVVKNFIKAIRDKTVGQTIEPGQDLQKSLLKTIKTELINILSQPNQELNEKRPLKIMMVGLQGSGKTTTCGKLAYWLEKKYKQKTMLVGLDIYRPAAIEQLETLSQQTNSVFFAQGTQPVAKTTKAALSAFKTAKCQTIICDTAGRLQTNETLMDELVSVKNELNPDEIIMVVDGLSGQEIINVAQTFHKRLKLTGFIISKLDSDARAGAALSLASLLQVPIKLIGVSEKLDGLEQFHPERIANRILGLGDVMSLVEKAEQVFDKKDLTKTISKMFLGKMDLEDLLIYMQQMHKMGSVSSLIKMLPANFSVSEENAELIENKIELWKVLINSMTREERRHPKLINRDPNRKQRIIKGSGRKMDELNKLMKEWNKMQLKATEMGKLLKTGSNPFGGFGQFF

SEQ ID NO: 63416 - protein, 223 aa, Mycoplasma genitalium
MKLEYNRIIDSTLVKADTLPHEIDTLCADAHKYQFFAVCVNPSYVSYAKNILKNTAVQLCCVVGFPLGQTTQKQKVYEAKIAIKEGADEIDMVMNIAEFKKRCACVITEIRAVKKVCGKRKLKVIIETALLTNDEIKDAVNVCIDGNADYVKTSTGFSFRGASLEDVQIMNNAAANLIKIKASGGIKTAKQFIDLFQAGASRIGTSNAVQIMQELKKMNHEYH

SEQ ID NO: 63417 - protein, 421 aa, Mycoplasma genitalium
MNIINLINKKQRGKALNLAEINWFVNAVLNKTIADYQITAFLMAIWFKGMNPNELFLLTKAMVDTGEIIKFNHHGKISVDKHSTGGIGDKVSLALVPILTSLGFSVAKLSGRGLGYTGGTIDKLEAVGVKTELTDQQAQACLDKNDCFIIGQSKDIAPVDKVLYGLRDITGTVDSLPLIASSIMSKKLAVMNEYIFIDLKYGKGAFCKTKKIANELAKLMQSIAKSFKRKLSVKLSDMNQVLGKAVGNVIEVNEAVNFLKQDLDQVGQDFIDLMQTIVINILLETKQAKTKQKAIELYQDVLTSKKAWNRFLSFIESQGGNVELFTQKEGFFKPKYKASIKAEKSGILHFTDPIDLAKIGINLGAGRMKKTDQIDPMAGLFLMKKDNESVAVGDTVLNLYSSSPISNEYISAAQKTIIINK

SEQ ID NO: 63418 - protein, 550 aa, Mycoplasma genitalium
MDKLRLEVERWLNHPNVNWELKQQIKELNESEIQELFSLEKPLFGTAGVRNKMAPGYHGMNVFSYAYLTQGYVKYIESINEPKRQLRFLVARDTRKNGGLFLETVCDVITSMGHLAYVFDDNQPVSTPLVSHVIFKYGFSGGINITASHNPKDDNGFKVYDHTGAQLLDTQTNQLLSDLPCVTSMLDLELQPNPKFVHTLDNEKVYKNYFRELKKVLVINNNNFKDIKVVFSGLNGTSVCLMQRFLKYLGYSNIISVEEQNWFDENFENAPNLNPEYKDTWILAQKYAKKNNAKLIIMADPDADRFAIAELNNNQWHYFSGNETGAITAYYKLNHKVFKSPYIVSTFVSTYLVNKIAKRYGAFVHRTNVGFKYIGQAINELSQTNELVVGFEEAIGLITSDKLNREKDAYQAAALLLEIARHCKEQNITLLDFYKRILSEFGEYFNLTISHPFKATATDWKEEIKALFNQLINANLTEVAGFKVVKVHLDKQTNILEFGFENGWVKFRFSGTEPKLKFYFDLTNGTREALEKQAKKIYKFFVNLLKLNKA

SEQ ID NO: 63419 - protein, 316 aa, Mycoplasma genitalium
MQASELTPKWYVAPVSIKDEAVVKNLKAKIQALGFNHEIVDVKVLKEREVHEEVYSLKSGKLPRSLKNTTFNKWFVLDDYRYLRVKISEKNLLGRYIYIKMIYSEDAWRIVRNFPGITGIVGSSGRGALPIPLDEKDANNLEQMLKGISINPSKRIMLTNTAIIEMDSDKFDEKFQYILKQKQAIQKPKEDEDSEIVDAEKLKEAFKKLQNSQEQDEWKEKATIIQSEQTKLDPSVLVPFLGKYEILDTDNKVEQLFEFSVGNLVEVHLTDTIHVQGQIKALYQGTVNKAVVEIELTSKTQLINLPLENLSFVEFE

SEQ ID NO: 63420 - protein, 277 aa, Mycoplasma genitalium
MKTLKVVATPIGNIQEISERAKKALQDCEVLFCEDSRVTRKMLDLLNIDCKQKKFVINNSFKEKQNLTFAEEFITNFKCCLVSDAGYPSLSDPGNEMINWIISKNKEIRIEVINGPSALMCGLITSGFKTTPLLFLGFLSHKQNQLKNYLSTYQNQKSTIVFFEAVHRLENTLETVKNVFKNNDVFIGRELTKLHESHYWFNTSENTLPDITLKGEFVIVIDNQNINHQTLSSNQYLVYEIKKLMDIGVKLKDACNYLAKKMHLKSSMLYTLFHESI

SEQ ID NO: 63421 - protein, 178 aa, Mycoplasma genitalium
MDQKARIKIDGVIVCEGKTDQAKLQQIFDVDVITTNGSALKKETINLIKKISEKQTVILLLDPDQQGKKIRSKLEQHLTNYYNCYVDMNARLKNAKKAGIAEMETSALIAALNNRVAITKNANQSILWDQYLSLKLNDKKKRLLLCNNLNLPYFNHKQLFKKLNLLNLTFQDVWKHLK

SEQ ID NO: 63422 - protein, 297 aa, Mycoplasma genitalium
MVCEHFADGETYIRFDESVRNKDIYIFQSTCPNVNDSLMELLIAIDALKRGSAKSITAILPYYGYARQDRKTKGREPITSKLIADMLTKAGANRVVLTDIHSDQTQGFFDIPVDSLRTYHIFLFRVIELLGKKDLVVVSPDYGGVKRARLIANTLELPLAIIDKRRPSHNVAESINVLGEVKNKNCLIVDDMIDTGGTVIAAAKLLQKEQAKKVCVMATHGLFNNDAEQKFMEAFDQKLIDFLFVSNSIPQYKFKAVKQFEVVDLASLYEEVVLCYANSLSVSAIYERHIEWIKKHV

SEQ ID NO: 63423 - protein, 145 aa, Mycoplasma genitalium
MLILVNNPKAKYDYHLMESYCAGIVLKGSEVKALSLGQGSLKEAYVFVKNNELFLEQFTIPPYSFAGPLNHASDRIKKLLLNKHEIKQIINKKQQQSLSVIPSKVFFRNGKIKVEIWLAKPKKKFDKRETIKKKTIRRELEAEYR

SEQ ID NO: 63424 - protein, 297 aa, Mycoplasma genitalium
MKLSVIIPTYNCASFIEKAINSIVKNRPNDLEIEVLIIDDGSIDNTNKVIKKIQDQINNLTLQYFYKSNGNWGSVINYVRNNKLAKGEWVTVLDSDDIFSKKTISIFQKYAQKQRYDAIIFDYYKCWKKFLWKIPTYARFRKEIKGELKKQTPFCIPLAKFFKNEVFYQLPKLRENVGFQDAIYTMHALQIANNVFHVSKAGGYYFFKRVGNSMSIPWHSSRFDIEVQICKDLIENNAQEIALVHLLRLKFRNLVDDKKIKFTVKRDFCFSGFSWYSRLILSLMYNFWLKRYFNSSE

SEQ ID NO: 63425 - protein, 680 aa, Mycoplasma genitalium
MFKNLLRPSLFFNWSQKTFKNKFSFLKQAANALQKQAVINDNNVAFEALKKREEEITTGIITSLALPHLQSQSVIEPFVAVFKVKNLDWQSLDQKPVKLIFLIGVLVDKTNLHLDFISNFSKLMLNETFASKVLNVTSYNGLIKLIDLFNQQKVQDQPAVETKKEYDFVAVTACPTGIAHTFMAKEALEAFAKKHNLYVKVETQGTDGIQNQLTSDDINNAKGVILACDRLIDFSRFYANKNVIEVSTTKAIKKPDEVYELIKNQKGKQLANSAKPTNQTQLAESEGEFNFNNFHKRIYRAILSGVSYMLPFVVFGGILIALSFLIDINNANNAGGNFGTINPVANWLNKLGGISFSLIVPILSAYIAYALVSRQGLLPGFVVGLISSGQFLLNIVLTNGTIEWLAPSQVSSGFFGAIFGGLLSACLIIVQQNYIYKKLPQSLQGIKNILFIPLFGTLFTAGLFWVINIPLIYLNYGLSLFLNIMNSPILAPLLGFVIGLMMCFDLGGPINKAAYVFGVVSLQNQNAGTISMAAAMLSGMVPPLSIALAASIRKSCFDKQELPAAYACYLMGLSFISEGAIPFVVKKPKVMLTANLIAGAICGALTGAFALSIRAPHGGVFVFALLKTTLQGIEGATLQTGVGIGLALVCLIISMIVGSSIIIGYDLIAKHNQRKQNLNS

SEQ ID NO: 63426 - protein, 255 aa, Mycoplasma genitalium
MKSLGFDPTVITFLGQPTKNLFLELVKPYDLNIVSFISETKTRINLKLLKDEKTTEINDLSPLITDANLTELLTFLKANVKNNDLVIINGRFKFEALEKVLNLVFTLTENVVIDVDESKMLTLLNQSKPLVMKPNIDEFQTMINTFFHDQQSLIAAIKKFHYCKLLLLSDGDKGAYLFDQNKLLFVSSITPKQVVSTTGAGDTLLAVFLANLILKVDLKTALIKATNYASATISKLGVVDSKDKISVITPKSYYL

SEQ ID NO: 63427 - protein, 1331 aa, Mycoplasma genitalium
MLNLIKNVIRSLKSAKIALIALTFLIFVAVGGFVLLNNTVNNFNAAFNYVTHTGKLSNAIINERYDFGKLEFQEQTNNSQNSSDSFTLTLTNDSRTSFINNALRTNPSLYEGLVTQTFSYQNKTEMTEKTNIVNQSKIIAANNLNNALSKDKQLLVSGQLEKLNAVFREYKAINITDKSVFKKLIVSEPNDLVNSLVIFDGQNLSSSKQSDFNNFLNQFNEIKSKGKDNLSTTLKTGQYQAFLQTLFDYAQASETTLKDQLQKLISNPDSSETNQVKNLFDTPSTLTNIGGQLTLQWTENSLTKQIVIFDPSSYETIVAPGNWTYQQQLGKEVYPDINNWESIKKLPLEQFESEFLKIDQKYKISIDNIDYLVIGVGISPDFVYPVFSASLIVPNIENEQLYYVNQTGYERTFSSFLTNPVETAIVARLINLESDLNTINQWAVENMSWPTNIKAAYSSSDTTNILNLLAARTVFIPNLINTINLVALFLTIAILTVAIIVSILILISYLKKNTEQIGILKANGLSGKKINLSLLIFGLIPAIVGAISGYSFGIGFQDVAIHLFSNYWFIPTATSSFSVVGLLFFSLFVILIMSSISLLVGSIILKKDVVKILKHDSEFKVSRLGLSSKKLFARFGIMTRFRVALAFNAPWKLVFLTLMSSFTMMILNLSFATKDSFENAQSKTNLTNQNHQYEFELASATTQSGLLKWQLFAELGTTDKRSESSVKLANKRMDISNVDASKDWKNQQVINFLSDASGFSNDLNYLENIVQSKIGLDYSLGFNNIVSNPWRLSETLMPTNQASASNTAFQNFLKAIITINPSQGSQFIKQTQDPLTKRFIYAIDSDKALKNNNEQNGSQNHLTLNDDFAKFLYSQFELIKKSGNASNEDLNAIDFENPQTIRDFYNKYNALPPLDYKLSFNVIGLPKETIAGQIDTPKYGFLTLHGEYQNTPIKIKGIKDWKDKVDNLGPVLSDQNNHIINQELFKNYSFDPLIVNNSAAKKYQLAIGSEINIAVNNSFKRIDNKIINQDPLVNATFRVVGINNSAHDPEFFTSYSTAFKVLEYPNEWFVKKLPFNSFYANSLLSFVQSTSLFSESGIFPATSSFSTNNTVLVELIKKTINYKNGQMNQTSSNDSSKKENYQKLQKALGISTDLEISKVNEYVAILARVYNGLPYNSTISFISNVAANNALFGNIANTTKQIQAVVIAVIIPIIMLIILLVSTTLIQELKKIAIRLKALGYSNLKILASFLSIYIPLFAFGLLISIPFSIYLIALHNEVIFASSSIFLDAFLSFESAIGSMLVLLAVLSITFVLNWLELNKIKIDKEIKNS

SEQ ID NO: 63428 - protein, 466 aa, Mycoplasma genitalium
MDFFSLNKIIKPNQKFTSNEAEFLQIATDYLEESQNYLQKGLKQLKKEYKRSIIYNPNLEYKRFVKWKENFTETFESYYDRFFITKYNHYSLSLLFSFINEQIETVIASYNSFLNEHNKLAFNKVSFSFEKKLFEATQQFNNLEKNTAISDDLPLQFKVRTTQLKAQRERELKNLLNKIKLKNLSEKKQEILLNNWFNSNERLFLKNEVKKVNWLNSPRQKQQAAQIDDQNIIELKNVYKYITNGITTNAVLKGVDLAIKSHDFIVILGPSGSGKTTLLNIISGMDRASSGSVIVNGYNMICLNDRKLTKFRQKYVGYIFQQYGLLPNLTVRENIEIGANLQPDPSKRISIDALLEAVGMDSLQKKLPNELSGGQQQRVSIARAFAKNPLLIFGDEPTGALDLEMTQIVLKQFLAIKKRYQTTMIIVTHNNLIANLADLVIYVADGKIKSLHRNLNPKQVEEIHWI

SEQ ID NO: 63429 - protein, 648 aa, Mycoplasma genitalium
MKYLYATQHLTLNAIKHAKGGHVGMAIGASPILFSLFTKHFHFDPDQPKWINRDRFVLSAGHGSMALYSIFHFAGLISKQEILQHKHGQINTSSHPEYAPNNFIDASTGPLGQGFGMAVGMVLAQKLLANEFKELSDKLFDHYTYVVVGDGDLQEGVSYEVSQIAGLYKLNKLIVLHDSNRVQMDSEVKKVANENLKVRFENVGWNYIHTDDQLENIDQAIIKAKQSDKPTFIEVRTTIAKNTHLEDQYGGHWFIPNEVDFQLFEKRTNTNFNFFNYPDSIYHWFKQTVIERQKQIKEDYNNLLISLKDKPLFKKFTNWIDSDFQALYLNQLDEKKVAKKDSATRNYLKDFLNQINNPNSNLYCLNADVSRSCFIKIGDDNLHENPCSRNIQIGIREFAMATIMNGMALHGGIKVMGGTFLAFADYSKPAIRLGALMNLPVFYVYTHDSYQVGGDGPTHQPYDQLPMLRAIENVCVFRPCDEKETCAGFNYGLLSQDQTTVLVLTRQPLKSIDNTDSLKTLKGGYILLDRKQPDLIIAASGSEVQLAIEFEKVLTKQNVKVRILSVPNITLLLKQDEKYLKSLFDANSSLITIEASSSYEWFCFKKYVKNHAHLGAFSFGESDDGDKVYQQKGFNLERLMKIFTSLRN

SEQ ID NO: 63430 - protein, 908 aa, Mycoplasma genitalium
MQISLVKIRNKFKQRNRGSFRQWVGKLSNGLMIPIAVLPLAGIFLGIGDAISSNSSGIVGVKFFGEFIKQGGNVVFANLPILFAVAIAITFSQDAGVAGFSAFVFWATMNAFMSSLIIPVDANNTASGYNILYWKAVPQSAIASTLGLNSLSTSVFGGIIVGALTAYLYNKFYAIRLPDVIGFFSGTRFVPIICMTIAIPVALLLLMVWPGVSILLNLIGTGLGILGGRGYGANSLIFGYIERALIPFGVHHAFYAPLWYTSAGGSLQEIANQQVWIRAPGSDYVTRVIGWEDFNTPGKWVIPAALANGTSGMMNGATTTGQDSTSALSKYMSKESTNFLSWKELVDGLTRKGNFDELAKNGLLDGSNKIWIGLNQSGILGKKVLLSDGKDYTITFKTFANTTPTFWSHGAHALLPISGTPSAITNGVTVNGTANSKTYNVSQFTVAVPSLNPAQYSQGKFPFMLIGIPAAGLAMILAAPKGRRKEASSIIGSAAFTSFLTGITEPFEFTFLFLAPWLFYGIHAVLAAVSFWLMNLLSANVGQTFSGSFIDFILYGALPDGRGWLANSYLVPIIGIFLALIYFPTFYFLTIRFNLATPGRGGKLITKKEYLAAKAAQKTDQTTNTNFNQTQIEAGMLLRAYGGSENIAELGACITKLRVTVKNPELVNETIIKDLGAAGVMRTTPTFFVAVFGTRAAVYKSAMQDIIQGKVNWTELQKVLDKNDSTVEKPEIKPTPVLKVQDEIVILSPVNGTLKPLTQVPDDTFKNRLVGDGIAILPSDGHFKAPGDVGVKTELAFPTGHAFIFDVDGVKVMLHIGIDTVKINADKKPGEQLEVFDVKTKQGEYTKLKSESVVEVDLKKLKRKYDPITPFIVMQESLDNFKLVPIRQRGEIKVGQPLFKLIYKDKKS

SEQ ID NO: 63431 - protein, 284 aa, Mycoplasma genitalium
MSDTNTEKPELVSLNKLSEMRTNIGMVKRYWNPKMGFFIEPERKHNNDLLKLDLQYQALKTAYNFIKDVVKNHGQILFVGTKNDYVKKLVIDIAKRVNVAYITQRWLGGTLTNFKTLSISINKLNKLVEQQKQNANDLTKKENLLLSREIERLEKFFGGVKNLKRLPNLIVIDDPVYEKNAVLEANSLKIPVVALCNTNTNPELVDFIIPANNHQPQSTCLLMNLLADAIAEAKGFETLYAYKPDEQIQIEIPPKQERQVINRSNTRNITNQRLNINRQQQETL

SEQ ID NO: 63432 - protein, 874 aa, Mycoplasma genitalium
MNSWTGLSEQAAIKSRQEHGANFLPEKKATPFWLLFLQQFKSLVVILLLLASLLSFVVAIVSGLRSNWNFNHDLIIEWVQPFIILLTVFANSLIGSIQEFKAQKSASALKSLTKSFTRVFRNGELISINVSEVVVGDIIFVDAGDIIPADGKLLQVNNLRCLESFLTGESTPVDKTIDSNEKATILEQTNLVFSGAQVVYGSGVFQVEAVGIKTQVGKIAKTVDDSVTKLSPLQQKLEKIGKWFSWFGLGLFAVVFLVQTALLGFDNFTNNWSIALIGAIALVVAIIPEGLVTFINVIFALSVQKLTKQKAIIKYLSVIETLGSVQIICTDKTGTLTQNQMKVVDHFCFNSTTQTDLARALCLCNNASISKDANKTGDPTEIALLEWKDRSQLDLKTYYRVYEKAFDSIRKLMTVVVQKDNRFIVIVKGAPDVLLPLCNNVQNEVKNIENLLDQSAGQGLRTLAVALKVLYKFDQNDQKQIDELENNLEFLGFVSLQDPPRKESKEAILACKKANITPIMITGDHLKTATVIAKELGILTLDNQAVLGSELDEKKILDYRVFARVTPQQKLAIVSAWKEAGFTVSVTGDGVNDAPALIKSDVGCCMGITGVDIAKDASDLIISDDNFATIVNGIEEGRKTFLTCKRVLLNLFLTSIAGTVVVLLGLFILGQVFKTNLLQQGHDFQVFSPTQLLIINLFVHGFPAVALAVQPVKEKLMVGSFSTKNLFYNRQGFDLIWQSLFLSFLTLLFYSLGIIYAINNRDLQTSGDLINRAGSTCGFFILGASAALNSLNLMVDKPLLMTNPWFFKLVWIGSLASILVFLLIIFINPLGLVFNVLQDLTNHPVLISYSFGGVILYMGMNEVVKLIRLGYGNI

SEQ ID NO: 63433 - protein, 806 aa, Mycoplasma genitalium
MAIFNFLKLISPKNRILSKANRIASEVESYKNYYRNLTDQQLFEESNKLVDLVTKQNYTILDVCVAALALIREVVYRETGEFAYRVQIIGAFIVLSGDFAEMMTGEGKTLTIVLAAYVSALEKRGVHVVTVNEYLAQRDANNAMKILKRVGMSVGCNFANLSPQLKQAAFNCDVTYTTNSELGFDYLRDNMVHSYQDKKIRELHFAIVDEGDSVLIDEARTPLIISGPSKNEFGLYVAVDRFVKSLTEQEFKIDPESRAASLTELGIKKAEQTFKKENLFALENSDLFHKIMNGLTAVKVFEQGKEYIVRDGKVLIVDHFTGRILEGRSYSNGLQQAVQAKEYVEIEPENVIVATITYQSFFRLYNRLAAVSGTALTESEEFLKIYNMVVVPVPTNRPNIRKDRSDSVFGTPQIKWMAVVKEIKKIHETSRPILIGTANIDDSELLHNLLLEANIPHEVLNAKNHSREAEIVTKAGQKNAVTISTNMAGRGTDIRLGEGVAEMGGLYVLGTERNESRRIDNQLRGRAARQGDKGETKFFISLGDSLFKRFAHDKIERAISKLGNETFDSAFFSKMLSRTQKRVEAINFDTRKNLIDYDHVLASQRELIYKQRDKFLLANDLSEMIDKMLEKFVQQFCDQYRNQKNQNLINHIALAEALNLEMNMQNTINPKVFENMTFDVAVDKTRNLVAKKISDKVNVLTKPIALNRFRDIIITSMDKHWTEHLDSVFKLREGVVLRSMEHTSPLNVYIKETDILFKTMLQKIAQDVIVQIANLTTPDEFDHSLMQANALKKLAAIKADEKSNQE

SEQ ID NO: 63434 - protein, 402 aa, Mycoplasma genitalium
MALKRSNFFVDKDQQLKDNLILDITDLHVNFKVKDGILHAVRGIDLKVERGSIVGIVGESGSGKSVSVKSIIGFNDNAQTKAKLMNFKNVDITKLKKHQWKYYRGTYVSYISQDPLFSLNPTMTIGKQVKEAIYVASKRRYFQAKSDLKFALSNKEIDKKTYKSKLKEIKQTYQQKIKPINVEKKTLEILQFIGINDAKKRLKAFPSEFSGGMRQRIVIAIAVATEPDLIIADEPTTALDVTIQAKVLTLIKQLRDLLNITIIFISHNISLIANFCDFVYVMYAGKIVEQGLVEEIFTNPLHPYTWALISSIPEQKDKNKPLTSIPGVIPNMLTPPKGDAFASRNQYALAIDFEYHPPFFEVTKTHKAATWLLHPQAPKVEPPQAVIDNITLTKKALQFKDQ

SEQ ID NO: 63435 - protein, 137 aa, Mycoplasma genitalium
MAKKTVTRIAKINLIGGQAKPGPALASVGINMGEFTKQFNEKTKDRQGETIPCIITAFNDKSFTFVLKTTPVSNLIKQAAKLEKGAKNAKTIVGKISLQQAKEIAQYKLVDLNANTVEAALKMVLGTAKQMGIEVTD

SEQ ID NO: 63436 - protein, 226 aa, Mycoplasma genitalium
MKKLSKRMQAVTKLIDKNKLYPIQEAFELIKKTAITKFVSSVDIAVSLNLDTTKAEQQLRGAIAFPFSIGKSIRILAITDDEKKASEAGADFVGGLDKIEAIKNGWLDFDLIITSPKFMGALGKLGKLLGTRGLMPNPKTETVTDDVVSAIKAYKKGKKEYRTDSFGNIHLSLGKTDTKTEHLVANAMALIDLIKSKRPSTVKGTYIKNIALTTTMGPSLKVKLPD

SEQ ID NO: 63437 - protein, 290 aa, Mycoplasma genitalium
MASEKQYIAGVSGGSDSMLMLKLYQKKIACVVHVNYNTRSTSLRDQKLVEQYCQKLNIPLVVHTVDPDLVWKKNFQNQARKIRFDQFKKTAKLYQTNKLLLAHHRDDFIEQAKMQLDAKKRAVYYGIKTRCELYGLKIYRPLMKYWKDEIIALCRQDHIPYEIDETNKLPIYKRNEVRLEIEKWSKIEKEQFYIAICAMNKTIAQKLFVLMKKAKKWLLQPDVRELKRFSIIDQKQLIYSYLIYHKINVNGEKIDAILDFIQPSQQKQYRLQNDIFLMVKNQCLALLYKS

SEQ ID NO: 63438 - protein, 311 aa, Mycoplasma genitalium
MKHLTVKALVLQFNDCIQLIDGKNNIDNVITIPGLKRSVFELLGLFCKPIGSVAILGKREFIFLNQKPVEQQKKIIANLLKLKPPAVILTKSFLDCGVLLAVNQTYQVPILKTNLFSTELSFTVETYINEQFATVQKLHGVLLEIFGVGVFLEGKSGIGKSESALDLINKNHLLIGDDAIEIYRLGNRLFGRAQALAKGFMEIRGLGIINIERAYGLQITKEQTEIQLAISLLSLEEKNNASFERLGSDLKLKNLLGVKISYYQIPISSGRKTSEIIESAVIDFKLKKSGYNSANEFILKQRAMLEEQTDE

SEQ ID NO: 63439 - protein, 139 aa, Mycoplasma genitalium
MATIAQLIRKPRQKKKVKSKSPALHYNLNLLNKKTTNVYSPLKRGVCTRVGTMTPRKPNSALRKYAKVRLTNGFEVLAYIPGEGHNLQEHSVTLLRGGRVKDLPGVRYHIVRGTLDTVGVDKRRQQRSAYGAKKPKPKS

SEQ ID NO: 63440 - protein, 155 aa, Mycoplasma genitalium
MRKNRALKRTVLPDPVFNNTLVTRIINVIMKDGKKGLAQRILYGAFEIIEKRTNQQPLTVFEKAVDNVMPRLELKVRRIAGSNYQVPTEVPPDRRIALALRWIVIFANKRNEKTMLERVANEIIDAFNNTGASVKKKDDTHKMAEANKAFAHMRW

SEQ ID NO: 63441 - protein, 688 aa, Mycoplasma genitalium
MSRTVDLKNFRNFGIMAHIDAGKTTTSERILFHSGRIHKIGETHDGESVMDWMEQEKERGITITSAATSVSWKNCSLNLIDTPGHVDFTVEVERSLRVLDGAIAVLDAQMGVEPQTETVWRQASRYEVPRVIFVNKMDKTGANFERSVLSIQQRLGVKAVPIQFPIGAENDFNGIIDIITKKAYFFDGNKEENAIEKPIPEQYVDQVEKLYNNLVEEVASLDDQLMADYLDGKPIEIDAIKNAIRNGVIHCKFFPVLCGSAFKNKGIKLLLDAVVDFLPSPVDVPPAKAIDANNKEISIKASDDANFIGLAFKVATDPFVGRLTFIRVYAGVLKSGSYVKNVRKNKKERVSRLVKMHAQNRNEIDEIRAGDICAVIGLKDTTTGETLTDDKLDVQLEAMQFAEPVISLAVEPKTKADQEKMSIALSKLAEEDPTFKTFSDPETGQTIIAGMGELHLDILVDRMKREFKVEVNIGAPQVSFRETFKSTSEVEGKYIKQSGGRGQYGHVKIRFEPNKDKGFEFVDKIVGGRIPREYIKPVQTGLENAMNSGPLAGYPMIDIKATLFDGSFHEVDSSEMAFKIAASLALKEAGKQCNPVLLEPIMAIEVTVPEQYFGDTMGDISSRRGIIEGTEQRDNVQLIKAKVPLKEMFGYATDLRSFSQGRGNYVMQFSHYAETPKSVVNEIIANKK

SEQ ID NO: 63442 - protein, 208 aa, Mycoplasma genitalium
MHYNIILLVDGTLSLEQANQVEQKHQKLLEKATEFKSEYLGLKELAYPIKKQLSAHYYRWSFHGESNCTKEFKRAANINKQIIRELIINREKDYGYLGSVNPKKQQLSLQKLTKYNEIIASENNPDNPDAPVTSGLASVKPRLSRVEKQKERELEKWTVVHQSGNFDTVQINPYRPRIKRFLQNNQQTSQANNNQPRFQNQFKKGAKP

SEQ ID NO: 63443 - protein, 160 aa, Mycoplasma genitalium
MNRVFLFGKLSFTPNRLQTKNGTLGATFSMECLDSSGFNNAKSFIRVTAWGKVASFIVAQNPGVMLFVEGRLTTYKITNSENKNTYALQVTADKIFHPDEKTTNEEPIKSTVVDSPFMNPKASVTEAEFEQAFPHQDETDFNNITPIFENDVQLEEESDD

SEQ ID NO: 63444 - protein, 105 aa, Mycoplasma genitalium
MMINKEQDLNQLETNQEQSVEQNQTDEKRKPKPNFKRAKKYCRFCAIGQLRIDFIDDLEAIKRFLSPYAKINPRRITGNCNMHQRHVANALKRARYLALVPFIKD

SEQ ID NO: 63445 - protein, 150 aa, Mycoplasma genitalium
MKIILKQDVAKLGKRFDVVEVKDGFAIHFLFPKKLAAPLTKKAIANRDLFLKQQQEQYQKNRALAEKLKLVIEQTPLTFQLKQHDGKPYGSIITKQIINLAKQQRLDLQRFMFKDNVRLQFGEHKLILHLFEEITATLTVIVNPENGTTN

SEQ ID NO: 63446 - protein, 446 aa, Mycoplasma genitalium
MQAVAQNSEGIDLIFNKLEPIDFFATPFKLIFQTAKENYQLNNPIIGSGLLEAVKFKLDANDQSTKSELEILFTKILLIRLPPNQTEIKTLVDVVKKASIFRRLQQFAKRVYNEEFKLKEDRFEGYLQAIQDDFVKIIHSAFSNIFAFSYDEIANQEEALIKKVHRGELIISGLSSGFLKLDQLTSGWKPGELIVIAARPGRGKTALLINFMASAAKQIDPKTDVVLFFSLEMRNREIYQRHLMHESQTSYTLTNRQRINNVFEELMEASSRIKNLPIKLFDYSSLTLQEIRNQITEVSKTSNVRLVIIDYLQLVNALKNNYGLTRQQEVTMISQSLKAFAKEFNTPIIAAAQLSRRIEERKDSRPILSDLRESGSIEQDADMVLFIHRTNDDKKEQEEENTNLFEVELILEKNRNGPNGKVKLNFRSDTSSFISQYSPSFDDQYS

SEQ ID NO: 63447 - protein, 477 aa, Mycoplasma genitalium
MRSNILSLRAILDKKPSAINDVLTSINAKIELNKSSNFLLKNTVEIYSKKINKSDEKILLNNIPYVLKDNIATKDIVTTGGSLFLKNYLPPFSATVFELLEMNGALLVGKANMDEFGLGGTGSYSAFGVVHHPENSSLIAGGSSSGSAYAVAKDIVPFSIATDTGDSIRRPASICNVVGFKPTYGLISRNGVFPYAPSMDHVGIFAKFVSDIAIVSDVVIKHDKTDFSSQKSPDENQFFNELAIPFTRSIRFGYLKPLEKLFNKHLQKKWNNLKKTLEQKNYQLIPLDFDVELLKVIDSIYKIISYSEAVSCYSNLTGIVFGQKVFEPNSPSNFDQTITRNRDQFLGKQLKRRFVIGAFATDEKNFEKYFEKAQKIRRVLVDNFLNLFSDVDFVLSPSASCFASTIEDIQANKPYTNIIDDFLQLANFAGSPSITIPWLVQTKDQTIGLSISANCFEDKKLLQIAYWFEQLFDLNHD

SEQ ID NO: 63448 - protein, 477 aa, Mycoplasma genitalium
MINFEAIIGIEVHVVLNTASKMFSKAPNRVDNQKINHFIDPIDLGLPGTLPQVNELAVYKALLLADALKMKTVTNKLVFDRKHYFYQDLPKGFQITQQNYPFAKNGVVTINVDAIEKPIYIDRFHLEEDTAKQHFNHDQILLDFNRCGAPLIEVVTLPVINTAKEAKAYLQKLRQILIVNNISNAKLEDGSMRSDCNVSVRLKGQRQLGTKIEIKNINSLNNVEKAIDLEINRQVKALINGETLSQATLSFDDKTNNNVFMRKKDNTIDYRYFIEPNIMTSNIDDLLLEKPVAFQLEQFQKELIDSNVNPQLVQLVVDDATIFSAFQTINSVIKNPQETIRWLCIELIGQLNKTNSSLTANLIQDLITLIEMLKAAKVNQKQAKQLITLMIETKKDPKSLAKLHNLEQITDPKELQKIIKKIFQENEKEILKNIDRIERIQKLIIGQVMHKTNNRANPQQVFIIVENMLHEVRERDS

SEQ ID NO: 63449 - protein, 280 aa, Mycoplasma genitalium
MTFSTQIKAELVQNKLIDKHWNVFLAGFFQNNLKLLYNRNWSFKVQSEALKEQFVQNLKFDFKTKASKKYFLFEFNADINVINTLLKLDVTTSELVVKQVYLIAAFLSGGSVSDLINSNNFHLQISSNNEFQIQQLLKLFSFFKKTVKQNQLVVYLKSYEKICNFLKLIQAFDGYLAFENKQLEKSFTLNQLRKSNLEVANLMKTIRSNNQTNQLQLKSFIKSSSFAKRPLNFQRYCLIKSDHPDWSLEQIANFFFTKYNIKISRSGIQHFSVNLKKLCQ

SEQ ID NO: 63450 - protein, 362 aa, Mycoplasma genitalium
MDSYLFLAKNLNLKNYGPVQKKQYGHLVLKVVQKNPKINENNWKKFLDEMVTTTRVHHSNLVKSFDVVNPFLKIVRGNKTIALNQIVMIAMEYVDGPSLRQLLNRKGYFSVSEVVYYFTKIVKAIDYLHSFKHQIIHRDLKPENILFTSDLTDIKLLDFGIASTVVKVAEKTEVLTDENSLFGTVSYMIPDVLESTVNKAGKKVRKPPNAQYDIYSLGIILFEMLVGRVPFNKSINPNKERETIQKARNFDLPLMQATRSDIPNSLENIAFRCTAVKRENNKWLYSSTKELLEDLANWENEQAMIKPANERVLEGQVEIREMMLEKPLAWYFKTWALSIFTIVFIGLIIAAIVLLLIFNARF

SEQ ID NO: 63451 - protein, 433 aa, Mycoplasma genitalium
MFMSDKLLTIDLSHVYGFDKEIIFKKYQKKVDQIHQDFLAHKLADGHMTGWYDQPDQNHQFLLKTINQIDKKFKSLKVTDIVYVGIGGSFTGIKTVLDFLKPKQRTGLKIHFVPDLSAFQAASVIKEIKNKSWALITTSKSGRTLEPALNFRIFRNLLNKRYGNKHYQRVVVITDEKKGLLTKMASNHGYQKLVIDSNIGGRFSTLSPAGLLLAKLFGHDPKAILKGTLQAKKDLQTTSLENNSAYLYAVVRHWLYTTKKFKIEVCIAYHSLYEYLLLQHRQLFGESEGKNDKSLFPTFSIFTVDLHSMGQLYQEGEKVFFETVIDVKNPLVNINLPPSDFDNDDELDFLLDKSLNEISDVAIDSVIKAHYQANVSIIKLTLKEQSAFMFGYFYFWLSVATVMSGSLLGHNVFNQPGVEVYKKLMFEKLRSGH

SEQ ID NO: 63452 - protein, 456 aa, Mycoplasma genitalium
MKSVTVKQLLQTPRKFNNKQIKLSGWVKNKRASANIIFLAISDGSSINTLQAVVKQEDNPQVFSLLQTVNLASAVMVWGEIILTPKAKQPLELKLKQVSLLAQAESDYPLQKKEHSQEFFRSNAHLRVRAKTYFAVMKIRSVLSHAIFEYFFKNDFILVQSPILTSNDCEGAGETFVIKDSETFFNKTTFLTVSGQFGAEAFAQAFKKVFTFGPTFRAEKSHTNRHLSEFWMIEPEIAFANLKDLMQLIQNLIKFLIKKVMENASDELNVLAKQFSNDIISNLKTIISTKKFPIIEYSKALAILKESSDTKKTNFELNDFSFGIDLKTEHERFLCEQYFQNQPLFVINYPKELKAFYMKTNTDNKTVAAVDLLLPKIGEICGGSERESDLNQLKNRCQSLNIDTKSLNWYLDMRKWGYFASAGFGLGFDRLLAYICGLENIRDAIPFPRVHGTINF

SEQ ID NO: 63453 - protein, 236 aa, Mycoplasma genitalium
MDWKTSEMLFPFPVYMAPLTSKFAAYKKKIANWLTVYRIFIALPTIIFIALDNQLGVLANFSVGAISISLQISLLIGGFLFLTAVISDYLDGYLARKWLAVSNFGKLWDPIADKVIINGVLIALAINGYFHFSLLIVFIVRDLVLDGMRIYAYEKKVVIAANWLGKWKTIMQMVGIVFSCFVWSFKQSEIASLNSGLFFWLLTQLPYYLAAVFSIWSFIVYNIQIYQQLKAYNSKL

SEQ ID NO: 63454 - protein, 306 aa, Mycoplasma genitalium
MLSLAQLESWFFIAPALLLAVLSGYLAERVGIINIAINGGMVFGGLFMALLSYGFTNNLNQSAPSWSLFITIPLSVLFSSVIGCLFALAAVKLRADHVIVGTGINLLASGITLFISQNAASLFSDTTLRVRYLFPIQTTVSIEAIGVFVFSLLLIGFVWYLMSFTKTGLRYRAVGENPNVIDTQGISVYKYQWIGAICSMMVAGLSGSLFVLSVSNFPFNSGDVNGLGFIAIAIMIISMWRIIPSIFIGLIFAYAYVFTNSQIGSNSNSYLLRTIPFIISLLVMLLFGFLNVAPKNIGKHFDKGLR

SEQ ID NO: 63455 - protein, 709 aa, Mycoplasma genitalium
MIKNLVVIESPNKVKTLKQYLPSDEFEIVSTVGHIREMVYKNFGFDENTYTPIWEDWTKNKQKNPKQKHLLSKFEIIKSIKAKASDAQNIFLASDPDREGEAISWHVYDLLDQKDKAKCKRITFNEITKKAVVDALKQPRNIDLNWVESQFARQILDRMIGFRLSRLLNSYLQAKSAGRVQSVALRFLEEREKEIAKFVPRFWWTVDVLLNKENNQKVVCANKSIPLVLREINPELSASLKLDFEAAENVSGIDFLNEASATRFANQLTGEYEVYFIDEPKIYYSSPNPVYTTASLQKDAINKLGWSSKKVTMVAQRLYEGISVNGKQTALISYPRTDSIRISNQFQSECEKYIEKEFGSHYLADKNKLKRHKKDEKIIQDAHEGIHPTYITITPNDLKNGVKRDEFLLYRLIWIRTVASLMADAKTSRTIVRFINQKNKFYTSSKSLLFDGYQRLYEEIKPNTKDELYIDLSKLKIGDKFSFEKISVNEHKTNPPPRYTQASLIEELEKSNIGRPSTYNTMASVNLERGYANLVNRFFYITELGEKVNNELSKHFGNVINKEFTKKMEKSLDEIAENKVNYQEFLKQFWTNFKSDVKLAENSIQKVKKEKELVERDCPKCNQPLVYRYTKRGNEKFVGCSDFPKCKYSEFSNPKPKLTLETLDELCPECNNKLVKRRTKFNAKKTFIGCSNFPNCRFIKKDNAAEFKQ

SEQ ID NO: 63456 - protein, 347 aa, Mycoplasma genitalium
MIKRAITGIQASGRQHLGNFLGVMQGLKQLQSQYQLFLFVADLHAITVDFEPTMLKDNNLQLVKTLLALGLDYGKVNLFLQSDLMEHTMLGYLMLTQSNLGELQRMTQFKTKKLAQKRNSNNTITIPTGLLTYPVLMAADILLYQPDIVPVGNDQKQHLELTNDLAKRVAKKFKLKLKLPVFIENKDTNRIMDLSNPLKKMSKSNPDQNGVIYLDDSKETIIKKVRKATTDSFNKIRFAKKTQPGVTNLLVILTALLKEEVNHNLSKKIGSDLVKYYQNKSYLDLKNDLSSAVINVIESLKFKKAQITDEMVLKVLNDGKNQAKKVADETLKMFYKAFGLTSNQLFD

SEQ ID NO: 63457 - protein, 259 aa, Mycoplasma genitalium
MKYKIFASTTPQTEPVLNKLRAVLKTWQAVENGYEYVFVLGGDGFFVSTLANYNCDSCKVVGINTGHIGFYTSFNGDDLDENFISKLTSFEFKKINLLEVKTKNHSFLVLNELAVYTNTAYPINIFIDDNHWESYRGSGLLIGPRTGSTALAKSAKGAVIFPNVDVVQIIELNPLLHPNQITIQSPIILPMQTKVEFRIKKAFKAEQFPNFYADGIKLDLKNEDTSISFQLVLSRSMFHASLKTKDFIDKLKSTFIKQS

SEQ ID NO: 63458 - protein, 484 aa, Mycoplasma genitalium
MNNNITNSIAQLFFNTSFFAFLFLIIIAFNLCLFAYLYFQYRIYKKNPKKANNFKANEYEKIKLLKNQNFTESNKLIATTNELNELTSQLDNILVRIINKPLAKLVNDFLDEQIKQIVKLDKNSSDFHSESDNLPFYTKLFNDFHFGVDKLININIKNPLYNWVYSPSFLISESDFRKLNGISGINKKLLVEKLRIEDIVFTDLNKKYEVNVLTESPIKAQKTVLTVRNILMNDYVDNERIESYVQQANFFFTEHCKKIGKEILESLNIFISSSSLHRHFGFLAFRYSFGQNVLSHSLETAFLTAHLAALIELDSELSLKCGLLHDIGKSNDDNGKESHTITGAKLAEQFQLPDDIKYTIANHHNKHIDNTYCRLTQIADKLSAARIGARSDSSLLFKQLKDELKKIVDKTINNFHTTILLGQSGRRLMIWLETKNQNQLLSNEQIIEMVEKIKAEIAKNPITNHFPIKVVIRYNFEHSFNTKS

SEQ ID NO: 63459 - protein, 100 aa, Mycoplasma genitalium
MSFKKIAEMMRQAERETKKKTLAFEQQAFEYNYKNGAIKITILGDLTLKSINIDPVLIDASDKVILEEMIIEATNEAVSDVKTKYDNLVEKTMPKVPGLF

SEQ ID NO: 63460 - protein, 490 aa, Mycoplasma genitalium
MSDRLNDQAQHRLQKLLRLKQTNNDPYLVTKTSLTHSSKSFQVEFEKCSEEELKKKATVSLAGRIIAIRQTFLIIQDFDGQVQLYINKKIHPKLFDYFNEFVDIGDQIVVSGKPMLTKTKVLTLAVEEMKIIAKCLLVPPEKWHGLTDIETRARKRFLDLTYNLAMRDVFLKRTKIIKSIRSFLDQNGFIEVETPTLQAVLGGANAKPFKTHYNALKADFYLRIANEIALKKLIIGGFNKVYEMGKMFRNEGVDTTHNPEFTSIEIYQAYADFEVMLVLVEKLIQSLCESLNQFSFNWNNKTINLKTPFHKITMVELIKKVTGIDFNSVKDDQSAILLAEKHHVKLAKHQQNKQHIINLFFEQFCEQTLIEPTFVTHYPKAVSPLAKQDPSNPEFTQRFELFINGKEIANAYSELNDPLEQRKRFEQQLEEKQLGNDETSELDESFLEALSFGMVNTAGLGIGIDRLVMLLCECNSIRDVVFFPQLREHK

SEQ ID NO: 63461 - protein, 404 aa, Mycoplasma genitalium
MNVILSVMLFSSPSCVNINSFDILIVGAGISGIVLANILANHNKRVLIVEKRDHIGGNCYDKVDSKTQLLFHQYGPHIFHTNNQTVINFISPFFELNNYHHRVGLKLKNNLDLTLPFDFQQIYKLMGKDGRKLVSFFKENFSLNTHLSLAELQLIDNPLAQKLYQFLISNVYKPYSVKMWGLPFAMINENVINRVKIVLSEQSSYFPDAIIQGLPKSGYTNSFLKMLANPLIDVQLNCKDNLLVYQDEKLFFNNNLIEKPVVYCGLIDKLFNFCFGHLQYRSLAFSWKRFNQKKYQTYPVVNMPLAKSITRSVEYKQLTNQGSFKPQTIVSFETPGSYAINDPRFNEPYYPINNTLNDTLFKKYWKKASKLKNLHLLGRLATYQYIDMDKAILLSIKKAQQLLS

SEQ ID NO: 63462 - protein, 569 aa, Mycoplasma genitalium
MIKDFNPGDFIGKKPTKIYAFGGIQEVGKNMYGIEYDDEIIIIDCGIKFASDDLLGINGIIPSFEHLIENQSKVKALFITHGHEDHIGGVPYLLKQVDIPVIYAPRIAASLILKKVNEHKDAKLNKIVTFDDFSEFQTKHFKIDFYRVNHSIPDAFGICVQTPNGNIVQSGDYRFDFAAGSEMLDVHKVVKIAERNVHVFMSESTNAEVPGFSQSEKLIYRNIQKILKEARGRVILTTFASNITRINEIIEIALNNKRKICLLGKSMDVNVNISRKIGLMAIDSNDIVEVRDIKNYPDRNILILCTGSQGEEAAALNTMARGKHNWVSLKSTDTIIMSSNPIPGNYAAVENLLNELSKFGVAIYENSSQLKLHASGHATQQELQLMLNLMFPKYLIPIHGEFKMMRTIKNIANECGIKSEDVALLSNGQVMYLIDEELYYSNEIINADPIYIESHNSSPDLARIIKQRQILSRDGMFAVIVVFDKNNNIIGIPTLITRGCFFALDSNPLMTKIAHSVKRTLESVIQSKKFNSHEQLTKELKRVCKETVSYFIWKNKNRNPLISTVLSWI

SEQ ID NO: 63463 - protein, 531 aa, Mycoplasma genitalium
MKITFISGQEVSLGTSFLLFSKKIVMNELNQPLLAIIKNVAKTKNLSIEEVVFCLKTALEQAYKKHLNFVNVEVNINFDKGIINVEQLFNVVSDENEDYDDFLEIPLQAANKINSSLQLGDVLRKPIPLKNISSDLINKMIAIFNQKISETNFKAVMSEFSSEVGEVIEAKVEDIDTNKEGGLKGYIINLETTKGYISKRELSKGERLEIGKKYLFVIKEIQRQASLWPITLSRSDTRLLQFLLTSNTPEIENGTIVIKKIERSPGVKSKIAVISNDPAVDPVAAILGPKGEKIRGISEEFNGEIIDIVFWNEDKLKFLINAILPAEVIGYNILQDDERDTSIEVVVPANQIANVFGFKGVNIRLISNLTGWNSVDVYSEKDASEANIKFTRLSFEPEGLFGIKKRREKIISNDATDKVFYTSKDNVIDDEIIVDLAKDLMVDNKQKQPEQVAKQVVEKSQLEKQVTPKEKEKVQPKAKVHSNSHSKKPAKPNQIFSITVDASDKNLKKDQVDNNQTNPQTKQTFDSFDDL

SEQ ID NO: 63464 - protein, 619 aa, Mycoplasma genitalium
MKKNRAFNQVKKTKFDGRIKTSAKHQLRNVKTGVKDGVFIYKGPLTVSEFASKTNIAVANIIKHFFLNGLALTVNSVLTNEQLADACVNFGFDFKMETEVTHENIVANIQFEDSDDLLQPRPPIVTIMGHVDHGKTSLLDTIRKTNVTAKEFGGITQKIGAYQVKNHQNKTITFIDTPGHEAFTLMRARGAKVTDIVVLVVAADDGIKKQTEEAISHAKSANTPIIVFINKMDKPTANPDLVIQQLNKFDLVPEAWGGKTIFVMGSALTGQGINELLDNILLLGEVEGYQANYNAHSSGYAIEVQTSKGLGPIANVIVKRGTLKLGDIVVLGPAYGRVRTMHDENGNSLKQATPSKPVQISGFDIMPVAGEKFIVFDDEKDAKLIANKFKEQQKQKANNLTVNQTLKEQIKNKEIKILNLIFKADSDGSLQAIKQAVENINVAKISLSIIHAAVGQISESDIMLAKASGALLFSLNLGLSQTVKNIASLQGVKLEVHYHIPKLAEEIENILKGQLDPVYEEIEIGKAEVLQLWFHSKIGNIAGTIVKSGKIKRGNLCKLFRDKEIIFEGRIDSLKNEKTPVNLIETGKNCGIVINGCNDIKIGDIIVAYEKQIVKDGKL

SEQ ID NO: 63465 - protein, 269 aa, Mycoplasma genitalium
MKSLFIGYFDGLHQGHLFLKQNSKFEPMVLLIDNPPLKQTNWLYDLQQRVAQIKTYLKATVEVFDVAKHNMNALSFFEQQIKRLNCDEIIVGTDWHFGNDHKDGIWLKKLFKNTVIVNKTNLSSSVIRNYLTNNELEKANQLLVEPYYRVGTVVHGLKKARLLGFPTANIVMDNHLLTLNKGSYIVRVLLNNQTFYGIGFISQKDQDLVCETHIFNFNNEIYGSLVKFTLLKFIRTISKFSSQAALQKAIQSDANFALKWLENQNLDKI

SEQ ID NO: 63466 - protein, 424 aa, Mycoplasma genitalium
MDSAPSGLTLTVIILSIILLAFISTVVSAYETAITSLTPYRWKNYIKTNNKQDKLSTKIINHFQNHYSSCLITILITNNIVAIMVSNILFLALEQTIKNELLSSVLNLVVSGVLIVSFCEILPKTLGRINVIRTLVLFAYLVYFFYLIFWPITKLTSLILKKYENPLPVSRKDVYYFIDEIEQNGLFSKEDSLLIKKTLIFDQVLVKKVMIKWKKVAYCYLNDSINLIAKQFLQRQFSRMPVVDKTTNKIVGFIHLKDFFTAKEANPKSLDLNQLLYPVVLVQDSTPIKQALRQMRLNRAHLAVVNDKHEKTIGIVSMEDIIEELVGEIYDEHDDIQPIQVLDENVWLVLPNVKAAYFFNKWIKPDLVKSKNITIQHYLASLDNDSFACQNKLDTPLFSVEVIADSEDKTKILYEIRKKSDVIA

SEQ ID NO: 63467 - protein, 281 aa, Mycoplasma genitalium
MKLYRSLKAALLPGICTSILLASCASTNTYQDQRNALISLASNRDTLIANAKKSKEEVQKEVTKMNSSTSSMMTATQSVAITTHQTTEKTNNSKYDLDKLFKDYILYVVDNFSGLVFKRTGGHRIQLIDKDKEILDGGNLTKHTHHDHNHMHNHEHEHEEHHDEEETEVVGRALSFTNGIFLVIDYKKDSERKNMSGSTTMMHQHHHEAEEHKEERKLSLNLKAYKFNTPFNISEFISAWHHKESHNSDTEFNNLHNKYDKEELDIIDYNFEEKAVDETIA

SEQ ID NO: 63468 - protein, 106 aa, Mycoplasma genitalium
MNSAVKYPELKIKLESYDSTLLDLTIKKIVEVVKGVNIKIKGPLPLPTKKEVITIIRSPHVDKASREQFEKNTHKRLMILVDVNQGGIDSLKKIKIPVGVTLRFSK

SEQ ID NO: 63469 - protein, 257 aa, Mycoplasma genitalium
MDVRGIFGVKVGMSQIFTEQNECLPITIVYCEANQVAGIKTIAKDNYNATLLSFQTVDEKQLNKPKQGFFSKLKLEPHKYLREIRKMQGFELGKKITPQELFKIGEYVDVTSLTKGRGFTGAIKRWNFKIGPLGHGAGYPHRFQGSVQAGRGGSSAQRVFKGKKMSGHYGHEQVTIQNLFIVGFDEINKLVLVSGAIAGPEGGIVLIKTAKKKTGKIKDIKLAVQTVKAPQLKAPKKQKTKVETNQVNPKIEEEKTK

SEQ ID NO: 63470 - protein, 211 aa, Mycoplasma genitalium
MAKLKVIQFDGSFKGEIQPANHLLLKKAVIQPVFDAILLEQAACRQGTHSTLTKGEVSGGGKKPYKQKHTGKARQGSIRNPHYVGGGVVFGPKPNRNYKLKLNKKAYQLALTSAFAQKLNNNQVIVAEAKLFEQTNAKTKKMLTFLKNAKLTEQKLLFVIDTISKPLLLSTNNLKQIVVKQFNKVSVRDLLLAKTIIIEKAAFTKLEERLK

SEQ ID NO: 63471 - protein, 106 aa, Mycoplasma genitalium
MDVTNILLKPVLTEKSYLNQMGELKKYVFAINPKATKTKVKLAFEIIYGVKPLKINTLIRKPVTIRNGTKYPGFSKLAKLAVITLPKGMDIAITGEKTTKKETKDQ

SEQ ID NO: 63472 - protein, 285 aa, Mycoplasma genitalium
MAIKKIISRSNSGIHNATVIDFKKLLTNSKPEKSLLVTLKKHAGRNNQGKITVRHHGGRHKRKYRLIDFKRYHYDNLKATVKSIEYDPNRSCFISLLHYQNGVKTYIISPDGIKVGDQVYSSDHAIDIKLGYCMPLAFIPEGTQVHNIELNPKGGGKIARSAGSYARILGQDETGKYIILQLISGETRKFLKECRATVGVVSNLDHNLVVIGKAGRSRHKGIRPTVRGSAMNPNDHPHGGGEGRSPVGRDAPRTPWGKRHMGVKTRNMKKHSTNLIIRNRKGEQY

SEQ ID NO: 63473 - protein, 87 aa, Mycoplasma genitalium
MSRSSKKGAFVDAHLLKKVIEMNKQAKKKPIKTWSRRSTIFPEFVGNTFSVHNGKTFINVYVTDDMVGHKLGEFSPTRNFKQHTANR

SEQ ID NO: 63474 - protein, 144 aa, Mycoplasma genitalium
MIAFAKQYRVHISPQKARLVCQLIVGKKINDAQNILLNTPKKAAYFLTKLLNSAISNATNNHGMSGDLLYVFECVANQGPSMKRTIARAKGSGSVLTKRSSNLVIKLSDNPNERKLLLTQQKELVKKRTMGHKKEKAKQKQKQQ

SEQ ID NO: 63475 - protein, 268 aa, Mycoplasma genitalium
MGQKVNSNGLRFGINKNWISRWTASSNQQTATWLVQDEKIRNLFFINYRNAQVSNVEIERTQTTVDVYVYAAQPALLIGSENKNIQKITKMIQIIVGRKIKLDLTINEIGSPMLSSRIIARDIANAIENRVPLRSAMRQALTKVLKAGANGIKVLVSGRLNGAEIARDKMYIEGNMPLSTLRADIDYAFEKAKTTYGIIGVKVWINRGMIYAKGLNRTPAHILHPQKKQLKTPTIKKTNSVIAKQKLTGSDIETASLKALTDNNQNHE

SEQ ID NO: 63476 - protein, 138 aa, Mycoplasma genitalium
MLQPKRTKYRKPHNVSYEGHTKGNGYVAFGEYGIVATKGNWIDARAIESARVAISKCLGKTGKMWIRIFPHMSKTKKPLEVRMGSGKGNPEFWVAVVKKGTVMFEVANIPEQQMIKALTRAGHKLPVTWKLMKREENS

SEQ ID NO: 63477 - protein, 200 aa, Mycoplasma genitalium
MTIAKELKQKSNEELVKLVIKLKGELLEYRFKLAHGELDKPHLIAKVRKLLAVVLTILTERKLNWQVEKDKYKLLSRKTNELIVNSWKQKLSTKPESKQETKKAEVKPKVESKPESKQETKKAEVKPLKQETKKVEVKPKVEPKPLKQETKKVEARIETKTKVESKPLKQEVKKVEAKKSVSKPQKPVKAKMIKTKEKKQ

SEQ ID NO: 63478 - protein, 85 aa, Mycoplasma genitalium
MKRNQRKQLIGTVVSTKNAKTATVKVTSRFKHPLYHKSVIRHKKYHVHNFGELVANDGDRVQIIETRPLSALKRWRIVKIIERAK

SEQ ID NO: 63479 - protein, 122 aa, Mycoplasma genitalium
MVSFMTRLNVADNTGAKQVGIIKVLGATYKRYAFLGDVVVVSVKDAIPNGMVKKGQVLRAVIVRTKKGQQRQDGTHLKFHDNACVLIKEDKSPRGTRIFGPVARELREKGYNKILSLAVEVV

SEQ ID NO: 63480 - protein, 108 aa, Mycoplasma genitalium
MQRIRKGDKVVVITGKNKGGSGIVLKVLTKQNKAIVEGINKVTVHKKEQVNKRSKQTNPTTKEAPLPLNKLALFDQKAKQQTIGKIKYQIDPKTKQKTRVFKKTNNAI

SEQ ID NO: 63481 - protein, 180 aa, Mycoplasma genitalium
MNNLEKTYKTELVNQLQQQLGFSSIMQVPKLTKIVVNMGVGDAIRDNKFLESALNELHLITGQKPVATKAKNAISTYKLRAGQLIGCKVTLRNKKMWSFLEKLIYIALPRVRDFRGLSLRSFDGKGNYTIGIKEQIIFPEIVYDDIKRIRGFDITIVTSTNKDSEALALLRALKMPFVKE

SEQ ID NO: 63482 - protein, 61 aa, Mycoplasma genitalium
MAKKSLKVKQSRPNKFSVRDYTRCLRCGRARAVLSHFGVCRLCFRELAYAGAIPGVKKASW

SEQ ID NO: 63483 - protein, 141 aa, Mycoplasma genitalium
MIINKVPKAHFDPVSDLFTKINNARKAKLLTVTTIASKLKIAILEILIKEGYLANYQVLENKTKTKKLVSFTLKYTQRRICSINGVKQISKPGLRIYRSFEKLPLVLNGLGIAIISTSDGVMTDKVARLKKIGGEILAYVW

SEQ ID NO: 63484 - protein, 184 aa, Mycoplasma genitalium
MSKIGNRSIKIDPSKVSLMQTTTLLTIKGPLGENTIKLPKNLPLKFVVENDTIKVTNNNNLKQTKILHGTFNALVNNAVIGVTKGFEKKLILVGVGYRANVEGQFLNLQLGYSHPIKELIPNQLTVKVEKNTEITISGIKKELVGQFATEIRKWRKPEPYKGKGVLYFNEVIVRKQGKTAEGKK

SEQ ID NO: 63485 - protein, 115 aa, Mycoplasma genitalium
MTRNDKRRIRHKRIVKKIRLTNLNNRVVLIVIKSLKNISVQAWDFSKNVVLTSSSSLQLKLKNGNKENAKLVGMDIATKLIKLNQKDVVFDTGGSKYHGRIAALAEGARAKGLNF

SEQ ID NO: 63486 - protein, 211 aa, Mycoplasma genitalium
MNDQKTTNTGLLTSTLKTKPKHNLKPSSEAIKKAVSKKEGHYKNKRFQKHNFNNKSEFEERIVKLKRISKTTKGGRNMRFSVLVVVGNKKGKVGYGIAKALEVPLAIKKAIKKAHNSIHTVEIHKGSIYHEVIGRKGASKVLLKPAPLGTGIIAGGAIRAIVELAGFSDIYTKNLGRNTPINMIHATMDGILKQLSPKKVALLRNKPISDL

SEQ ID NO: 63487 - protein, 150 aa, Mycoplasma genitalium
MELHQLKSVSKSRNHKSKVVGRGHGSGLGKTSSRGQKGQKARKSGLTRLGFEGGQTPLYRRLPKYGVANKGILKKRWVVLNLNKVAKLNLKTVTRATLIEKKVISKKNNLPLKLIGNTKLTTPIHFEVQKISKNALNAVQTSKGSVKIIT

SEQ ID NO: 63488 - protein, 475 aa, Mycoplasma genitalium
MQTVSSPKQKLNFGQRLLTLLQNRDFMVSLVLTVVLLILFRVLAIIPLPGIRINESVLDRNSNDFFSLFNLLGGGGLNQLSLFAVGISPYISAQIIMQLLSTDLIPPLSKLVNSGEVGRRKIEMITRIITLPFALVQAFAVIQIATNAGTGSSPISLANSGSEFIAFYIIAMTAGTYMAVFLGDTISKKGVGNGITLLILSGILSQLPQGFIAAYNVLSGIVITLTPQLTAAISFFIYFLAFLVLLFATTFITQATRKIPIQQSGQGLVSEVKTLPYLPIKVNAAGVIPVIFASSIMSIPVTIAQFQPQTESRWFVEDYLSLSTPVGIFLYAVLVILFSFFYSYIQINPERLAKNFEKSGRFIPGIRPGNDTEKHIARVLIRINFIGAPFLTVIAIIPYIVSYFIRLPNSLSLGGTGIIIIVTAVVEFISALRSAATATNYQQLRRNLAIEVQQTAKQDSLEQLQKEAPGIGNLW

SEQ ID NO: 63489 - protein, 214 aa, Mycoplasma genitalium
MVAQFNKFIILGPPGAGKGTVCKLLSKTTKLVHIASGDLFREAIKNQSVIGRKIAAIISQGGYVDDATTNQLVYEYITTNPLPNGFILDGYPRTENQLDFLNIKLTIDMVFELVVSDLNKLITRIDNRVICNNCNSVYNLLFQKPLVENSCDQCSAKLVKRSDDNKAVVKARMELYQQTIQPIHTYFFNKQLLVQIDCFLPLEEQLKTIKQFIR

SEQ ID NO: 63490 - protein, 70 aa, Mycoplasma genitalium
MKNDKLFLTGKILEIIHGDKYRVMLENNVEVDAHLAGKMKMKRTKILPGDVVEVEFSPYDLKLGRITQRK

SEQ ID NO: 63491 - protein, 37 aa, Mycoplasma genitalium
MKVRASVKPICKDCKIIKRHRILRVICKTKKHKQRQG

SEQ ID NO: 63492 - protein, 124 aa, Mycoplasma genitalium
MARILGIDIPNQKRIEIALTYIFGIGLSSAKTILKKAKINPDKRVKDLSEEELVAIRNAASGYKIEGDLRREIALNIKHLTEIGSWKGIRHRKNLPVRGQRTRTNARTRKGPRKTVANKKIESK

SEQ ID NO: 63493 - protein, 131 aa, Mycoplasma genitalium
MAKKKKINVPSGLIHVSCSPNNTIVSATDPSGNVLCWASSGTVGFKGFRKKTPYSAGVAADKVAKTVKEMGMGSVKMYLKGTGRGKDTTIRSFANAGITITEINEKTPIPHNGCKLLSVRANQNNNLWKNF

SEQ ID NO: 63494 - protein, 328 aa, Mycoplasma genitalium
MEKFLKYEIKVNNNQPTNTNPNYGIFEVAPLESGFGITIGNAMRRVLLSCIPGASVFAIAISGVKQEFSNVEGVLEDVTEMVLNFKQLVVRISDLLFEDGEMIEPPLERWPVLKVTAEKKGAVYAKDLECPAGFEVINKDLYLFSLQKDMKLTVSVYVKQGRGFTSFLENRELINSLGIIATDANFSPVLHCGYEVQEVKTSKQKLTDHLTFKIATNGAIKAVDAFAMAAKILIEHLNPIVSVNESIKNLTIIQEKAEERKVKSFAKQIEELDFTVRTFNCLKRSGIHTLQELLSKSLTDIREIRNLGKKSEREIIKKVQELGLKFRS

SEQ ID NO: 63495 - protein, 123 aa, Mycoplasma genitalium
MSYINKEGKTTAWRVMTVRQQVSAVLSYGKIQTTLKKAKNTQKRLEKIITIAKVDNFNNRRAVKKWLLNTNSLDVDQLTNHLFKKVAPRFLKRNGGYSRVLKLGVRRGDSTEMAILQLIDATN

SEQ ID NO: 63496 - protein, 274 aa, Mycoplasma genitalium
MLPTKQAACSFINVAFSYNELPLIRELSFSVYEGEYVCIVGHNGSGKSTISKLLTGLLKPQAGEIKIFGKTVDFDNVSYLRNNIGIIFQNPDNQFIGITVEDDIAFGLENKCFSRQKIKAIIDEVTLQTQTDGFIKQEPHNLSGGQKQRVAIASVLALNPAIIIFDESTAMLDPKAKKTIKQFMVKLAKQGKCVISITHDMEEVTKADKVLVMNEGKLIKQGKPVEVFTSEQELQKIRLDIPFSLSLSTKIRGITSTIDYQTLIKSIAKLWKKR

SEQ ID NO: 63497 - protein, 304 aa, Mycoplasma genitalium
MKKKIVPINPLKADEILAVSHLSCVFNSKTNNPIKVIDDFSYTFQKNQIYCIIGDSGSGKSTLVNHFNGLIKPNQGDIWVKDIYIGAKQRKIKNFKKLRKTISIVFQFPEYQLFKDTVEKDIMFGPVALGQSKYDARQKAAYYLEMMGLKYPFLERNPFELSGGQKRRVAIAGILAIEPEILIFDEPTAGLDPEGEREMMQLIKTAKQQQRTVFMITHQMENVLEVADVVLVLAKGKLVKAASPYEVFMDQTFLEKTTIVLPPVIQVIKDLIAINAHFNKLIELQPKNLEQLASAINKTIANHG

SEQ ID NO: 63498 - protein, 420 aa, Mycoplasma genitalium
MDNFINGYIPRNSFVHKLHPTTKLVIFLLLVILVFVPIGFVFQSVIFLFVTFVFFIAKLPGRFYSSAIKSITLLFLLLLFVNWFTFRDPGFYLTSDQLNSLPAIDNSKFSFWNISLFNYQDNVFSQVFAFNRGNLTNLNQLDFFYKANNADSYTKVKGIDSLASMLANNGNGLSKDKILSAFLDHNLNLYLARSWGANFAGFVVDFNPTTQLFKLTPFLANASYVLTLRAVILAFYVTQKILIMILFATVLTSTSSSVELAYGIERLLWPLKLIKIPVNVFAMTIAIAIRFVPSLLLESQRILNAQASRGLDFRNGGFLVKMRSLSSLVVPMVSIAFRNASELASAMEARGYHPAKKRSSYRQYKITWIDILALFLVFAWFVVIIFLTIRGAVFLDLGTPEWLLTGKINEQVIRDLKVSG

SEQ ID NO: 63499 - protein, 244 aa, Mycoplasma genitalium
MARYLGIVSYDGSYFKGWAIQPNLATIQGLLEQSFSLIIGRKIKVIGSGRTDKGVHAINQTFHVDINGEINLNLLIRKINQLIKPHCIVKTLVLVNDSFHARFQVKTKVYEYLINCGNLNPLQFNYVWQLNQQLDLEKLKADATLFLGKKNFLSFSSSIHTDSIRTISKITIQKETNQLVRLTFFGSGFLRSQVRMIVACLVNLNTNKMALETVAKLFEHPKKGSCVVKAPSCGLYLKTVVYEK

SEQ ID NO: 63500 - protein, 1052 aa, Mycoplasma genitalium
MKTMRKQIYKKAYWLLLPFLPLALANTFLVKEDSKNVTAYTPFATPITDSKSDLVSLAQLDSSYQIADQTIHNTNLFVLFKSRDVKVKYESSGSNNISFDSTSQGEKPSYVVEFTNSTNIGIKWTMVKKYQLDVPNVSSDMNQVLKNLILEQPLTKYTLNSSLAKEKGKTQREVHLGSGQANQWTSQRNQHDLNNNPSPNASTGFKLTTGNAYRKLSESWPIYEPIDGTKQGKGKDSSGWSSTEENEAKNDAPSVSGGGSSSGTFNKYLNTKQALESIGILFDDQTPRNVITQLYYASTSKLAVTNNHIVVMGNSFLPSMWYWVVERSAQENASNKPTWFANTNLDWGEDKQKQFVENQLGYKETTSTNSHNFHSKSFTQPAYLISGIDSVNDQIIFSGFKAGSVGYDSSSSSSSSSSSTKDQALAWSTTTSLDSKTGYKDLVTNDTGLNGPINGSFSIQDTFSFVVPYSGNHTNNGTTGPIKTAYPVKKDQKSTVKINSLINATPLNSYGDEGIGVFDALGLNYNFKSNQERLPSRTDQIFVYGIVSPNELRSAKSSADSTGSDTKVNWSNTQSRYLPVPYNYSEGIIDADGFKRPENRGASVTTFSGLKSIAPDGFANSIANFSVGLKAGIDPNPVMSGKKANYGAVVLTRGGVVRLNFNPGNDSLLSTTDNNIAPISFSFTPFTAAESAVDLTTFKEVTYNQESGLWSYIFDSSLKPSHDGKQTPVTDNMGFSVITVSRTGIELNQDQATTTLDVAPSALAVQSGIQSTTQTLTGVLPLSEEFSAVIAKDSDQNKIDIYKNNNGLFEIDTQLSNSVATNNGGLAPSYTENRVDAWGKVEFADNSVLQARNLVDKTVDEIINTPEILNSFFRFTPAFEDQKATLVATKQSDTSLSVSPRIQFLDGNFYDLNSTIAGVPLNIGFPSRVFAGFAALPAWVIPVSVGSSVGILFILLVLGLGIGIPMYRVRKLQDASFVNVFKKVDTLTTAVGSVYKKIITQTGVVKKAPSALKAANPSVKKPAAFLKPPVQPPSKPEGEQKAVEVKSEETKS

SEQ ID NO: 63501 - protein, 341 aa, Mycoplasma genitalium
MIDQNKLITKWKKAFAKAKNLTTLVNLKNTLHNSDLKPLLQKIKTATKLSEKSSLGKLYQSLDIQLTDLLTSYKKTFEINNQVSQKPSLDVMLPATEFTNGSNNALYQVIDNLVEYFKSFLFTINFDSELTSISDCFDLLNIPKDHSSRNESDSFYIDKTSLLRTHCTATTLKAVRTSKKTNNPDIRVVSLGAVFRNDSDDATHSHQFTQLDFMWIKKGLSLANLKWFINNMITHFFGENTFTRFRLSHFPFTEPSFEIDIRCWLCQNGCSICKQTKWIEILGAGIIHPQVMNNMGIGDTENITGIAAGIGIERLAMLKYGIDDIRDFYDNNFKFLTQFTD

SEQ ID NO: 63502 - protein, 806 aa, Mycoplasma genitalium
MLISKKTLGVLIPDIFSFSNDQIAQKLEQMGIEVESIKQFNSPDYLQLAKVVSIQPHPHDNKLFICELQIDKNKFINVVSNANNINNPDNINKFVIVAKKGTELLNGLIVKTQNIKGIISEGILCSYIDINPFSRQIIEKTEVADAIIIDHVSNDHDWNQYLSFLSLDDVIFDVKTPTNRADLHSLIFLAKELGVLLKTKTFLKQKSSVVNHDFFKFPLNLKNKLKANYFGGLFLRQINQHSSPWTVKGLLINQMIKPVNYYVDKANLVTVFTAQPIHCHDADRIVGNIELKQATHNETFVGLDDKQYEIEPGDIVVCDEKGIIALVGIIGSKRTMVQPTTTNIFFEVVNCNSETIKQTAKRFLINNFASKFMVKPISLLATDNCLNYLQNSLLTTDNIGKISHFSSSLKVEPFSKKLTVNFHKIRQLIGIEKKELTDQTIKKSLSQLGFKVDNQLLKIPSYRQDINTWQDISEEIVKLIDINKLKPIGITSSFNFEKSSYFNTFNALTKLRKKLQTLGFHNVITYQLTDQKSAKTFNLFNLENFITIKNPVSQNHSVMRVSLIDSLLKVLKTNNNYKNELVNIFEFSFIKTQNNSELHLAVLWVEKLFTSSFNPMQGISNDVFTMKGLAKLIVANLGFSCDFEPLDDSDYFVNNQSLKIVVFNEQIGFIGLIKESLLNNYDLNNKPIYCLEINLDRMLSSLNRIEKNYLGYSKLQPVCKDLTFSFTNPASHFDQFANMIKRITGIESWKLISVFETMQNNQLITKYTVRYFLKNDANKPLTNQTIELITNNLKLQCEKLKIKLDI

SEQ ID NO: 63503 - protein, 181 aa, Mycoplasma genitalium
MAQNAKHPSKKEQKPLVNEQIAFNQFTLIDENSTNLGIVKMENALKLAQEKQLDLVLIAPNPTKPIVKLLDFGRYTYDLKRKKRQAKKNQTIIQTKEVVVKPTIAKHDLEFRAKQSKNWIEKGHHVKFIVRAFGRVSTRIELIEKVFDDFYQLVKDVVEIQKPLTASSKTMYAALLVPLKR

SEQ ID NO: 63504 - protein, 59 aa, Mycoplasma genitalium
MKTKSAAVKRFKLTKSGQIKRKHAYTSHLAPHKSTKQKRHLRKQATVSNSELKRIGILI

SEQ ID NO: 63505 - protein, 124 aa, Mycoplasma genitalium
MRVKGTNTTRIRRKKWLKQASGSFGTRKASFKAAKQTVIQASKYAYRDRRQKKREFRSLWILRLNAALRAQGMTYSVFINELKKAKIVINRKVLSELAIKEPNKLNLIINTIKKPTNKPTVAKT

SEQ ID NO: 63506 - protein, 633 aa, Mycoplasma genitalium
MKSNYSATNIKILKGLDAVKKRPGMYIGSTDSKGLHHMLWEILANSVDEVLAGYATNITVTLDLNNTITVSDDGRGIPYEIHQDSNISTIDTVFTFLHAGGKFDDQSYKLAGGLHGVGASVVNALSDHLEVTVKRNGQIYQSVYQAGGKIIQKAKKIGDTTSHGTTVSFHADPKVFKKAQFDSNIIKSRLKELSFLFAKLKLTFTDQKTNKTTVFFSTSGLVQFLDEINNTVETLGQKTLIKGEKDGIEVEVVFQFNQSDQETILSFANSIKTFEGGSHENGFCLAISDVINSYCRKYNLLKEKDKNFQLSEIRQGLNAIIKVNLPEKNIAFEGQTKSKLFSKEVKNVVYELVQQHYFQFLERNNNDAKLIIDKLLNARKIKEQIKQQRELKKSLSSPQKEKILFGKLAPCQTKKTSEKELFIVEGDSAGGTAKMGRDRIFQAILPLRGKVLNVEKINNKKEAITNEEILTLIFCIGTGILTNFNIKDLKYGKIIIMTDADNDGAHIQILLLTFFYRYMQPLIELGHVYLALPPLYKLETKDRKTVKYLWSDLELESVKLKLNNFTLQRYKGLGEMNADQLWDTTMNPTTRKLVQVKLDDLINAEKQINIFMGEKSDLRKHWIEANINFSVEN

SEQ ID NO: 63507 - protein, 781 aa, Mycoplasma genitalium
MDQKNNNLFQKAIEEVFAVSFSKYAKYIIQDRALPDLRDGLKPVQRRILYGMFQMGLKPTTPYKKSARAVGEIMGKYHPHGDSSIYDAIIRMSQSWKNNWTTVSIHGNNGSVDGDNAAAMRYTETRLSLYGFELLKDIDKKLVSFINNFDDSEKEPTVLPTLLPNLFINGASGIAAGYATNIAPHNTNELLDSLCLRIDQPNCELKQILKIVKGPDFPTGGNVYFEKSLSDIYQAGKGKFIIQAKYEVNKNLNQIEITQIPYETLKANIVKQIEEIIFDNKLSAIESVIDSSDRNGIRIIIKHKDFLPAEKIMAFLFKHTQLQVNFNLNNTVIANRFPIQIGLLSYLDHFLKFCHELIINKAKYELELASKRLEIILGLIKAISIIDKIIKLIRSAVDKSDAREKLIDNFKFTFNQAEAIVSLRLYQLTNTDIFELNQEQNELEKTVISSEQLIASEKARNKLLKKQFEGYKKQFHQQRRSQICGFINQKKVEESELIENKTYGVLITKAGNYHKFESNQLLKSTTDFKSESDTIIFAQTIANTDQIFIVTSLGNIINIPVYKLAFNSKNKLASLVSKKPILLEYETIVFVGTMNSVNQPILVLTSKLGMVKRIDLTKLNIKPLKATLCISLRDKDHLVSAFLQQDDKLICLVSDHNYYTVFHTNEIPLISSKGMGVKGMKLKLEDQIKFVVAFEANEPLVMICSDGSVINLKQTELVVVSRMATAKKLPVKKAINYCFSDATNTQLINFQGKNGSKLITTSELNQMSKTAISQTRFNKLN

SEQ ID NO: 63508 - protein, 114 aa, Mycoplasma genitalium
MVVGIGIDVVQLKRFLTLVETSDCFAKRLLTSNELNSYWKLNNNQRANFLAVHWTLKEAIYKATSHIKPLFTKLEIYKLNNQYRCEFIQNINLLLSVSYTNCHVSAICLAQQNG

SEQ ID NO: 63509 - protein, 268 aa, Mycoplasma genitalium
MDKLFKTSFRFIIRFLQILSLPVVFPYFLLSFLACLITSKNYESLPYNYPPEIRFKKVYRLVSMWLYIKGIKVVTVNDKIIPKKPVLVVANHKSNLDPLVLIKAFGRLKNSPPLTFVAKIELKDTVLFKLMKLIDCVFIDRKNIRQIANALETQQQLIRQGTAIAVFAEGTRILSNDIGEFKPGALKVAYNAFVPILPVSIVGSLGKMESNKRLKEHGVKKSSNYEVKVIFNKLINPISFNQIDSNNLANNIRSIISDAYTSEKPSND

SEQ ID NO: 63510 - protein, 471 aa, Mycoplasma genitalium
MISLIFDKSNSFNPQLCVELLNHFKVVMLTKTIVVDYPSFQAWKAQLKPFKLAVFSDNLQTELTPNSKLTVFNNYQQLLVDNNDLIIFATPTLVQLFDNEIDQLIVINPTSKSKDQFNCNWNDFVLIKQTNFKNHQVGYFDKKSSYEPPFTVVTDHFFGNLTDLFSLLVDKKVSVNDVDIGLISLQYLNIIANYTNKKAIEKITDYLVITSKILAKKADNLLNDHQEESVLEYDLATNNFRDKMIANLVEHKRYCDSLGEFEKLRVNRLAYFSKANEMEQFIKTANDQLVTVEDQLPNYISVLKLFHAMNKLLEMRLSSLLTNKNITIKELSVEQVQKELVLAIKQFNYQTVSLKRVLLKLNHPISLMYFVTAFVALLVLLNNQVIGLEQKDYHSELYIFLLDENQLKTFQESPDEMVKRIQAQQQQNELIIAKNKQLRAIKNKQKRADYLKKKYGENYLDKTNLKDENNN

SEQ ID NO: 63511 - protein, 323 aa, Mycoplasma genitalium
MDKIAILTSGGDASGMNATIAYLTKYAIAKQLEVFYVKNGYYGLYHNHFITSKELDLTDFFFMGGTVIGSSRFKQFQDPSLRKQAVLNLKKRGINNLVVIGGDGSYMGAKALSELGLNCFCLPGTIDNDVNSSEFTIGFWTALEAIRVNVEAIYHTTKSHNRLAIIEVMGRDCSDLTIFGGLATNASFVVTSKNSLDLNGFEKAVRKVLQFQNYCVVLVSENIYGKNGLPSLEMVKEHFENNAIKCNLVSLGHTQRGFSPNSIELFQISLMAKHTIDLVVNNANSQVIGMKNNQAVNYDFNTAFNLPKADRTKLLNQVNTAII

SEQ ID NO: 63512 - protein, 508 aa, Mycoplasma genitalium
MIDHLKRTKIIATCGPALTKSLVSLKMLDDNEYAAIKKVAYANIEAIIKSGVSVIRLNFSHGTHEEQQVRIKIVRDVAKAMNIPVSIMLDTNGPEIRIVETKKEGLKITKDSEVIINTMSKMIASDNQFAVSDASGKYNMVNDVNIGQKILVDDGKLTLVVTRVDKQHNQVICVAKNDHTVFTKKRLNLPNAQYSIPFLSEKDLKDIDFGLSQGIDYIAASFVNTVADIKQLRDYLKLKNASGVKIIAKIESNHALNNIDKIIKASDGIMVARGDLGLEIPYYQVPYWQRYMIKACRFFNKRSITATQMLDSLEKNIQPTRAEVTDVYFAVDRGNDATMLSGETASGLYPLNAVAVMQKIDKQSETFFDYQYNVNYYLKNSTANKSRFWHNVVLPLTKKTVPKRKLVNSAFKYDFIVYPTNNINRIYALSNARLAAAVIILTNNKRVYTGHGVDYGIFCYLIDKNPNQLTKAELIELAWKAINHYQAYGDLEKLKQCLAVYNETIINL

SEQ ID NO: 63513 - protein, 1805 aa, Mycoplasma genitalium
MKPFDKKPSLQPIYDIGFDDGYLQSEYEKNRSKTDVDKIENQLLKEIKSLEDELKNLKGLKNQAEDNPELDKKINHLEVDLNRLVNEYKNFQFQKNHMVDKVSELDNLTRFYKNELTRLQQENADFLNSKYANLANFQANYHNKLNDFHRLIENQNQTINRLNQKINGNQNLIDNNVALLQNPNITVEKKNYLLNVIDQLYNELDQLENQKRLLSIEYENTYRELVSADNELQNVYENIDQNQIQFKHQYQTYRDELSQLERKIQLTKQELVDKESALRVKIDDADFYINARLAELDDVAKQLSFQDGITKQNAQHVEDKLVALNKEKDRLNTQKEAFFNLRQSALIDINKLQQENELFAKHLEHQQNEFEQKQSDSLLKLETEYKALQHKINEFKNESATKSEELLNQERELFEKRREIDTLLTQASLEYEHQRESSQLLKDKQNEVKQHFQNLEYAKKELDKERNLLDQQKKVDSEAIFQLKEKVAQERKELEELYLVKKQKQDQKENELLFFEKQLKQHQADFENELEAKQQELFEAKHALERSFIKLEDKEKDLNTKAQQIANEFSQLKTDKSKSADFELMLQNEYENLQQEKQKLFQERTYFERNAAVLSNRLQQKREELLQQKETLDQLTKSFEQERLINQREHKELVASVEKQKEILGKKLQDFSQTSLNASKNLAEREMAIKFKEKEIEATEKQLLNDVNNAEVIQADLAQLNQSLNQERSELQNAKQRIADFHNDSLKKLNEYELSLQKRLQELQTLEANQKQHSYQNQAYFEGELDKLNREKQAFLNLRKKQTMEVDAIKQRLSDKHQALNMQQAELDRKTHELNNAFLNHDADQKSLQDQLATVKETQKLIDLERSALLEKQREFAENVAGFKRHWSNKTSQLQKIYELTKKQESEQTQKETELKIAFSDLQKDYQVFELQKDQEFRQIEAKQRELDKLAEKNNQVKLELDNRFQALQNQKQDTVQAQLELEREQHQLNLEQTAFNQANESLLKQREQLTKKIQAFHYELKKRNQFLALKGKRLFAKEQDQQRKDQEINWRFKQFEKEYTDFDEAKKRELEELEKIRRSLSQSNVELERKREKLATDFTNLNKVQHNTQINRDQLNSQIRQFLLERKNFQRFSNEANAKKAFLIKRLRSFASNLKLQKEALAIQKLEFDKRDEQQKKELQQATLQLEQFKFEKQNFDIEKQRQLVAIKTQCEKLSDEKKALNQKLVELKNLSQTYLANKNKAEYSQQQLQQKYTNLLDLKENLERTKDQLDKKHRSIFARLTKFANDLRFEKKQLLKAQRIVDDKNRLLKENERNLHFLSNETERKRAVLEDQISYFEKQRKQATDAILASHKEVKKKEGELQKLLVELETRKTKLNNDFAKFSRQREEFENQRLKLLELQKTLQTQTNSNNFKTKAIQEIENSYKRGMEELNFQKKEFDKNKSRLYEYFRKMRDEIERKESQVKLVLKETQRKANLLEAQANKLNIEKNTIDFKEKELKAFKDKVDQDIDSTNKQRKELNELLNENKLLQQSLIERERAINSKDSLLNKKIETIKRQLHDKEMRVLRLVDRMKLAEQKYQTEINRLRTQTFDSEKQDIKNFFPPLFKINGNDMAFPYLYPWLYPQQKQDDNTLQIRQLFEQQLQFMQQRYENELNELRRQRNLLEKKLDQIQLESQLNNKQSEFSKVESMMEKLLEKTESRLNDFDQKINYLTKKVNQHNTYQPSSYQPTPSYQDSDKQQLLFRIQELEKQNLFQQQFQPAPAVVQQPTSFAAPNITKQQQIAQLNAEINNIKRLIAQKAASK

SEQ ID NO: 63514 - protein, 154 aa, Mycoplasma genitalium
MFKSVAKCDKVEKMLLGTFNLTLDNKNRISLPAKLRSFFDSSIVINRGFENCLEIRKPADFESYFQTFNNFPNTQKDTRTLKRLIFANANLVELDSANRILIPNNLISDAKLDKEIVLIGQFDHLEVWDKVQYEQYLASSESLETVAERMKDAK

SEQ ID NO: 63515 - protein, 309 aa, Mycoplasma genitalium
MLNNQQIHQSVLINEVIHNLNINPCGNYLDLTAGFAGHSQKILEKLTTGTLTINDVDKESINFCQKLFFKNNNVVIIHDNFANFPVHLKQLSITKFDGILMDLGVSSHQLNQPNRGFSFKNDGPIDMRMDQSNQKNTALTVLKNLTEQKLSLILKKYGDIKHPKPIAIGLKKAVQTEKNLTTTQLAKVVKECATGFEKYQSRNYLAKVFQAIRIYLNDEITNLKTALTFIPNLLKNNSRFLVIVFHSIEEKIVRNFIAKLTSFIQPEALPIKLTPAYQLITKKPILPSQKELELNPRSRSAKLFVIQKN

SEQ ID NO: 63516 - protein, 369 aa, Mycoplasma genitalium
MDENETQFNKLNQVKNKLKIGVFGIGGAGNNIVDASLYHYPNLASENIHFYAINSDLQHLAFKTNVKNKLLIQDHTNKGFGAGGDPAKGASLAISFQEQFNTLTDGYDFCILVAGFGKGTGTGATPVFSKILKTKKILNVAIVTYPSLNEGLTVRNKATKGLEILNKATDSYMLFCNEKCTNGIYQLANTEIVSAIKNLIELITIPLQQNIDFEDVRAFFQTKKTNQDQQLFTVTHPFSFSFDSKDSIEQFAKQFKNFEKVSYFDHSIVGAKKVLLKANINQKIVKLNFKQIQDIIWTKIDNYQLEIRLGVDFVTTIPNIQIFILSEHKNPVSLPIDNKSTENNQNKLKLLDELKELGMKYVKHQNQIY

SEQ ID NO: 63517 - protein, 459 aa, Mycoplasma genitalium
MTMFDVGPFSYLVLGLTSFAILGVVLSFSRLSVLCGNSAYGGSYLIAKKAVGTNSKTKRFFVFLSGWNVSLTGSFNGVVIPAVLIFSFADIPVVKANNNIIIGLLVGGFLLFGLLTFISLFGLKINKKAIFYFAVIKWIVVIGGFILGIYLIGTTNGKGFVENNLIGTRENIDFFKIIFISLALTIAFAGTEDLASITPDVKSNNLRKCFLIAFGCVVLLYLVGFVIISGLDGIRGYGLALGNKDPKAINNYGSIYRLVGGVPLLVIYGLGLLVNSLASRLSMTITTARKYVALAQDGFLPSFLAKTNKHNEYHHAVLISNLMTLLVMLIMVIIPFLPDHNNNNNSLFNAIEQLVTVTIEMAAAISLIQYFITFIFFFMIFAKKENQKLIPLWEKVSYVISFALVSVLLFVPLFPFNQWTVFNTFKIVVLICFYLLGVGFFGYAEWKNKNKYQLMNNNS

SEQ ID NO: 63518 - protein, 287 aa, Mycoplasma genitalium
MKQYLDLASYVLANGKKRKNRTDTDTLSVFGYQMKFDLTNSFPLLTTKKVNWKAIVHELLWFIKGDTNIKYLVDNGVNIWNEWPYENFKKSPSFQNETLQEFILKVKTDNEFAKQFADLGPVYGKQWRNFNGVDQLKKVIQEIKENPNSRRLIVSSWNPSELEKMALAPCHSLFQFYVEEDKLSLQLYQRSGDIFLGVPFNIASYALLVYLVAHETKLKPGYFIHTLGDAHIYENHIEQIKLQLTRTTLDPPQVVLKSDKSIFAYSFDDIELVGYNYHPFIYGRVAV

SEQ ID NO: 63519 - protein, 160 aa, Mycoplasma genitalium
MLIAIWAMTQEGLIGNNNTLPWMIKQELAHFKKTTLFQALLMGRKTYESLPKVFEKRTIFLLSKDQNYRFEEKGSEVKVINDFWPLIKSYQANKEKDLFICGGKSVYEQTINECDQLIVSIIKKKYKGDQFLKVDLSKFVLNEVVEFEEFNVNYYRKKQQ

SEQ ID NO: 63520 - protein, 340 aa, Mycoplasma genitalium
MAANNKKYFLESFSPLGYVKNNFQGNLRSVNWNLVDDEKDLEVWNRIVQNFWLPEKIPVSNDIPSWKKLSKDWQDLITKTFTGLTLLDTIQATIGDICQIDHALTDHEQVIYANFAFMVGVHARSYGTIFSTLCTSEQINAAHEWVVNTESLQKRAKALIPYYTGNDPLKSKVAAALMPGFLLYGGFYLPFYLSSRKQLPNTSDIIRLILRDKVIHNYYSGYKYQRKLEKLPLAKQKEMKAFVFELMYRLIELEKDYLKELYEGFGIVDDAIKFSVYNAGKFLQNLGYDSPFTAAETRIKPEIFAQLSARADENHDFFSGNGSSYVMGVSEETNDDDWNF

SEQ ID NO: 63521 - protein, 153 aa, Mycoplasma genitalium
MHKDIKLVKETEIRKPIGSPFIVYFSSISNNTHRFIEKLGFQHKRIPVDITQSITVSNEYVLICPTYSGGGNQVEGAVPKQVIQFLNNKHNRELCRGVIASGNTNFGDTFCLAGTVISKKLNVPLLYQFELLGTKNDVEQTQKIIANFFQNSN

SEQ ID NO: 63522 - protein, 721 aa, Mycoplasma genitalium
MTSKEKIPTFNTEEDVESYISFNAQAKIYDDFAIDLQAVESYIQEHVKPKTKVFHSTKERLDFLIKNDYYDEKIINMYSFEQFEEITHKAYSYRFRYANFMGAFKFYNAYALKTFDGKYYLENYEDRVVMNVLMLANGNFNKALKLLKQIILNRFQPATPTFLNAGRKKRGEFVSCYLLRIEDNMESIGRAITTTLQLSKRDGGVALLLSNLREAGAPIKKIENQSSGIIPIMKLLEDSFSYSNQLGQRQGAGAVYLHCHHPDVMQFLDTKRENADEKIRIKSLSLGLVIPDITFQLAKNNEMMALFSPYDIYQEYGKALSDISVTEMYYELLENQRIKKTFISARKFFQTIAELHFESGYPYILFDDTVNRRNAHKNRIVMSNLCSEIVQPSLPSEFYSDLTFKKVGSDISCNLGSLNIARAMESGSELAELIQLAIESLDLVSRISSLETAPSIKKGNSENHALGLGAMNLHGFLATNAIYYDSKEAVDFTNIFFYTVAYHAFSASNKLALELGKFKDFENTKFADGSYFDKYTKVASDFWTCKTEKVQALFDKYQVKIPTQENWKQLVASIQKDGLANSHLMAIAPTGSISYLSSCTPSLQPVVSPVEVRKEGKLGRIYVPAYKLDNDNYQYFKDGAYELGFEPIINIVAAAQQHVDQAISLTLFMTDKATTRDLNKAYIYAFKKGCSSIYYVRVRQDVLKDSEDHTIKIKDCEVCSI

SEQ ID NO: 63523 - protein, 100 aa, Mycoplasma genitalium
MHAIVVCGAKQYLVHENESIFVEKLAGKVGQEIQLDKVLMLDEKIGKPYLEKAKVVCVIEKHGLKSKIKLIKHISQKHHLKRYGHRQPYTKLKVVRFIHD

SEQ ID NO: 63524 - protein, 99 aa, Mycoplasma genitalium
MIKINISQNFLVAKGHALFAEKGKDIVCAAISGIIFGGVAWFEPDKIEFTENKLVPSIALKLIDPTPNVAVAFSVITVQLKAIANSYPNHIVINEESYE

SEQ ID NO: 63525 - protein, 104 aa, Mycoplasma genitalium
MSKNSYCYQINLQFFASKKGVGSTKNGRDSHSKRLGAKKADGQMIRVGQIIYRQRGTKIFAGQNVAMGSDNTLFALSDGIVRFQKFGSKQSKTRVNIIKHQLNA

SEQ ID NO: 63526 - protein, 291 aa, Mycoplasma genitalium
MPKLLGSFISFKAPNYFVQSAQDAIAIDATALMVFLGPPHSAYRVPFNKMQFSLGYELLKTKNINSNGLVVHAPYIINCASKDPLKQQNAISVLTNEIQLCNLAGAHYLVLHPGSAVAQTTNEALDNLVKVLNQVINKTKTTVICLETMAGKGNEIGRDLTELKYVIDRIVDKDRIGVCLDTCHFHDSGIDFSDLTGVFNTITTKLGFEFLKVIHLNESKNNCGSKKDRHANINAGMIGFENLMKFISHPQIKDLPIILETPSTSLNYPTIYREEISQIRSWFKTYQPDAN

SEQ ID NO: 63527 - protein, 795 aa, Mycoplasma genitalium
MPVTKKSQILVVRGQVIFPFVPFSLDVGRPRSRKIIKALKTLKTKRLVLVTQKFTGEQNPEFNDIYHVGTLCEIDEIVDVPGVDSKTVDYRIKGRGLQRVLIEKFSDADINEVSYQLLNSTVKDEANVDRFLQRIFPEKEEIEQLMEGAEKFLELENISKTVNVPKGLKQLDIITFKLANLVPNTESIKQAILEENEIANRLEKIIQAGIEDLQKIQDYGRSKNKETEFDKLDSKITRKINEQLSRQQRDFYLREKLRIIREEIGISSKKEDEVASIRKKLDENPYPEAIKKRILSELEHYENSSSSSQESTLTKTYIDTLLNLPWWQKSKDNSDVKNLIKTLDKNHTGLDKVKERIVEYLAVQLRTQKNKGPIMCLVGPPGVGKSSLAKSIAEALDKKFVKISLGGVHDESEIRGHRKTYLGSMPGRILKGMTRAKVINPLFLLDEIDKMTSSNQGYPSGALLEVLDPELNNKFSDNYVEEDYDLSKVMFIATANYIEDIPEALLDRMEIIELTSYTEQEKIEIAKNHLIKRCLEDADLNSEELKFTDEAISYIIKFYTREAGVRQLERLIQQVVRKYIVAMQKDGIKQETIDVNAVKKYLKKEIFDHTMRDEVSLPGIVNGMAYTPTGGDLLPIEVTHVAGKGELILTGNLKQTMRESANVALGYVKANAERFNINPSLFKKIDINIHVPGGGIPKDGPSAGAALVTAIISSLTGKKVDPTVAMTGEITLRGKVLVIGGVKEKTISAYRGGVTTIFMPEKNERYLDEVPKEIVDKLNIIFVKEYSDIYNKLFS

SEQ ID NO: 63528 - protein, 292 aa, Mycoplasma genitalium
MLKLAIKSVNNALVSNFDIKTKNAFSINTVNHFKSCYPTSEIYFLIGSDKLNELEKWDHIQQLKDLCTFVCYERKPYPFNKKIANQFNVKYLAKCPLEIASSKLLNQPRKKLIPLAVLNYINTNHLYLIPTLKAMVDDKRFQHCLRVGKLAKQLAIANKLDAKRAFVAGAYHDLAKQLPVDQLVNIATSELKITNYPSWKVLHSYVGAYILKNWFGVKDKMIINAIKNHTIPPKQVSKLDMIVYLADKLEPNRKQEQWSGGIEIDQLVKLAKSNLKQAYLITLKYVQNLVKD

SEQ ID NO: 63529 - protein, 703 aa, Mycoplasma genitalium
MNEQQKQAISCGKGVNVVYSGAGTGKTTIITNRFAYLVNKEKVDPSRILAITFTKKAAKEMQFRILKLIDSSLAEKTNIYTFHSFCNKFLIQTLKKRFIIDDDISYFLKEFLADSKLDINLAKQIIDNFKNTFADFEINKLDQDERLISLCEHSLLNKDEEYSTLKTQLINAFISYEKNKILNNKLDFHDLLIKTCNLLSNDNDLLNQWSEQFQHILVDEFQDTNQIQYELIKMLVTKNKNLFLVGDNNQMIYRWRGAVNGIITALKHDFNVPKSNEFFINQNYRCDQNILAVANQILLKIMAYEKQVKTEKNLLFSTLNSDKKPVYFQAESVENQANWIFNKIKALNQTEKINFKDMAILFRKNRDITTMVELIEADGTIPLPKQKSYFNQLVKLQRVLIAISTRTNLDIKRALQALKIWSNDLKELWKQSDKTNLFDFLKWSELNQKNHSSKLKATGYFNLLIKLAEDQQINLLFTELFKKLKVDQTIENLLWKKLTEFQKDKTEFSLSEFITSLALEFDSIIENSSDTINLLTVHAAKGLEFEAVFIYGMNQGDFPLFLSQNQNDEQHLIDELKLFYVAITRAKRFLFITAVLQINNNSIKPSSFLNYINKSEYLDIATINYVLEQDDDFFDSTKKTDYTKKLRKESLDIIVGDLVTSRYFGKGVVVEVRDKEVLVAFKDTRYGMKWILKNHKSLTKALY

SEQ ID NO: 63530 - protein, 165 aa, Mycoplasma genitalium
MVDKNSLRKLMLLKRAELNDLEKSHLDQKINQKLMAFLITRPTIKNLALYIPIKNEVAFLDNFLDFLKLNKITSCFPSIVDQFNMKFIDQNNNEINPNDIDCFFIPLLAFNKANHRIGFGKGYYDRYLSLTSKKQLKIGIAYDFQYAEFTNDPWDYQLDLIICNG

SEQ ID NO: 63531 - protein, 281 aa, Mycoplasma genitalium
MDNIKVLFLGDVYGKAGRKIISDHLPIIKKKYQLNLIIANAENTTNGKGLSWNHYQILKQAGIDYITMGNHTWFQKQDLELVLNQVDVIRPLNLMQDFNYFQLGKGSYLFSLNGLKIRITNLLGTSINLPFAITNPFVELKKLVLTKDCDLHIVDFHAETTSEKNAFCMVFDGYVTAILGTHTHVPSNDLRITPKGSVYITDVGMCGPGFGSVIGANPKQSIKLFCTGERQFFEVSNCGAQLNGVFFEVCSKTNQVVKIEQIRIVLDDEKYLANDYFNLVE

SEQ ID NO: 63532 - protein, 239 aa, Mycoplasma genitalium
MNQASAIAILVIFSLASGYLLGSIIFADIFSKILKKNVREFGSKNPGATNSMRVFGLKIGFLVAIFDAFKGFFAFLLTWILFRFGLQGYLTEKVYQSTYFLSYLSCFAATIGHIFPLYFKFKGGKAIATTGGSLLAISLWWFLICLLIWIMITLITKYVSLASLITFFVLAVIILIPWLDYLYFFNSDPLKSITYQNEWYIILFFCLWYWPLTVVVFWLHRANIIRILHGKESKITQLN

SEQ ID NO: 63533 - protein, 497 aa, Mycoplasma genitalium
MSTDKKTLGEKPNSTKPELSEELIAELKKQRILEKNRPYKKMIYVDNKVQRKHRHENIAFLKTLHENKESDVPKKRRGRKPKHAPLKEKNNLKLFDILEGSLKSHIENDDTNTVINLLTEAWEKKSKKKQKNITLSNKEIISVLAKFELPEDEIIYVLDELRDKGIQLQHDVEEHIHEFRANQDLSIIDEDIEELTSKNISNRDKVDDNVRFFLGSLDFSKMLDFESEQRIAKVLNSTDEESRKYAINQLVTSNLRLVVSIAKKHLERGLDFNDLIQEGNLGLLKAISKFNWSLGNKFSTYATWWIKQAITRAIADQARTVRIPVHMVETINRLAKAERALYQELGREPTDEELAEKMGGQAEGFNVKKIAEIKRLSLDPVSLDKTVGHDEESQFGDFVKDTDAQTPDEFTESRSNSEKIDELLNNNLSEQEELIVRMRIGMPPYNEPKTLDEVGQKILIPREKIRQIENKAIRKLRHAVRNNPISMSFLRINEKKD

SEQ ID NO: 63534 - protein, 607 aa, Mycoplasma genitalium
MVNKSNSLDELLKQIKITEIIQHYGVKIQTKGNSLLALCPFHDDKNPSMSISSSKNIFKCWACNAAGNGIAFIQKHDQLDWKTALKKAIEICGIKLENWNSNLLTKVDPKQKRYWEINNALITYYQTRLKRETNPNGMNYLVEKRKLNKTLIEQFQLGLAFHNEDKYLCESMERYPFINPKIKPSELYLFSKTNQQGLGFFDFNTKKATFQNQIMIPIHDFNGNPVGFSARSVDNINKLKYKNSADHEFFKKGELLFNFHRLNKNLNQLFIVEGYFDVFTLTNSKFEAVALMGLALNDVQIKAIKAHFKELQTLVLALDNDASGQNAVFSLIEKLNNNNFIVEIVQWEHNYKDWDELYLNKGSEQVILQANKRQNLIEYLVSFFKKQQLDQRVITNKIIAFLTKNQTILNDHSFLIFLIKNLVKLLEYSDEKTLYETVLKHKEKLVSKFDNNRFYINTSGHAQPPQELQKTTAALVQTAFEEAVNELWKPEIFAFALIDKRFLVELKQSHLDEVFKECNFNLFDVELFIEKARIYWSENQTANWVGFESVLDQNYLLNNKARLLEIKDIFLDELTCYQANDFQNYLKTFQTLLKQQKQRLKNLKLTL

SEQ ID NO: 63535 - protein, 446 aa, Mycoplasma genitalium
MAKVYNQEVYVQFLKQHGFVFQSSEIYNGLNNSWDFGPLGAVLKQQIKQALYNFFIKNKADVLLVETPIILSELVWKASGHLANFVDTLVDCKSCKYRFRVDQINAEIKAKKDWNSFKVNCPNCHNQNWSEVRDFNLLFQTEIGVVNNDKRLVFLRPETAQGSFINFKNILQAKKRNLPFAIAQFGKSFRNEITPGNFLFRTREFEQFEIEWFCKPDDANSLFEKQLIMVEQFLQTVLKINPELLKKHEYDQSELAHYAKKTTDFLFNFPHGLKELWGLANRGDFDLKQHQEFSKKSMSFFDSELNQHFLPFIIEPAVGIERLFYALIVSSYRREIINEEEREVLSLPFDLCPEQIIVLPLVNKLKKEAFSVFETLAKTRWRVCFETTGSIGKRYRKADAIGIKYAVTFDFESLEDNAVTIRDRDTLVQQRIAIKELPQWFMKNGQ

SEQ ID NO: 63536 - protein, 428 aa, Mycoplasma genitalium
MIVDSVSQKPTTLVQKTINIYLCGPTVYNDLHLGNTRPLIVFDVLNRVLKKAKYTVNFVQNITDIDDKIIKIAQQQEVSESVVTKQQITAYKSLLKKLNILPIKHIQITEKIDKIPDYIDQLVNQNHAYVSTQNNVYFAVNSLKQYGYLANRMVHLEETDTDKKNKLDFVLWKITTAGIKWNSKWGLGRPGWHVECAFLIDYCFKNELTIHGGGVDLKFPHHENENALHMALYNQPITKHWMHIGHLMIENQKMSKSLQNFLLAVDFLNFHDFRVLRWIFYQKHYLHPIDLNQSLIEKANNDIQRIAKTLNVARTWLVYSEQSELISPKQYDPVFSALLDNLNFANAVAAIWKLIKKINTSIKTKDFSVLREQLSFLEWSIDLLGISFKSIHTKLNVRLIKEWSILHKQKAMDKADQIRKKLIKKMLL

SEQ ID NO: 63537 - protein, 659 aa, Mycoplasma genitalium
MMDVKLKIQQLVNLIKNYDYHYYVLSEPLIDDFEYDMLYKSLQQLEKDHPDLIQIDSPTQRVGGEAVKGFKKLNHNSPMLSLENAFSTKEIANFIDNINFQTNSKNEFVVEPKIDGVSISLTYKNGVLVHALTRGDGSVGEDVLNNVKTIKSIPLTIPFTKTIEIRGEIFVDKKTFLAINNQLEKPFANARNLAAGTIRNLNSEITAQRKLRALFYYIPNGLEESITTQTMVLEQLKQWKFPVSDTIRVFQNKFQLINYLEAFDKKREQLTFNLDGLVIKLNSLLFYQQLGATSKSPRWAIAFKFSPKFVQTKLTAVLITIGRTGRVNYTAKLESVNLDGTKVTAATLHNFDYIKTKDIRINDTVVIYKAGEIIPKVLKVNLEKRKNDTIIIQEQKYCPSCNSKLVKIVDEVDQYCTNETCKERNIQLINYFVSKTAMDINGLNINTITKLYEHNLVRSIVDLYDLKDKKNQVLKLDLKIGDKLFNKLVDNIENSKQKGMARLLTGLGIKHVGNVLAKNLANHFKNIKALQHASLENLISLNDVGITVAESLYNWFHDPNHLQLIEQLELRQVKTDQLPLKINFETNSIYFQKRFLITGSFNISRDQIKDLLSAKFDCQFASEVKPTVDFVIAGNKPTLRKINHAKELNIPIINEAIWT

SEQ ID NO: 63538 - protein, 97 aa, Mycoplasma genitalium
MKKAIHFQSQPVVFNCASCNSNFTIDSTAKQKDLAIDICGKCHPFYIGQLTKQTVHGRAEKLSQKFNAGKAFLENKTKKSNQAKVEKQTRHRSINEL

SEQ ID NO: 63539 - protein, 359 aa, Mycoplasma genitalium
MDFDKQLFFNVEKIVELTEQLEKDLNKPNLSFEQIKVINKELKHKQPLIVKFKELQKLVENANEAEQILNNSSLKELHEEAKKELEKIKASLPSLEEEIKFLLLPVDENNQKNVIVEIRPAAGGDESCIFLSDLFNMYKNYCTSKNWTVELNEIIPASVGINFVSFAVNGTDVFAKLKFESGVHRVQRVPLTEAKGRVHTSTVTVAVLPQLEEVEITINPSDLRIDTYRASGAGGQHVNRTESAVRITHLPTGIVVACQEGKSQFSNRDKAMKMLRAKLWENAQNKQLSTQADLRKSQVGSGERAEKIRTYNYPQNRITDHRIKLTINKLNTVILGDLDEIIEALQADEKKQQLEKFIS

SEQ ID NO: 63540 - protein, 874 aa, Mycoplasma genitalium
MFVNLHTNSYYNFLNSALSPKKLVNLAINDQQKAVAITDPNLFGAVEFFITCKQNNIKPIIGLNLTVEYQKNDVKLLLIAKSNKGFQTLNKIALIQQKLEINSLVDQLTDIAVIICSLTTWKSTYKDVYQAKGIEINQTPIAILANAVNCEKTNSDQVVLTVLKQMKQNQTGKITTFDWDLKQKLNQISINENLKVKSEIQPFLDQKTAQQLFSETELNNLNDLVNRCELDLEHLKAASLSLTDNDAAVLESLCQTNLKQFLDKNQDLNKKAYQLRLEKELNVINKLNFASYFLVVNDLVNYAFKKDILIGSGRGSAVGSLVAFLLNITKIDPVQHQLIFERFISTHRQDLPDIDIDIMENKRAEMINYLFEKYGKENCAQIVTFQRFKTRSAVKEVAKLFNDYGISDMILGVLPKDQTITFTDLKATEDSALQLCLQQFGLIVELALAIVDFPRQSSIHASGIVIASNSLIKTIPLLQLDNNHFLTQVSMEWLSFFNLNKFDLLGLINLTMISDVITQIKPSNQTVNQFLNTISWTDQNTFINLVNEDTLGIFQLESFGMKKLLVQIKPKTINQLAIVLALYRPGAQDNINLFINRLHNGYDQSDIDPRILPIVKNTYGVLIFQEQIINIVKVVANYSLEEADSFRRAISKKDVKLIQKNKRNFFERAVQNNFDLKTTTKIFSYIERFANYGFNLSHALGYALLSYWTAWLKTNYPVYFYLWLLNHFQSSKDKQKLIIRTLEKSGIEIYPPLLNKAQPNSVIENKKIYLGLNLIKGINDRYIQNLQKVQHLIQTQNNLQLTDVVSWCLDKTIGDIPLKDLLLLKTMGCFDFFEYTYDFNDAKDFWIKSDHLLFTRMPLEKKDSNFWIKQFFTN

SEQ ID NO: 63541 - protein, 291 aa, Mycoplasma genitalium
MKKAILIDGNSLAYRAYFATWKQVEYAKQNNLPFNNAIRTMLLMCWNLIKANVYQYGIVSFDTKAPTFRDQIYEGYKQKRVKTPVELLVQIPLIKQALVYLGFLVCEKDGFEADDLIGSYANLFTKQEITVDIYSSDRDMLQLVNAFTNVFLCIKGTKEMVMYNNENFKSLFYGLAPYQVVEYKGLVGDNSDNLAGIKGIGPIKGIELLQQYGTIDNIYTNFNNLPNQLQKLLNNQKEIAKTFSFLAKIKTDIELDQNIDLTGLKPIQKQALIQLLSENKINTLVEKFSKI

SEQ ID NO: 63542 - protein, 284 aa, Mycoplasma genitalium
MPELPEVTTVINELKETVLNKPLDQVQVNLRKVLKNIDPQLLNKQLKNQFFTDIKRKGKYIIFLLSNGLYLVSHLRMEGKYFFEERGSKFNQKHVLVEFHFDDGSQLNYHDTRQFGTFHLYEKLEQAAQLNKLAFDPLEAGFDYRKIFQKAQNSKRKVKTFILDQTVISGIGNIYADEILFASKINPETMVDQLTIKEIEILCKNATKILAKAIVMKGTTISSFSFKKDHTGGYQNFLKVHTKKDQPCSVCNQLIVKKKINGRGSYFCLNCQKITTKVSTKLNP

SEQ ID NO: 63543 - protein, 278 aa, Mycoplasma genitalium
MELKNIIFDLDGTLLSSNQIPLEQTVEFLKDLQKKGIRITFASGRSHILIRNTATFITPNLPVISSNGALVYDFASEKPVHIKPIDNKVIPAIMQMLLEFQETFYFYTDKKVFAFTHELDSAKILSTRSQIVGIDLIENNYIVNKFEKALDFDFKQHTITKILLVTKNREKVPFLAKQLDQIQDINYVSSMTFALDIMQKDVNKAYGLKVLVDNYNLDPEKTMVFGDADNDVEIFQSVKWPVALVNGTDLAKKNAKFITEYDNNHNGIYFFLKKFLAT

SEQ ID NO: 63544 - protein, 792 aa, Mycoplasma genitalium
MYNHNLIEEKWLKKWKNKDVNRFESDSNKKKYYVLDMFPYPSAAGLHLGHVRAYTITDVISRYYKAKGFNVIHPIGFDAFGLPAEQYAINSNQNPGSWTDQNINNFINQLTSFGFDYDYHLSLKTTDPRYYKYTQWIFSELFKANLAELVDIDVNWCEQLGTVLANEEVLIDSNGNAVSERGSFSVEKRKMKQWVLKITTFADALLEGLDTLDWPEPIKEMQRNWIGKSKGVTINFQLKDHKEAIAIFTTKPQTIFGVSFLAVSTNHWLAKKIAETNKKVASFLKKQLQKTTTLKQKATLYDGIDLLTNAIHPLTNELIPVYVANYVIEGYGTDAIMGVGAHNENDNFFARKQKLKIINVIDKKERLQNSFAYNGLTTKEAQVAITNELISQNKAKLTTVYKLRDWIFSRQRYWGEPFPIIFDENNTPHLVEQLPVELPLLENYKPDGSGNSPLMRNQAWVNIVKDNIHYQRETNTMPQWAGSCWYYLGYLMLIKNPNFWPIDSKEAKKLFDQYLPVDLYVGGAEHAVLHLLYARFWHKFLFDKKLVSTKEPFQKLINQGMVLGPDGKKMSKSKGNTINPTPLVDSHGADALRLYLMFMGPISASLTWNDEGLNGMRRWLDRVYNFFFNHAVVTDQVSQETIFAYNLFLKNSYCHLDKHELNLVISEMMIFLNFLYKTKKISLNYAKGFLTVLSFFAPFLAEELNEKCGLEPFVVKQAISLVDYQLFETAKTKVILSINGKFKAAKEFTKGSLEIDVLESFKQDKEINDILNQPIERVVYVQDRIINVLLKK

SEQ ID NO: 63545 - protein, 457 aa, Mycoplasma genitalium
MDYDLIILGAGPAGYIAAEYAGKHKLKTLVIEKQYFGGVCLNVGCIPTKTLLKRAKIIDYLVHAKDYGITINGQAKLDWKQLLKQKQEVVDKLVAGVKTIIKGAKVESIEGEATVIDKNKVQVNNTTYTTNNIIVATGSRPRYLTLPGFEKAQQAGFIIDSTQALALEGVPKKFVVVGGGVIGVEFAFLFASLGSEVTIIQGVDRILEVCDSDVSELISKTLKNKGVQIITNAHVVRAENNQLFYTVNGVEQSVIGDKILVSIGRIANTECLDQLDLKRDHNNKIVLNEKLQTSTTNIYLIGDVNTQMMLAHYAYQQGRYAVDQILNQNQVKPAEKNKCPACIYTNPEVAFVGYSEMELQKEKIDYVKSSLPFIYSGKAIADHETNGFVKMMFNPKTGAILGGCIIASTASDIIAELALVMENNLTVFDIANSISPHPTMNEMVTDVCKKAIFDYFS

SEQ ID NO: 63546 - protein, 384 aa, Mycoplasma genitalium
MANEFKFTDVGEGLHEGKVTEILKQVGDQIKIDEALFVVETDKVTTELPSPFAGTISAINVKVGDVVSIGQVMAVIGEKTSTPLVEPKPQPTEEVAKVKEAGASVVGEIKVSDNLFPIFGVKPHATPAVKDTKVASSTNITVETTQKPESKTEQKTIAISTMRKAIAEAMTKSHAIIPTTVLTFYVNATKLKQYRESVNGYALSKYSMKISYFAFFVKAIVNALKKFPVFNASYDPDQNEIVLNDDINVGIAVDTEEGLIVPNIKQAQTKSVVEIAQAIVDLANKARTKKIKLTDLNKGTISVTNFGSLGAAVGTPIIKYPEMCIVATGNLEERIVKVENGIAVHTILPLTIAADHRWVDGADVGRFGKEIAKQIEELIDLTVA

SEQ ID NO: 63547 - protein, 326 aa, Mycoplasma genitalium
MSKIQVNNIEALNNAMDLALERDQNVVLYGQDAGFEGGVFRATKGLQQKYGSERVWDCPIAENSMAGIGVGAAIGGLKPIVEIQFSGFSFPAMFQIFVHAARIRNRSRGVYTAPLVVRMPMGGGIKALEHHSETLEAIYAQIAGLKTVMPSNPYDTKGLFLAAIESPDPVIFFEPKKLYRAFRQEIPSDYYTVPIGEANLISEGSELTIVSYGPTMFDLINLVYSGELKDKGIELIDLRTISPWDKQTVFNSVKKTGRLLVVTEAVKSFTTSAEIITSVTEELFTYLKKAPQRVTGFDIVVPLARGEKYQFEINARVIDAVNQLLK

SEQ ID NO: 63548 - protein, 358 aa, Mycoplasma genitalium
MAILIKNKVPTTLYQVYDNEGKLIDPNHKITLTDEQLKHAYYLMNLSRMMDKKMLVWQRAGKMLNFAPNLGEEALQVGMGLGLNENDWVCPTFRSGALMLYRGVKPEQLLLYWNGNEKGSQIDAKYKTLPINITIGAQYSHAAGLGYMLHYKKQPNVAVTMIGDGGTAEGEFYEAMNIASIHKWNTVFCINNNQFAISTRTKLESAVSDLSVKAIACGIPRVRVDGNDLIASYEAMQDAANYARGGNGPVLIEFFSYRQGPHTTSDDPSIYRTKQEEEEGMKSDPVKRLRNFLFDRSILNQAQEEEMFSKIEQEIQAAYEKMVLDTPVSVDEVFDYNYQELTPELVEQKQIAKKYFKD

SEQ ID NO: 63549 - protein, 720 aa, Mycoplasma genitalium
MATIQEIECDFLAKIAQKFTNAEIELINKAFYHAKTWHENQKRLSGEPFFIHPLRTALSLVEWNMDPITICAGLLHDIIEDTDQTEANIAMIFSKEIAELVTKVTKITNESKKQRHLKNKKENLNLKSFVNIAINSQQEINVMVLKLADRLDNIASIEFLPIEKQKVIAKETLELYAKIAGRIGMYPVKTKLADLSFKVLDLKNYDNTLSKINKQKVFYDNEWDNFKQQLKKILAQNQIEYQLESRIKGIYSTYKKLTVHEQNISKIHDLFAIRLITKSELDCYHILGLIHLNFLIDSKYFKDYIASPKQNLYQSIHTTVRLKGLNVEIQIRTQQMDNVSKFGLASHWIYKEQKEGLLAPALQLNYLVTKQKHSHDFLKRIFGTDIIKINVSASHEPNVIKQINVDSNNKLLDIAFENYPKQFAKLTKIEIDGVEINSFDTSVENEMLIEFYFGKNNNLKSKWIRYMNNPIYREKVKKSLAKLAKSGRYSELAFYEKELGEKQLKLASETEIQKRLNTLRIKKMSDYLALIECTNFTNDEHLLFLAKNNDKWNKLTKPLKFAFSKVVFHNSYFEQIEGIFITKIVIEPCCSKIPDMPEQVTGILTKNILSVHRYGCKNLQNKKQLKIIPLYWNIQQLKLKPRKFRSYININGVWSEKTINKICQTIINGDGYIEKIIPKINKQKDEFDLNITLFVNNYQQLLTLMDQITTKNISFSWKYL

SEQ ID NO: 63550 - protein, 248 aa, Mycoplasma genitalium
MLVFVFLLGFGITALYFRSTAANLYVQARNSIDSSFNSAKAFANALANSANQFSKSSITNNLDQVKKDLEQSLQKVDEYKKNLESQNNLGNISQEKIRELDATKKDLENSKTQLDNFKNNLDKNGTASSSPSVKKQATADGVISAVSEFSTQAQSIVSSYEKIKNNIPSSEQFNNYYDVTMITIVAVSGGMLAILITTIVFSFLTSKKRGLIRFSRFISTEQLADHVNDILDRYPDLEEEVITALDHD

SEQ ID NO: 63551 - protein, 483 aa, Mycoplasma genitalium
MTKKTQDLTSWYDQLLVKAKLICHGEVKGTVCFLNNSWGLWMEIQQLYNDAIANKNQLSAIALTKFQPTTSFCYQVFQVQLPTLSFYSEYQKEKTHIKGFNPELFLINQVGQKQLNDPLVLRPTSEIAFCNLWKKQELSYHDLPLIYNQWTQVFRAEKNTRPFLRNSEFYWQETHGLFVDQSQSEQAAISFWNLYQDLIINKLCIPAFVGLKSESEKFAGAKNTWTIEAIMPDGQSLQCATSHDLGDTFTKSFTISYQSKTNQKMTPSSFSCGMSTRILGAIFLTHSDDYGLVLPWYLASKQVKLYLFDKNNNPKTRALAFLVKDFLEKLKIRFSFIEINNQLGKQLLKGEIEGIPLQMIVDNEKTINIFNRLTRLKTSLTFANLQTEFVNLVNNYHTEMYRKANDLVEQKLARVQTLKEIEQAFKNKKAVLCTVKLTGELEQHLKTKYQVSVRCVFKKSDVTQNCPFTNQPCFDSVLIARAY

SEQ ID NO: 63552 - protein, 84 aa, Mycoplasma genitalium
MQTHEILLKIKEIAKSKNFNLNLDEKTINQPLRELKIDSLDMFSIVVSLENEFGISFDDEKLMNLKNLADLVLEVKNLLAKKGV

SEQ ID NO: 63553 - protein, 900 aa, Mycoplasma genitalium
MNWTTDKVRQTWLDYFAKKDHLVLASKSLIPINDPSLLWINSGVATLKDYFSARKTPPSKRLVNAQICLRVNDIENVGFTSRHQTLFEMLGNFSIGDYFKTEAIDFAFDLLVNYYQLDPKRFYITVYEDDETTYKRWIKHKIDKNHIIKCDKSRNFWDLGLGPCGPCTEIYYDRGEKFDPKKIGEKLFFEDIENDRYVEIWNIVFSQFNNDGNGNYTELAQKNIDTGAGIERLVSVLQNSPTNFDTDIFLKLIKIIEAFCPFKYDPNSYFTFDPQKVKEQSYFRIIADHFKAITFTISEGVLPGPNERNYVVRRLLRRALIACKKLQLNLAFIEKIIDEIIASYENYYQHLKAKNETVKQVVLKEINAFNKTIDLGLVLFEKSVKNNTLTPQLTFQLNETYGFPVEIIRELVNQKGLTIDWTVFDQLMAKHRSISKQNNQTINFEKQNINLVNFKTKSTFFYHKNKINAKVIGLFDENYLPVKELNNQSGYVVFDQTVLYATSGGQRYDEGSCINHSNNNDQKISFQGVFKGPNKQHFHYFLVGSFKLNDQVTLSHDETWRKLAANNHSLEHLLHAALQKEIDPLIKQSGAFKSAQKATIDFNLNRHLTRNELEKVENKIRSLIKQKISSKEIFTDFEGSQKLNAIAYFEEEYSQHEILRVIRFGDYSVELCGGTHVANTASIEDCFITDFYSLGAGRWRIEIISSNETINNYLKAENQKLIQLKSELEKVLSLIDSSIFKVELKELQQRLDKFILPEKITQLRDASDTLLALKNDINQLKTKNYKVSQQALALSIKKQLLSLVDENKSYVIATFNDVEPKLLLQTLHDVFNQNQTKNFLIINQFNESNSFIVIGNKTTTIIEKLRNSFNLKGGGNDKLFRGSFQDNVTPQKLNELFQNK

SEQ ID NO: 63554 - protein, 244 aa, Mycoplasma genitalium
MHNKQLLLAHRGYSFIAPENTKLAFDLAFEYCFDGIELDVHLTKDEQLVIIHDETTLRTALVNKEVEFESLVSLKRDDHSAFFHLKIQFQSILTLKEFLDLYLDKFKLINIEIKTDQKPYLGIEKKLVDLVKGYGKKAIDKILFSSFNFESLQKVYDLDNSYKKGFLFWTKKQFETISTARIQKICQFLHPWTKIYEKYPQMIKKLNLPLNLWTVNSQNKFQQFLADNHVYAQIANKKFEIKIN

SEQ ID NO: 63555 - protein, 474 aa, Mycoplasma genitalium
MIVTTKKGFKKRLKDFSKQQILALIILGAIDVFVIAAPYYVKNVVPNLHLYLGITEDEVATVTSIIGYVTLATQLPGGFLTNRFSSRKLLFLSAITTGAITFWLAANILTKNQQSHDALFIQYCVIWGLWGITSTLIFWTPLWKLASQQATKENQALGFGIQGAANGIWGLIFIFLIALIITSIFYPSGGSENADSKPFAAYAFIIAIMLVITGFTVLFFVKEKPIEKQSQTTLVSFKRNLNQILVTLKNWKLWLLSFFLMGMYVFQSTFAYYLLQMLQNAFLAPVVLVTVIGGIRTYALRSAVSVYLCRLADKCKSYILFLMICTVLGIVFVLAFILLGFVQTNSANITLITFSSILYIFTGILSWGMVTVRYNQIGEIDIGKNNYASSVGLLSFIGFSTDGWLYTVTAEVGKKYTVAGQSNTSNTGYQIIAAICLSIALFGLICGSIVFISNSMEIKRLNKASYRWRDLDNA

SEQ ID NO: 63556 - protein, 367 aa, Mycoplasma genitalium
MSIIAKTVFIGLSGGVDSAVSALLLKKQYQEVIGVFMECWDETLNNDFYGHKKINNNKSGCSSFQDFQQAKKIANSLGIKLIKKNLIEAYWNKVFLPMIQSFKKGLTPNPDIWCNRFIKFGLLHDFCKQINPNSLFATGHYAKINMIENQPLLSIPKDTNKDQTYFLANVKKEQFQNVIFPLADLKKITVRNIARENNWEVADKKDSTGICFIGERHFSDFLKNYLPVKKGLIKDWKTKQTISEHDGVWFYTIGQRSGLNLGGLKQRHFVVAKDIETNELFVSCDKEELLKTTILLDQFNWLYTPKQLPSQVLVRIRHAQKPEIAKLKLLSDNKLEITFKNPVISVASGQFGVLYTLDQICLGAGLI

SEQ ID NO: 63557 - protein, 346 aa, Mycoplasma genitalium
MGFLSKLIAKLKPKKSVAKQLKEEVEKQSLFQTNNKTYYQGLKKSATTFAKTINELSKRYVNVDEQFKENLFEGLVLLDVGYHAANKICDAIIEQIKLNRITDFQLIKELIIDQIIVYYIQDKLFDTDLIVKPNFTNVYLFVGVNGVGKTTTLAKIADFFIKQNKRVLLVAGDTFRAGAIEQLNQWAKLLNCDIVLPNPKEQTPAVIFRGVKKGIDDKYDFVLCDTSGRLQNKLNLMNELQKIYQIIQKVSGSEPSETLLVLDGTVGQTGLSQAKVFNEFSKLTGIVLTKMDGSAKGGIILAIKDMFNLPVKLIGFGEKTSDLAIFDLEKYVLGLLNNLNLDNKEN

SEQ ID NO: 63558 - protein, 982 aa, Mycoplasma genitalium
MVFLKRFRAYGFKSYADEITIDFTHSMTGIVGPNGSGKSNVVDALKWVLGERSMKHLRSKSGDDMIFFGSKDKPASKLAEIELTFDNSNRLLHDSRKEISVMRRVYRGSGQSEYFINSNPATLKEISGIFADIGLEKGSLGIISQGSVSWFVEAKPEERRKIFEDASGIGRYTKRKEEVVNQLNRTLINLKQVSVVLNELKKDLKKLTLQAEKAQQFIRVKNELKELELAVLVGEYLQAQTELDKFNFQINSSEHDFKIHEPQLELLEEQIVIFNSRFHSADMQSNELQKELQDIYQKINELEQRKVIIDVQLRQGFSQKDEKQKAAALKKLILVDQTQLDGFENQLSNSKTTITDLEKLINEQKSLVDQIKLQIEKNTADLIYQRSLKTIIELQTNELKKTNNANILVKNANALTGILNTLGTFLKFDKQYEKAILKALGKSIGYLVVNNNNAAIQAIDFLVKNEIGKVTFLPLDDVASDTKITNEHMEILKQLDGFLGVCSDHVKCDPLFQPVVNTLLAQVIIAKDLNSAINLSNYTYKLYRIVTLDGETVYAGGIINGGFEKTNLSDGYLSSASLDNEQNINKLENNERELKKELTELEVKLDEMNRKLKYEELLQAKFIERIVQIKKIILELKMEYEQLTNTTFDGKKAVASEAELIHSLNSAWAKRDEINSKLKLNQELKLQLAKTIKQSEEKIVDLRALLDEQRAKLVSAREGKIRFENTIQNITEKINSVYKMTMEFAIANHNKPVKLSSMQAHNKIAKLQNQLNEMGVINMESIAEISEKQKRFDDINAEYESAQQAVENLQKAITEIDEIASNEFDQLIQKLNQELPKTFKYLFGGGSCQIRYTDPSNVLVSGIDVFANPPGKNIANLMLLSGGEKTLVALSVLFSILKVSAFPLVILDEAESALDPANVERFANIIKTASKNTQFLIITHRQGTMMKCDMLLGAAMQTKGVTKTFAVELENAEKYVSENDSN

SEQ ID NO: 63559 - protein, 320 aa, Mycoplasma genitalium
MSVIDIFKKRLQAVSKKPVIIFPEGWSASVLKAVEMLNESKLIQPAVIFHNRQEIPANFDKKITHYVIDEMDLTSYANFVYEKRKHKGMDLKEAQKFVRDPSSLAATLVALKVVDGEVCGKEYATKDTLRPALQLLATGNFVSSVFIMEKGEERLYFTDCAFAVYPNSQELATIAENTFNFAKSLNEDEIKMAFLSYSTLGSGKGEMVDKVVLATKLFLEKHPELHQSVCGELQFDAAFVEKVRLQKAPQLTWKNSANIYVFPNLDAGNIAYKIAQRLGGYDAIGPIVLGLSSPVNDLSRGASVSDIFNVGIITAAQAIK

SEQ ID NO: 63560 - protein, 416 aa, Mycoplasma genitalium
MLSSNMLNFKTLQAIDFQNKTVVLRSDFNVPMINGVISDSERILAGLDTIKFLVKKNCKIVLLSHLSRIKSLEDKLNNKKSLKPVAELLQQLLPTVKVQFSCKNTGAEVKQKVQALAFGEILLLENTRYCDVNDKGEIVKLESKNDPELAKFWASLGEIFVNDAFGTAHRKHASNAGIAKYVAKSCIGFLMEKELKNLSYLIQSPQKPFVVVLGGAKVSDKLKVVENLLKLADNILIGGGMVNTFLKAKGKATANSLVEKELIDVAKQILDKDTHNKIVLAIDQVMGSEFKDQTGITLDVSDKIQEQYQSYMSLDVGSKTIALFESYLKTAKTIFWNGPLGVFEFTNFAKGTSKIGEIIAKNKTAFSVIGGGDSAAAVKQMQLSDQFSFISTGGGASLALIGGEELVGISDIQKNS

SEQ ID NO: 63561 - protein, 337 aa, Mycoplasma genitalium
MAAKNRTIKVAINGFGRIGRLVFRSLLSKANVEVVAINDLTQPEVLAHLLKYDSAHGELKRKITVKQNILQIDRKKVYVFSEKDPQNLPWDEHDIDVVIESTGRFVSEEGASLHLKAGAKRVIISAPAKEKTIRTVVYNVNHKTISSDDKIISAASCTTNCLAPLVHVLEKNFGIVYGTMLTVHAYTADQRLQDAPHNDLRRARAAAVNIVPTTTGAAKAIGLVVPEANGKLNGMSLRVPVLTGSIVELSVVLEKSPSVEQVNQAMKRFASASFKYCEDPIVSSDVVSSEYGSIFDSKLTNIVEVDGMKLYKVYAWYDNESSYVHQLVRVVSYCAKL

SEQ ID NO: 63562 - protein, 595 aa, Mycoplasma genitalium
MSADNGLIIGIDLGTTNSCVSVMEGGRPVVLENPEGKRTTPSIVSYKNNEIIVGDAAKRQMVTNPNTIVSIKRLMGTSNKVKVQNADGTTKELSPEQVSAQILSYLKDFAEKKIGKKISRAVITVPAYFNDAERNATKTAGKIAGLNVERIINEPTAAALAYGIDKASREMKVLVYDLGGGTFDVSLLDIAEGTFEVLATAGDNRLGGDDWDNKIIEYISAYIAKEHQGLNLSKDKMAMQRLKEAAERAKIELSAQLETIISLPFLTVTQKGPVNVELKLTRAKFEELTKPLLERTRNPISDVIKEAKIKPEEINEILLVGGSTRMPAVQKLVESMVPGKKPNRSINPDEVVAIGAAIQGGVLRGDVKDVLLLDVTPLTLSIETLGGVATPLIKRNTTIPVSKSQIFSTAQDNQESVDVVVCQGERPMSRDNKSLGRFNLGGIQPAPKGKPQIEITFSLDANGILNVKAKDLTTQKENSITISDNGNLSEEEIQKMIRDAEANKERDNIIRERIELRNEGEGIVNTIKEILASPDAKNFPKEEKEKLEKLTGNIDAAIKANDYAKLKVEIENFKKWREEMAKKYNPTGEQGPQAK

SEQ ID NO: 63563 - protein, 205 aa, Mycoplasma genitalium
MKYTGSIFKRSRRLGFSLLENNKEFSKGKKRKSIPGQHGNRFRSSTLSGYAQQLQEKQRMQYMYGITDKQFRRLFRFVLKQKGNLTVNLFRVLESRLDNIVYRMGFAPTRKSARQMVNHGHVILNDQTVDTPSIIINPGDKVRLKARITKSPLVKNFIENSVISSFVETNKKAFEGTYIRFPERSELPAGINESYVVEWYKRLVK

SEQ ID NO: 63564 - protein, 1139 aa, Mycoplasma genitalium
MAKNKQSVFEEKNYTQTEPENIFGDLYDGKSTVEEDPNIKVAYDADGNGYYIAFNKETGVYYDPYGDTEYDISQLFDENGNPFVFDEKQEENDYLKYVGNPDYGSYDENGEWVWSGYFENDQWISTKESQPTDENYGFDSDLPPEVKQPESVEDNYGFDNDLPPEVKQPESVEDNYGFDNDLPPEVKQPESVVDQPSSDDYFAKQPTDENYGFDNDLPPEVKQPESVVDQPSSDDHFAKQPESTTDSYSFDSDLPQPTLDQPSLDDHVQYNFDHHEELKPVAEEQNNYQVGFDQVQANLDNNEEIQPTAEKKVTTDFESKQAQVVDSYQLPIDTDQQDQTTFSSSFETQPTVEQFDQVNSEVNDQFKPEITKEPVLESSFNKQDVVETSDLNSESNLYSENNKDATNNDSLNSEFIQLNSNSETASDDVHYESKSEPIHDYKFGSDLSQSNSNNSLESEPVKFNSETAPDAHFESQSEPVDQVQYDIYQNEELKPTLDQPSSDDYFAKQPTDENYGFDNDLPPEVKQPESVVDQPSSDDHFAKQPESTTDSYSFDSDLPQPTLDQPSLDDHVQYNFDHHEELKPVAEEQNNYQVGFDQVQANLDNNEEIQPTAEKEVTTDFESKQAQVVDSYQLPIDTDQQDQTTFSSSFETQPTVEQFDQVNSEVNDQFKPEITKEPVLESSFNKQDVVETSNYTNNLQKFDIQSDNKITITTKKSSPQIPTTLPISFVSNRIEYKPVETLALDNKESQQEQITINSITEDSKTLAKTLSVQLQQINSLNNQSIVTSESVRLDKKDDQLTINTVNSEDQQPKIEVFVKAKEPVEEHSITQNKQSVEDKSELDNFNKKSDLYKIISELKRGELNPTINFDAIFQMNDYQMSVKQSFIHLNDFVTNYKNQISERYLIIKKELQSELSRLIDQNENLNVQFNNAKNLTTLQKEEMIRSLASDFAIAYKPSNSYEQLQKSGEIMRHVQRAITENEKKIESIQGSLKQLKTVYNSCCETIMNNINKLDNTLRFAKKEKDPLLLSNFDSVTDNGLVEPNQLMDDLIDFSNTFDNISNEQLDDFIYENMDRNIDFEFEGFNNDFVDIDAKVMDSMSAFSVNDLDIETLVPDRTSNFSSLLDEDLFESSGDFSLDY

SEQ ID NO: 63565 - protein, 287 aa, Mycoplasma genitalium
MFPYYPLRLLKSLQLLVWASVLLALTFIFSIFSISVTNVLSISFLRIPFALFGWIFGPIWGFIFGFLSDTIDWLTKGYVWFWMFALQKPLFAFLAGIVKGIYLVRKNASNYKVDFWVLQTLLVTFFVVSVTLLLLYLTNNEFQQIGTKNFQTADLSVNVVVLQIITLVSFVIFFLVTEGFLGFVYVKKRNKEQALLTIYSLVLMVLMSVVVSILLGTIAAIEFITFINNGRPSNNFVLYGVYFFLLPRVLVQALLLPIYVALFYPLIGIVENNLKNYLLLFTLSWKS

SEQ ID NO: 63566 - protein, 369 aa, Mycoplasma genitalium
MQTKLFYFFVLLSFIPGFFLVQQEQFVALSIWIILITLFSLWYDWKFCLLNLTIVGFFIAFCYFVPAVKINQIVKNNFIRTPFINWIDQTTKGELNQYLKLFLINETTKNNLYQNALKLNIVHLFVISGFHLSFLFNLMERFLWKRWYLNKLSGFAVLLIYLFLVGFAFSALRVFISTLLKQVFKKQLPEDNLSLTALLIILISNHALNNFGFNFSFLACFVLLFVNKLKLLKALKPLVSSSLILIVISPLSLYLNSRLNAFSVLFNLLFSPIALFYFCVSWIILPFIGVFGQASFGIYLPLKMLSEWSLKVTVFLQIPKPNLIFFFVYYGLLGLLYTIFTVAYYDNNLWSRYWANSPKIKSNQKQFSI

SEQ ID NO: 63567 - protein, 599 aa, Mycoplasma genitalium
MNDKQKAKINKAYNKLLKKINKRYPDVSVVYARDHKNKVHALYQDPESGNIFSLEKRKQLASNYPLFELTSDNPISFTNNIVSLNAYDDKNNLVTVQYDQDNNTFYDQNGNVLDVSSYTDEKKVPLINYLSSTQTSQEQPTQQDYPSIDAGLPKIEVDDQPKAAQHTTLETESEPDVFELNDSLNQPQQPTENLGDDQFVEKEVPPTQQLHQDLVHQQPVQVDSGSQNHSFNNSPSLKPPLVNKPAKLVQPEVKHIPQVEVQPKPQIVEPKIEPKPEVKHVSHVEIQPKPEVKPVVDSVPEVKQPEVKHVPHVEVQPKPVVDLKPQRIEPRIESKPEVIKHIPQVEVQPKAQMVEPRIEPKPETKYIPQVESTPQVEVHHWKPEVKTEYQPQQPLPTSGLQIKVVPRSAALLQSKLDTGFQPRQVERTTDSDITVSVSSHASLLEKINALNHQRIMSDIALKSDNTIKSSNFSRFYPENEYVATKYSDPLYSDTNQSLTSDRFSLDFDYTPKSRVNNYTPLRSTNFQNNAISNYRFSRTPSSYYPLTRRPWRLTNISSYRSSFHSPTRLSSFRRTSLPFSSSYDGLRRYPSRSYWSKDF

SEQ ID NO: 63568 - protein, 934 aa, Mycoplasma genitalium
MKLKKRYLLLGSTLTVSAALILSACASSQLNKGVFFTSSSADLLKNNSVPLSMFNVSPTSSFFGNAYAGLTNYVATGTNRDDGVNVTDQIKEKLVLELALSVTGYKKTTHSGLKGRAQKNGSTDSSDGSSKNDYTKFNEWDAIGTIYRDSSKSITEDPNYHKITQEATRYEFTINTSLSWVDNAGREVKQNNQPVKLSSKDFERGFETYILSSNLGFNRNGYFIDLMGLDVEKTVGMDKTNGSSDGNGKGIEITDENYDVENYRSVDDNKFNVYLTSPFPFFLSMMSKEFFFPIPHTHPKVKALKLGKDSPLKYNQNNNRKILDQANTNFDGIYGGGVNAWKDTWSVGPYYVESFNQAQIVFKRNQIYDAIITPNLPKTRQENEKPIPAIVSYFQPGATPEVFYSSYIAGGLSASAVPYSQQQDARSRFNGTGDLRWLKIQKTAQSAQVTYSGKPYVANDSTVQLNANITETEAKFLYNSESEEALTIRAGINGLINWKNLAIIDLPNSGDVNYSTVPFGIFKEKPANGTSSGTNTDGIENDYYYKINNNQRLGLIPEQTGTFQKDKNVLDTATVKLSYYSSTKTNGAQVRTASTSGSSSQTSQVSSKQVSVTKQSFISALKKVGFTGNNPLHFNIKLGNASLSSNQVDYYNALKQALTELGNDNGENLIIPEIILGDAQGPTRNEWYIGLSSVLGFSYWSPDYDGVGTWLDAATQLNSEGIGEVITYNSGSHIVRTLLLAASQNNVFNQIENKLQNNTTTNGKDWCSCITSADLFKDDPYVIKNFGTNGNNGTSASLAFTKKALSLLKFLVDNKVLKADKVKEAIKDPDKYLSKRSKIDDNKPANVSDIHIGYELKDLYDNAAQLNRFNSIWAEQDTDNAKFLITVVDSYFPVLPVSAPGLNETIPSLLKPWFSLRNAPSGIATMRDSGYIDE

SEQ ID NO: 63569 - protein, 53 aa, Mycoplasma genitalium
MAVKRSTRLGCNECSEINYLTFKNVKKNPEKLALNKFCSRCRKVVLHKEVKRK

SEQ ID NO: 63570 - protein, 268 aa, Mycoplasma genitalium
MLTSNKNTLFNSIFAFKPKKRKNVFIFLHGFGSEYASFSRIFSLFKKKKWPFFTFNFPGHGDNESTDTDQLKLNHFVDLVCDFIVQKKLNNVILIGHSMGGAVAVLVNKVIPLKIKALILVAPMNQTSFSVNKKRILDTFFKRNNSNHKDFVEHEEKRKSLLKIAINAFKKRTTFKTLYSDMVQNAKYGNDSLERAYEMIGNKPTLVILGANDIVTPTKASVDYLANKSDKIIFKVIDGVGHSPHDSAPKLFFDYVLEFLDNLKKQRY

SEQ ID NO: 63571 - protein, 448 aa, Mycoplasma genitalium
MFTVAIIGRTNVGKSTLFNRLIQKPMAIVSDTPNTTRDRIFGIGEWLKRKIAFIDTGGLIAKQTPLQQLIALQVQAALSQAKAIIFLVSLQEQLNSDDFYVAKVLKKNKDKPVILVVNKAENFNPKTAEETLKDYYSLGFGRPVVISAAHGIGIGDLMDLLVKQNQLLPNENNDDLAKIRFCVIGKPNVGKSSLINQLVKQNRVLVSNESGTTRDAIDVPLKVNGEKFLLIDTAGIKRKGKINMGIETASYIKTKLAIARSNVILLMVDGSKPISEQDEVIGGLAQAALIPVIILVNKWDLVLKNNNTTNAYKKMLKLHFKHLDFAPVLFISVLKNQRLNTIFEQLKIIQSQLETKVATPLLNDVIQQAQLYNQPPLFKGKRLQITYAVQTKSQIPHFVLFCNDPKYLHFSYARFLENKIRENFGFNSVPISLYFKSKNARIRTKPEV

SEQ ID NO: 63572 - protein, 217 aa, Mycoplasma genitalium
MNWQIAIDGPSSSGKSSVAKKIAEELDFFYFSSGKMYRAFAYVMQVNRLNIDLFLKIINQINWRFEKDAVYYNNADITTVITTQSVANIASKIAVDPNIRKIAVIKQQKLAENKNIVMDGRDIGTVVLKNAQLKFFLDAKVEIRAQRRLQDMGISLSNEKKLKELIQELKQRDQIDSSRTADPLKKAQDAIYLDTSELSFDAVVKQTLKEAKKVFKL

SEQ ID NO: 63573 - protein, 837 aa, Mycoplasma genitalium
MKDKFSFQKNYDFNLVSDGLYEIWNNAGFFKPKDKNNSFTAILPPPNLTGTLHIGHAFEVSITDQIMRFKKMQGFSINWIPGFDHAGIATQTKYEKIALKENQKYFDADDDKKSEMIMNWALNQSEIIKNQLKSLGVCLNWSETKFTLSEQANKIVNNCFKNLYENGFIYQAYTLVNWDTKLNTAISNIEVINKPVNQHLHYVVYKLANDSKQELIVATTRPETIFADVCLLVNPKDKRYTNFWNKLVVNPLTGKQIPVVTDSYVDIKFGTGILKCTPAHDFNDYEINTKYKFDFLSCIDSNGILNQNASKFQGLSVLQARNKIVKWLEKNKLLVKSIPLTSNVGFSERSGTVVEPMLSKQWFVDLPKLKDHLYLKKYPDFIPKRFNKQVSNWLNKLKPWCISRQLIWGHKIPVWFENNTGEIVVGEKPSKNLQNYTRSKDVLDTWFSSSLWPLICLNWEQDDSFHETELLVTGYDILFFWVLRMLFNSFFETKKLPFKTVLIHGLVRDEQNRKMSKSLNNGIDPVDLIRNYGADAVRLFLCSNHTPGDDLIFSEQKIKSAWNFLNKLWNVTKFVIQLENDQEISYDLDKLSLSETWILAKLDKVIQKITKLLDKFQLALANQILVKFVWDDFCNTFIEAIKKEPNQLKPQLFYTAKSVLSNIAILLSITVPFLSERIYQQFNNKSVMQATWPLATKIKIPKLFDLVLAAINDLRNYRKQYMLNSQQKLVVILSGKNAVDVKQYFNFSWIELKIETNKKVSFKYQIVDDTTQRLKSLQKQQAFFESEVKRSQAIVKNKSFLEKAPKEKVKSEFLKLEEYQKKLTETNQLIAKLTKAH

SEQ ID NO: 63574 - protein, 138 aa, Mycoplasma genitalium
MDIRARTKIIDIYSNLKYKKPLKSFQKILTTSDSDNCEDFFNIGLNIDKNKITAIGFDGDGCIISTIATELSIKAIENKTINQAKKILSDLIATYKDKNSANQVVEELKLLIEMNVTEKRLQCLLLTPSNLLQWFKNF

SEQ ID NO: 63575 - protein, 1271 aa, Mycoplasma genitalium
MAHRFKRWSLIALAFSGVGATAIITACSTINTANLFPTLNRSQKLIGFSDQNIINPDVVLKSALNDGSGVDSILRVSFGSALQKWYQANADRNISNRLKIFEENVEDEHDNLIDEKKRADRVKWPIEVQKEYDQFGGNQESWKKLKLYDRLITDFQSLIFNNISANVSLVNSSDTSVATTKENIEKTENKLKFINSNLNDVNGDFFTNLQAYLFSQWLIEENPFLLNQASFNYQSPIAGLGSIYDENAIGASNLNLSYNFPAFQDPSESGGQTNSAKLFEEFDKQLQTANSSGSSQSSAATNTRNDLLDFENKYSASKVLISKNNILSVLKTVNLSAAVIDQYHYLLNNKTELTTTTTTTTTTTGGTSSNLNPLDKFIKSSSATTVMMKSAMTKSQEVTSDNNGFNVKSEFLKINPSLSSSGSDNSSNTQSFWKQVQALNNSSQTATIFDAVRMESNSSQAQVVTSNLLVSLSSKTTQKQQQKPVYVRGDDAIYAFHIDGGNYFLENSSPNKRNFEKQAEVLLMRFLQGQTNNFSKDNVSFSVDLFGSNSEFRSWANRNTTLKLYTALTTMLENGTSNNNGQKDVCDLAKKLLKNNTNLSETIKKQQDFNNSLSQIKSSYESYIKAANKLNNFRTDLANIEKLEQAIVDRANNYIKLQKEAKESSIGWGQPLPYKRANDGSYPSLAKFFNNNSDQSSAQTLTLKTTAAAITSDNEPTREKNNQTLKTLTTEVENKAKELVEKWKATTYSSSQYSEIITLKSSQLNDLDLDLILSLLTDSGIRTGTVANIFKNWYFKNTNSFTNNFDTSNKELKGEFSDFNDLVKQALYIRSWQNLTSKERFGYYKDLGSVNSTSTMLQMQNKAAQSHTSSSVNQTLLDLAKKAFEKELEDPNQDAEYKYMRFLQALMWLVKNGAQNYKNLLQQAIPIGTRAFVSWTVGYDKNPSATVSQKTKSSTSSANENPFNRFLQNPNYTQGSEINWFNDKQTPIQPDSLLESENTYRFTDEPFNNSVALSNKSQGSSDKKYFYGFNGLTINSNQSISTASAGLTQQLFNNYGQLITATDKAGALSQYKDKFTLWSLINKTSSDAELNAFGELLHRSVNVDTNNLSRFNSRGEPLISFDNKKKFLLNVVDRLDDLYFHKFEGYVGLSKAANTDGSNTEGYKTVQTVPLTNDSSIQTLSYVIQITNDDVNKISSNWKNNKANSLGLKKEIFMSLLIEQALDEGTQELAFLDLIRENQKQHQREHQQILVGDKRLYDILGQTLAINAKNF

SEQ ID NO: 63576 - protein, 340 aa, Mycoplasma genitalium
MAQKEIINKKNTQKNSSFIESNNLTSFDFFDAKKNSEIETISTGSLNLDEALGSGGLPLGRIVELYGNESSGKTTIALNAVASFQKAGKTACYIDAEGALDLAYAKSIGIDLNKLLIAHPRHGENAFALIESLIKTNKISLIVIDSVAALIPKQELEGTIEEQTIGLHARMMSKGLRRIQSILPDSKTCVLFINQLREKPGVMFGNNEVTTGGKALRFYSSLRMEAKRVELLKDKFNNYVGIKTKVMVSKNKIAKPFGVAILEIMFNRGFVHEHEVIDLALKFNVVVRAGNSYSFNNESIAVGKEKLLNVLSEKPALFEQIKELTVQQLANKNSFQQTAS

SEQ ID NO: 63577 - protein, 1292 aa, Mycoplasma genitalium
MTTTRRNKRNNKLYKNIKAIKLSIASNDTILNWSEGEVTKAETINYKSLKPEPGGLFDEAIFGPVKDYECACGKFKKIKYRGVRCDRCGVWVTESIVRRERMGHIALVSPVAHIWMSKELPSPSKISLVLNISYKEVEQVLYFVNYIVLDTGKIKDDKIMPFKFKEVLDLTGKGSLSTRQKMRRVIGYIFRNLIKSKSSEDYRKGKIFYESLKNSSLPFSLNDAFNYIKKYTGFRVGIGAEAILELLNKIDLNLEFSRLNDALRKAKKDSVEDAKVKKILRQLETISWFRNSKLHPKNMILHTVPVIPPDIRPIIQLDGAKFTTSDINNFYRRVIIRNDRLRRILEDGTVPSIVVNNEKRLLQESVDALFDNSSRHKPSLSKDKRSLKSLTDRLKGKQGLFRHNLLGKRVDYSGRSVIVVGPELKMYEVGIPALMILKLFKPFIIHGLINKFDENGNEIRPIAASIRQAEDMIKNQDDLIWGIVYDVIKDRPVLLNRAPTLHRLGIQAFEPRIVDGKAIRLHPLVTTAFNADFDGDQMAVHVPLSENAVNEARAVLLASKHILGLKDGRPIVTPTQDMVLGNYYLTTERKGQLGEGIIFSTVYEARAAYESQKVHLHAIVGISTKAFPNKKFACQGTLITTVGKIIFNDVLGNNVPYINDGEFDENACPEKFIVKQGEDVRQSILKHQIIPAFSKKVISKLIDLLYLLLEFKDLPKTLDNIKALGFKYSTFSSTTVSVFDIPKYTNKQNYFDSADQQVLKYKQFYNKGLLTDDERYKRVVKLWNNVKEKVSDEIQNLIKQEQYRDNSIVVMADSGARGNISNFTQLFGMRGLMSKSFNYERNNQSKIIKDTIEVPIKHSFFEGLTINEYFNSSYGARKGMTDTAMKTAKSGYMTRKLVDATHELIINHDDCGTRKGIVVEAIVETKTKSLIESLFDRIVNRYSITPIVDPETQKTIVEANSLITTQLAKQICATSIKEVLVRSVIYCERENGICQYCFGIDLSTGKLVELGTAVGVIAAQSIGEPGTQLTMRTFHTGGVSTENNLAQGFERLKQIFEVVTPKDFEKAVISEVKGTVKSITTVQNAQEVVIKSNVDERIYTIPFSAQIRVHVGDQVSPGSKITEGSVDIKQLLRIAGIQRVRQYMIVEIQKVYRIQGIDIADKYVEIIIRQLTNLLQVTDAGNSNLFVGQLVHSHYLNELNKSLLLAGKMPVIAINQVFGIDEAASKSNSFLSAASFQDTKKILTDAAVKNQVDYLLGLKENVIIGGKIPAGTGFLTDEELTFLGSKTVAEEY

SEQ ID NO: 63578 - protein, 1390 aa, Mycoplasma genitalium
MSQKSNFFQKRYSPTATRRYYGKIETNFIQPNLADIQIKSYQKFLDHDLEKLIASYFPIKSPNDRYTINFRGLHRTEPERDEAQSRAQSKTYEVGIYADLELVDNDKGTVKKARKSKKNIASNTNGVFLASMPLITHDGVFIINGIEKFVISQITRSPGIYMLTKSQLKLSNSRKRVQEGYVCEVLPANGSVMLIYISNKKKIEDAFVQILLRDAVREGAKIFPITTLLKAFGLNNREILKIFKNNEFIKRSLEAEIYNAKDFLSNVDPEIKNLLKEFRDGKTDLRRKGIASDQKLRSLVNEYVTLEKQYNALKQTSPNDSSLTALELEMENKMDSVITERAAKHIVNELSISLRDIENTEECHEVSFHALLCARFFRNKRYNLSNAGRYKVSRKLRLTERIYQKTLACDLFLKDGKLLLKKGTLLLKEEIDKIKQAAKNNEISFVNKMQLTTDGKAVDLAKESLFYETIDVYITNDNLSVSVPVIGIHNENDLNKAMTLSDFIASISYVINLPYGIGKYDDIDHLGNKRVKLINELITAKLESGFTRMERFLKEKLTIADGVNRGQQINEEGQVIEQGEKKELTIKSLINSKPIQIVIKDFFNTHQLTQFLDHQNPLSELSNKRRISAMGPGGISREDPNLDIRDVHYSQYGRICPIETPEGMNIGLIMSLASFAKIDENGFLMAPYRKIKAGVITDEVEYLTALREDEHIIAEISSLVNISNDNKILDKEIIGRYRSMQGLYDPLKIDYIDVAPHQVVSIGSSLIPFLENDDSARALMGTNMQRQAYPLIKPYAPAVGTGQEHKIASDSGLTMSSPCSGVVSYVDNSKIIITSDSSKKETVNLVKFERSNQNTCYNHKPIVEIGQRVNKDEIIVDGPAVNKSELALGQNVLVAFTTWNGYNYEDAIVISERLVKEDILTSLTINEYVAQCLSTKNGDEQITRDIPNVSDANKRYLDENGIIMVGAEVKEGDVLVGKVSPKGQVEVSPEEKLFKAIFPESVQNVRDSSLKVSHGGDGIVSAVKRFSIANGDELNDGVIEMIKVYVVQKRKIQIGDKLAGRHGNKGVISKVVPIEDMPHLEDGTPVDILLNPLGVPSRMNIGQIFETHLGYAAHKLAVRSLISSCFDQNKAKEFAIEINQPQARVERLIKGLKNQINDRNIKSEKEALEKLDNSDISLVLKEIGMSFDDLIYKIATPIFQGVNFLDLQDVMQEAGLDPQKNQGKFKLIDGRSGMPFERPISLGIMYMMKLNHMVDDKIHARAVGPYSKITQQPLGGKSQNGGQRFGEMEVWALEAYGAAYNLQELLTIKSDDVQGRNRAYAAIVKGAAFPEPGIPESFKLLTKELQGLALSVSFIYDDNTQQDSNNVSILQSDGEQDEFFNDFEFDTEGY

SEQ ID NO: 63579 - protein, 895 aa, Mycoplasma genitalium
MDLKKTLLMPKTSFAMQANLSTSEKNFHDFWKDKKVFQKLKKQNKGKQIKILHDGPPYANGSIHVGHALNKILKDFILRSWLYEGYDVVFIPGWDCHGLPIEHAVSKKNPSSYSNLSTVEKRKLCHQFALSQIAVQKEQFQRLGLLNDFQNCYYTIDESFQFKELELFLQAIKKGLIFQDLKPTYWSPISRTSLAEAEIEYKEVNSIALYLTFKVSKSDFLDENANLLVWTTTPWTLPTNQAIAIHPDFDYLLFEYNQQKFVILEKLFEVFTNKLNWTNAIKLKKFKGSNLKNSSYSHCFYNKVLPVLMGIHVVDNEGTGIVHSSPAFGIDDFYLCQKNKIKEVLISIDEKGVFNNLLNDKELENCFYLKANDLIINRLKQNNSFIFSEVISHREPHDWRSKTPVIYRASKQLFIKTKSIKKQLKKQINQVNFLNSKNQLRLKEMLLQRDEWCISRQRVWGLPIPIVYANNKPLLDFSTIQYTIKQLKKHGIDSWFEKDVTCFLKPDKTKKWVKYHKEIDTLDVWFDSGSSYNVLEINKYGSIADLYIEGSDQYRGWFNSSSNCGIIQNDLIPFKSLVSHGFTLDENGNKMSKSLGNIVDPLKICDQYGADILRLWVANTDWQIDNKIGVNILKQVAEQYRRIRNSLLRFILGNINGFNFTSMDDYKFSLEDKIVIHKTNSLVEQIEKFLEKYNFLGCLKVINKFVLWLSSWYFEIIKDTLYCDAKNNPNRLAKQAVLNYIFTQLISFLNIFIPHTAEDAWKNYSFNKKPISVNLFTKPTVFKVANSKNLGNIYKTFTSIKNAAFKEIEKLRKEGLISKNNQIELTVGINKKIPKKLKDNLALWLNVNSVNLTNNENEIKVKKTKKTMCERCWNFQTIIKQKLDHNLCSRCFKVC

SEQ ID NO: 63580 - protein, 166 aa, Mycoplasma genitalium
MYKSVINIVLFCPEIPNNTGNIVRSCTAFKANLHLIKPYGFFLNDKRMVRAGLNCWDKIQLFEHKSWEHFLQATTENKTIWLLTKSGDKTPDQICMTNKLPNELYFVFGQETKGLPKTIMDNFKQNQIRIPIWNSVRSINLANAVVCILYEYSKQNQYSNLDKQCA

SEQ ID NO: 63581 - protein, 714 aa, Mycoplasma genitalium
MNINFTPAGENRNFLQEIGRNINDEVLKNKVDPIIGRDNEIRRLIEILSRKSKNNPVLIGEPGVGKTAIVEGFVRRVVSNDVPLNLRDVEIYELSLSGLIAGTKFQGEFEKRINTILKQVKESNGRIILFIDEIHQIVGLGRNSSSGAMDIANILKPMLARGEIKVIGATTLKEYREYIEKDGALERRFQKILINEPSSQEALTIMRGLKTRWELFHNITIFDSALVAAVEMSTRYINERNLPDKAIDLIDEAAAKIKTEMSSEPVAIDSLKREIINLETEYAALKQDKENDNKQSKKEYLEKLKKQLDALKQKRDSLINEWKKEKADFENINKLKKEIEEFQTKLETYQSEGNYESASKILYSDIPRLKKELESAQQKYATSKHDLFKTEVSENEIAEVISQTTGIPLKKLLESEKDKLLHLGDEIKKRVKGQDEAIDAVVNTVIRGRVNINDPNKPIGSFIFLGSTGVGKTELAKSLAEVLFDNEKALIRFDMSEYMEKHSVAKLIGAPPGYIGYEQSGLLTEAVRRKPYSVLLFDEIEKAHPDVTNVLLQVLDDGTLKDSQGRVVNFKNTLIIMTSNLGSNFLLEGKKDLAIQSLKKHFRPEFINRIDEIVFFNVLEKDTVLSIINSLLAQLSKRLNKQNLFFNFDSNLTEFIYKSSFDQQFGARPIKRFIDHSVATLIAKYILQGKIKKGVGYNIAVVKDNITITQNNKS

SEQ ID NO: 63582 - protein, 280 aa, Mycoplasma genitalium
MDLKKAVAFLCEKLQVVETDIFKIEQIHSGFTNFSFFCELKDHSKFQIRLSRKDVILDRRNEQIILQLVEPFFSNPFVYFDVTTGNAIKRWIEGTQPKRATDLFLCRLVESLKKVHSVDWKPFANELLIFDPLVYFEKTKLSAFYKRLYLNLTKKHIDIPKTLCHHDATFDNLVWTPKKQVILIDFEWSCVDNPYYEIANIIREELTIETANKLIDIYGGLKRKLVFETVIYVLLFAFQWTEIMPQTEAILNYRKWVEKRLEYFLKALFPSIWKQAQKNS

SEQ ID NO: 63583 - protein, 162 aa, Mycoplasma genitalium
MVDSKKNKKQQVTDFSNLLSQSKGFVIFDYSGMSAVDATLMRKKLFNKGSKIKIVKNNILRRALKTSNFEGVDESVIKGKIAVAVGINEILETLKVVDSVVKEKELMKFVCGHFDNRIFNSDDLQKIAKLPGRNELYGMFLSVLQAPLRKFLYALQAVRNAK

SEQ ID NO: 63584 - protein, 122 aa, Mycoplasma genitalium
MGKLDKKQLIESLKEMTIVEIDEIIKAVEEAFGVTATPIVAAGAAGATQEAASEVSVKVTGYADNAKLAVLKLYREITGVGLMEAKTAVEKLPCVVKQDIKPEEAEELKKRFVEVGATVEVK

SEQ ID NO: 63585 - protein, 88 aa, Mycoplasma genitalium
MANIKSNEKRLRQDIKRNLNNKGQKTKLKTNVKKFNKEINLDNLSSVYSQADRLARKGIISLNRAKRLKSKNAVILHKSNTNSTAKKQ

SEQ ID NO: 63586 - protein, 564 aa, Mycoplasma genitalium
MLAGVLLLQIWLKCKYANVQFGEHGFNGDEFYLDFYINENFSTKQFAKIESDLNSLSSKLEGISQKFVSLDEALSFFENDQFTKNLLKKSNLNKFKITFFENKHFWIEDLTLTFIKKSFIKLLNVSVNYFLGDPSQLQLQRINGIFAQSKKELEQLIKENEERLKKDHRSLGKQLELFSFDPLIGAGLPIWLAKGTTLRNIIGNFVHHQQLLFGFNTVCSPVLANIELFKISGHYQHYKEDMFPAIKLDSQAMMLRPMTCPHHCLIFKQKRYSYKKMPQRFSEDSILHRFEASGGLIGLERVRCMTLLDNHIFCRADQIKSEIKNAFNLIQKVNKKFGFIFDRIDLSLHDPKNQSKFIDNPGLWRESESQMENVLKDLNIQYQKEIGAAAFYGPKIDFQFKTIFKKMITIATIQLDFLLPEKFDLTYIDKKNTLKKPVIIHVGIIGTYERFIAALLEKTSGNFPLWLAPVQAVIIPVNIQKHLKAAKKLYNKLLKENIRVNLDDNQDRLAKKVRQAIIEKIPLQLIVGDKEIENLEKLTCRGFKGEKITRISFNNFVKRVRRDG

SEQ ID NO: 63587 - protein, 537 aa, Mycoplasma genitalium
MFFIINDLKECISALKLKFDDQKELVKLVKNNSFNGFSSTIIFQLKSENHKKIADSIVEWFLKNKKDNYQNVFIANNNFINFQISYQKYLEYLIKTPCFTKKNIKILIESVSANPTGRIHLGHVRIAFFGDVLNNLAKLLGYTTVCEYWVNDYGQQARVFSFSVYQSLQLKKNIAIQQHPDGYSGIVIDKIASEIENFPVDNLNFEEFCKTSFLDHFLVNCTQKVLSLIKSDLNKIHVFIDSWKFESEIVKKTNFNDLLEQLKPNSYFYQDNALWLKTTLYGDDKDRVLIRSDKRASYFGTDVAYHLEKLQRGFDILFNVWGTDHEGHIKRMYCAFDALKNTTKTSLKIFALQLVTLYKNKELVRLSKRAGNVITIETMLSMISEDAARWFMLSQNNGTIIKIDLDIANLQNSANPVYYVQYAFARMNSILRIANSDQLKEITDCSLLINEKEISLLNQLVYYPFMLQKAMETGELHLLTNFLYETASLFHSWYKVCKINDDKNSLLSAQRLALLRSLQFIVKQILDVLKISTPQQM

SEQ ID NO: 63588 - protein, 612 aa, Mycoplasma genitalium
MSFIITVIGAGHAGLEAAFIVSKFNIKVNLLVLDINHLGSCPCNPSIGGPAKGIVTREIDVLGGMQAIAADNNALQYKLLNSSKGPAVQAIRAQIDKIGYKNWFQSQVKLNKNINLIQSEAINLIVRNEKIKGVILKDGSELLSDAVIITTGTYLRSKTYCGNTVKNQGPDQSKNSEKLSTNLINRGFKTIRLKTGTPPRILKTSLDYNQMELEINNNQNLAFSTTNKNFLPLEKQIPCYLVHTNQKIHDLILKNLKKSAMFNGSISAQGPLYCPSIEDKVFKFSQKPRHQIFVEPESLSLDTIYLAGLSTSFTPEIQKEIIQLLPGFQNAEIKKFGYAIEYDAFLSNQLKPTLETKLIENLYFAGQINGTSGYEEAAGQGLMAGINAALKLLKKPPFILQRNEAYIGVMINDLVTKTISDPYRLLTSRAEYRLWLRNDNVQERLIKKSFELGLTDKKTYELFLKKEKKKQELISFLKNTQVGKVKALKFTNKNTAQSLYDFNKRSEINLDKLIKDLPEKYQLDSETLKQIEIEIKYEGYIKKNEKYFKGLDKLSKIKIPHTFDYHKVKNLASEAIFKLSNFKPSNLAIASQIAGVNFNDIIAIKHFLKTYE

SEQ ID NO: 63589 - protein, 192 aa, Mycoplasma genitalium
MNNANFEKYVDLVFEANKNFNLTGFKTKEAIYQNLVIEILTLFKGYEKFFIDKTVADLGSGNGSPGIILKLLFQKIKKLVLIDSKHKKISFLNKLTKQLNLEKTVAICERIEVHKNHYDVICSRGLSTIIKVNDLAFSLLNSKGIIFHIKQSLDQYIEFEKSNQKNQFNLLFIKHFTSQNKKLILIALQKND

SEQ ID NO: 63590 - protein, 248 aa, Mycoplasma genitalium
MTNLIKYLKELQNWLFDYVKKSKAKGVIFGLSGGIDSAVVAAIAKETFGFENHLALIMHINNSKLDFQATSELVKKMQFNSINIELEESFNLLVKTLGIDPKKDFLTAGNIKARLRMITLYAYAQKHNFLVLGTGNFVEYTLGYFTKWGDGACDIAPLAWLLKEDVYKLAKHFNIPEIVITRAPTASLFEGQTDETEMGITYKELDQYLKGDLILSSEKQKIVLDLKAKAEHKHNSPLKFKHLYNFQN

SEQ ID NO: 63591 - protein, 433 aa, Mycoplasma genitalium
MAITDYCECRFTAGNGGNGIIAWKREAHYDKGGPGGGNGGNGGNVILQADHNCDSLFFLKNKKHLFAEDGQNGKPDLAHGKNGSDLLIKVPIGTTVKNLENNSVLVDFVHDKQSFILCFGGKGGKGNAAFKSPIMRAPNLYENGDKGEILNVSLEVKYLANVGIVGFPNSGKSTLISKLSNAKPKIANYRFTTLIPVLGVVKYQNNSLVFADIPGLIENASEGSGLGHDFLRHIERCEILIHLISLDPVDNDDPCKAYLQIMDELSKYSPLLVKKKMLVVANKIDVNEGEKRFKKLEKFLQKKSISVLKISALKKELGNLLDRVFELYNKTISQFGANKFSLPMELEKHYVFQNTNENNNDPLNIEKDSLNRWIVNCKRLRYWFDKIPQTTLDNIRRLGNKIKEIGIEDQLKSVGAKKGDIIFFDGCEFVIND

SEQ ID NO: 63592 - protein, 149 aa, Mycoplasma genitalium
MGKEIEPIFDLVLLWFLFVPLLIYLFLAFFLFAFTKYIIWELIPFCYSTAFTLIVLFLSGIIPMAWNSWIILLRFFLVLITLMLSFFLLNKMTNFFLIRSKYAIIIAENLLKTGKSKTKNRQKLQQIQSDLERKKSAEIVFKIKKKKPK

SEQ ID NO: 63593 - protein, 1616 aa, Mycoplasma genitalium
MPKTTKNKNKNTTPKSKTKKYLESANKKSVTKPKKEQDKVENLFDQPFLGEIKKNILKKTKSFNSKKKETVKSKSKSPIDFFDETKRGVFIVPPETDILSRRELNQKTVVNTVPNQTSSYPTINENKLVELNNQPETKVLETKKDSFTTTIREKKLNPEDSQAFWYIFVGDRKYGFWKNHTWVWLGYFDQLQRWNYFKVIETVEVPQEHAAFIKQRPADIDFWRPLVGNPNYGFVQNNTWIWKGFFDKKLNWIPDPVRFTEEALGHTDSLVDEIEKKTISEQPYWEQENDIVVTVFNTKSLASSLENELLLENSSEEQPVIEEVKPRRNEVIFRNPVTKLHFEKEKFEFLNPVKETNETIPLIEIVKEEVKVESEVEAPVEIEPEAACEPETTIPEVETVFVYEDDLKGLDSNQTQAGNVPEVETVFVYEDDLKGLDSIIKDDQQHDEIAKHVEHLSQDYSKEIKDSAKADLSNISDDIDSVWKEFGSFTDETQKSVEEKSQVDEIILDANNDFINESLFRDEVVNNIDSQINETVSEQQFEPTYSVNEFQQEFSEPVVSDEKIKETNSDESVNTDLTALFSEKLVNEVLLTNEYVDVNAPFSTETEVKVSSELPKSELVDEITFINNDPKPQEGLEYKVDFLETEPKSLFDEKTTIVVESEPPFIQPDLSLELDSVNDVDKSLETKTTSVELNHEEIGNEFINLDVSEKEVQEQPTTQLETDSEFVLPTYQIVEDSFTESAETPNEFSSEQKDTLEFISQTQEVETSESNVPTVEQETKLFEHQDENNLFTPLPLDLTEIIESNALFDSKPDEKESSDSELQPTFKEIKLDSTVEVPQESSQVEATFDTVQPEAVFDEIKTQELQPEATTEVVFDDHFQPDVQPEQTPQEAKFDSPVEIPQESSQAEFHAEQISDEIKLEEKTEAVFDHQQLENQSEETVVTPTEVTAFEPETIETQLEPSSEDQPSEPALDQNHPEIVTAEVEQIFDGTKLEDLKLEEANFDNVENNEVQPKETEAEITFDETKELQQETSSEPLSTEELKSEATFDNVSEAESEAVFEKPQLETQTEKILEEEPKSEPVDQLITEASFDTVKHEAVFDKNQTQTEGLEEPQVSSEAEVVDQTTTDTVGEPEAVFDVQPEKTTEVKFDDVENQQKVISEPQVEQQPGEAVFEPSAEAKFDSPVESVQDSQPEPVLEEVQTQPEIQPVESQPEATFDTVQPEQTPQEAKFDSPVETVEQPEFSSEPTQQHVESEASFDEPNYDFDEPNYDFDQPSYDSDLQPSEPQYDVDEPNYDFDEPNYEIESKPSEPQFEPQVEQQPGEAVFEPSAEAKFDSPVESVQDSQPEPLLEEVQTQPEIQPVESQPEATFDTVQPEQTPQEAKFDSPVETIQEPQVSSEPEVVVQPNFEERKPETVLEEPQADEIQPEASEEESLDWELLVGNNSYGHYEPDGEWVWAGFFGDDQKWNKDATVKWARERDYLPLIGDEVYGRYNNKGEWIWYGFYDESGDWVLVDEQWKNRQPRINEAPKFWEKLIGNEEYGYYEDNEWNWYDGEFDSEGNWLVFQSEETENLNEDITKDIPALEGYDIDSIDADEWLSQFSADDAKDVFGSNDKK

SEQ ID NO: 63594 - protein, 447 aa, Mycoplasma genitalium
MRINKPFSDDSNTVVFVSSKTYGVKEEAAHNPNVEFGVVLPTDFPAFNRALVQFLKRKKTKLNINLDSLIELYKKNENSGCFHTAIKTVITSVTFCETTPFTMKTKPEKNVEVAVQCAVEYHNLVKEYETVGEYVNLARELQDTPSDLLYSEVFVKHFEKAASKLPVKIKVLKQSDLIKKKMGLLLGVNQGSEREARLLVISYQANKNSKEKLAFVGKGITYDSGGMNIKTGDYMRGMKYDMSGAAIVCSTVLALAKNKVKTNVVAVAALTENLPGAKAQRPDDIKIAYNGKSVEIDNTDAEGRLVLADAITYAAKDLAATHIIDVATLTGLMSYILSTTYTGIFSTCDHQWESFKKAACSAGEPVWRLPMHPDYLKPLQLTKLADLQNSTSARGAGSSRAACFLAEFREGVSLIHCDIASTASIENLGQGVLVRTLYERASQLANK

SEQ ID NO: 63595 - protein, 543 aa, Mycoplasma genitalium
MAKELIFGKDARTRLLQGINKIANAVKVTVGPKGQNVILERKFANPLITNDGVTIAKEIELSDPVENIGAKVISVAAVSTNDIAGDGTTTATILAQEMTNRGIEIINKGANPVNIRRGIEDASLLIIKELEKYSKKINTNEEIEQVAAISSGSKEIGKLIAQAMALVGKNGVITTDDAKTINTTLETTEGIEFKGTYASPYMVSDQEKMEVVLEQPKILVSSLKINTIKEILPLLEGSVENGNPLLIVAPDFAEEVVTTLAVNKLRGTINVVAVKCNEYGERQKAALEDLAISSGTLAYNTEINSGFKDVTVDNLGDARKVQIAKGKTTVIGGKGNKDKIKKHVELLNGRLKQTTDKYDSDLIKERIAYLSQGVAVIRVGGATELAQKELKLRIEDALNSTKAAVEEGIIAGGGVGLLNASCVLTNSKLKERYENETSVENIKEILLGFEIVQKSLEAPARQIIQNSGVDPVKILSELKNEKTGVGFDAETKKKVDMIANGIIDPTKVTKTALEKAASVASSLITTNVAVYDVKERKDNSFSE

SEQ ID NO: 63596 - protein, 406 aa, Mycoplasma genitalium
MFSKVRLLLNKELQRQRENICLIASENYVSQDILAVTGSVLTNKYAEGYPSKRFYQGCEVVDESENLAIESCKTLFGAQWANVQPHSGSSANYAVYLALLKPGDTILGLDLNCGGHLTHGSPVNFSGKQYQAVTYSLDFETETLDYDAILQIALEHKPKLIICGFSNYSRTVDFKKFSAIAKQVNAYLLADIAHIAGFIAAGLHQNPLPFVDVVTSTTHKTLRGPRGGIIMSNNQAIIKKLDSGVFPGCQGGPLQHVIAAKYVCFKEALNPKFKQYMQQVKDNALAMANWFLKQGYRVVSKGTETHLFSLVVGNGKDVALWLQKANIVLNMNTIPFETKSAFSPSGIRLGTPAMTTRGFKTNDFIFVASLIDKVIKSNGNQKVISQTKTAVLNLLKRFPLYKGLAY

SEQ ID NO: 63597 - protein, 152 aa, Mycoplasma genitalium
MSFNIFIASDHTGLTLKKIISEHLKTKQFNVVDLGPNYFDANDDYPDFAFLVADKVKKNSDKDLGILICGTGVGVCMAANKVKGVLAALVVSEKTAALARQHDNANVLCLSSRFVTDSENIKIVDDFLKANFEGGRHQRRIDKIIRYEKETE

SEQ ID NO: 63598 - protein, 518 aa, Mycoplasma genitalium
MADKLNEYVALIKTEIKKYSKKIFNSEIGQVISVADGIAKVSGLENALLNELIQFENNIQGIVLNLEQNTVGIALFGDYSSLREGSTAKRTHSVMKTPVGDVMLGRIVNALGEAIDGRGDIKATEYDQIEKIAPGVMKRKSVNQPLETGILTIDALFPIGKGQRELIVGDRQTGKTAIAIDTIINQKDKDVYCVYVAIGQKNSSVAQIVHQLEVNDSMKYTTVVCATASDSDSMVYLSPFTGITIAEYWLKKGKDVLIVFDDLSKHAVAYRTLSLLLKRPPGREAFPGDVFYLHSRLLERACKLNDENGGGSITALPIIETQAGDISAYIPTNVISITDGQLFMVSSLFNAGQRPAIQIGLSVSRVGSAAQTKAIKQQTGSLKLELAQYSELDSFSQFGSDLDENTKKVLEHGKRVMEMIKQPNGKPYSQVHEALFLFAINKAFIKFIPVDEIAKFKQRITEEFNGSHPLFKELSNKKEFTEDLESKTKTAFKMLVKRFISTLTDYDITKFGSIEELN

SEQ ID NO: 63599 - protein, 176 aa, Mycoplasma genitalium
MINAQAFGTALFQLSEEQKQVKKIYEECHFFLKLMRNFKDGSLSFLLNSYTLTKPDKIRLVDKLFKNHFCQVFVDFLKVIILKGYFTLVEQAIKYFFDNVESQKHIQFIKIITAFELSSKQLNKIIAIMEKRFKTKVVYKTEIDRSLISGIRIESSSHLFEKNVRDELKRIMAHFI

SEQ ID NO: 63600 - protein, 208 aa, Mycoplasma genitalium
MVKAKKLVFKWSLLVFSFFTLSLFLVSCTENVREIKSSSVINELFPNFWVFITHLLAFFILLTLMIFLFWKPTQRFLNNRKNLLEAQIKQANELEKQARNLLEESNQRHEKALIVSKEIVDQANYEALQLKSEIEKTANRQANLMIFQARQEIEKERRSLKEQSIKESVELAMLAAQELILKKIDQKSDREFIDKFIRDLEANETEDD

SEQ ID NO: 63601 - protein, 292 aa, Mycoplasma genitalium
MSPREIVLKETNQIDFISNQSIFDISPISGWKPFAPTDQILGIFIVFVLLLTFFIFYKLKLKKADSLKNNSYFLLLFQMLFVWVQDTTADLLGEENKKFAPYFLMLLLYIVSSNLVSLLGGISPPTSSLTFTFSLGLATFIGIVVMGIRYQRWNFFKEFAFGITVKGKKYSTFIPNPFSILSGFAPLFSISLRLWGNILAGTVILALFYNFWIFIFSSINNQPLALSLGTVFAGLITPVLHIYFDVIAGVLQGYVFVMLTYNYWAKMRNQGLENNNASELHFKGIKVIQENI

SEQ ID NO: 63602 - protein, 458 aa, Mycoplasma genitalium [sequence omitted]

SEQ ID NO: 63603 - protein, 329 aa, Mycoplasma genitalium
MEKNIKALWKNFQLKLEKIKHYRKLYEQQIKEYKKKITGLNNETDANEISRIKNEIEILNRLIKIKNTKDNVIKKDFDEKNVFEIRNFNFWYNKNKQVLFDINLDIKRNKITALIGKSGCGKSTFIRCLNKLNDLNENTRWTGDIYFLGKNINSGIINDLTLRTSVGMVFQKLTPFNFSIFENIAYGIRAHGIHNKNAINEIVRQALISAALWDEVKDNLHRNANTLSGGQQQRLCIARAIALQPDVLLMDEPTSALDSIATNSIELLIQQLKEKFTIVIVTHSMAQTIRITDETIFFADGRVIEQGTTKQIFTKPKQKATNSYISGKN

SEQ ID NO: 63604 - protein, 132 aa, Mycoplasma genitalium
MDKKSFYGLGRRKSSTAKVYLYQSKDKGKITINHRNPSDYFPNKLVIQDMEQPLELTKLKDNFDINVVVKGGGFTGQAGAIRLGIVRALIKFNPDLKKLLKTKKLTTRDKRAKERKKFGLYGARRAPQFTKR

SEQ ID NO: 63605 - protein, 146 aa, Mycoplasma genitalium
MQKTSMLTKEEAIKNRKWYLVDASGLVLGKLAVKAANLIRGKNKANFTPNQDCGDHLIIINSDQVVLTGNKKDNEFWYHHSQYMGGIKKTSGRDMINKNSDKLVFNAVKGMLPDNRLSRRLITKVHVFKNDKHNMEAQKPTLLNWS

SEQ ID NO: 63606 - protein, 331 aa, Mycoplasma genitalium
MLDDFESNGLNFTYFLRELFALTVNLYAYAKLKNINVLDSTEKTMIETLNFEKQHYAFLIKAIEENTNFGLSQLTLIDRLKAIVISYNEFFNQKPLTISSPSNEKSLHLETEYLEKKKIKKSNHKQDQKHFSLFEKSFIDKSEKTPKNDEVTNNKFLDTSKLNLANIALAINAFNDNKWINHFQNLLSVFQTKFNDKDKQNNLSYFNNFIDKYSARDIVKATKIVKASSFGIVILFEDQKIAMRLWKEAIEEGNVQATIFQIFNQNLFLASFSEHQYKTTITEETKNQKYQTEVLNLTQLENLAKPFLKEKKRSLSQKMVDKYFKGLFEEK

SEQ ID NO: 63607 - protein, 260 aa, Mycoplasma genitalium
MHQVFYQKYRPINFKQTLGQESIRKILVNAINRDKLPNGYIFSGERGTGKTTFAKIIAKAINCLNWDQIDVCNSCDVCKSINTNSAIDIVEIDAASKNGINDIRELVENVFNHPFTFKKKVYILDEAHMLTTQSWGGLLKTLEESPPYVLFIFTTTEFNKIPLTILSRCQSFFFKKITSDLILERLNDIAKKEKIKIEKDALIKIADLSQGSLRDGLSLLDQLAISLIVKKLVLLMLKKHLISLIEMQNLLLLKQFYQEI

SEQ ID NO: 63608 - protein, 954 aa, Mycoplasma genitalium
MTLKPEWKNNDFIRVKGARENNLKNINIDIPKNQFVVITGLSGSGKSSLAFNTIYAEGRRRYLESLSSYARQFLGNSDKPDVDLIEGLSPAISIDQKTTSHNPRSTVGTVTEIYDYLRLLWARIGTPYCPNGHGSIQTQTINQIANQIFDLPNKSKVQLLAPTVKNQRGIFTNEFIKYKQLGFLRVLVDGQIYTLDDEIKLDKNTKHNISVVIDRIIINKDNQTYSRIVDSIETIDRLTNGKIEVLKEDGTILNFSKNHGCDKCGFSISELEPRLFSFNSPLGSCSYCKGLGFSYEPDVDKIIADSKLSINQGAIDIFKNIVHGTSLDWQRFLSLVNHYKIPLDKPIEQLDKSQLNLILEGSDEPIEIKTISNSGAKNIRFEHYEGIANLIKRRHLETNSQVSREWYSAYMSEITCKKCHGKKLIKDALSVKLGGIDIISFTELSIDKSIDFLLKLELNDEQKKIGELALKEIINRLSFLKNVGLDYLNLARRASTLSGGEAQRIRLATQIGSQLTGVLYVMDEPSIGLHQKDNMRLIKTMMVMRDLGNTLLVVEHDSETMLAADYLIDIGPKAGNEGGELVACGTPLQVMENSNSITGQYLSGKKQISIPKNRHSGNGKTIIIKGAKVNNLKNINVTIPLNKLVLITGVSGSGKSSLINQTLVPALERILYRKGVKKDTYKEIIGANNIDKIIVVSQDPIGRTPRSNPATYISVFDDIRDLFANTKEAKARGYTNSRFSFNVPGGRCDKCFGDGVIRIEMHFLPDVYVKCEVCNGKKYNSQTLEIKYLGKSIFDVLQMSCKEAYEFFKAIPNISRKLRLLCDVGLEYLQLGINVTFLSGGEAQRIKLSKFLQKKSTGKTLFVLDEPSTGLHLEDINKLLTIIQRIIKNGDTVVVIEHNLDIIKVADYIIDLGPEGGDNGGQIVAQGTPEQLINQVNKSYTAQYLSKILKPDSI

SEQ ID NO: 63609 - protein, 86 aa, Mycoplasma genitalium
MKIDKEQIIKAHQLHKNDVGSVQVQISILTDQIKKLTDHLLANKKDFISKRGLYTKVSKRKRLLKYLKERNIETYRDLIKNLNLRG

SEQ ID NO: 63610 - protein, 449 aa, Mycoplasma genitalium
MDSTFHELGISQTLIETLNALHINKPTKIQQISIPQFLSEKNLIVHSPTGTGKTAAFAIPIIEKLLKEDQTAKPTLVIAPTRELVEQIKTTFSNIAKNKKLRIISLIGGVPAWKQIKKIKTNPQIIVGTMGRIMDLLERKAIHFSDLEHLIIDEVDLMLDRGFKKQIFNLLEQINSFKQIAVYSASYNQEAINIAKQITNNGIFIGSPEFNKDANTNNDKLIKQFVCYLFSDQKKQALYSLIKTAQVKSIIVFCDTKKLVDDLHVFLRKNELRTFALHGDKKQFIRERNLKIFANTKQPTILVTTDLIGRGIHVEAIDMVINYSACLNLEAYINRMGRTGRNNHKGTCVTFCTSQEKKVFLKMVEKITDNRIAECKQMEIKLIPLKNKAKTKKGGISLDCVQKIYANAKPYDRNKRVPLASDLFKSRMRQPEKAMQKQKIHDNDWQSNM

SEQ ID NO: 63611 - protein, 64 aa, Mycoplasma genitalium
MAKKDQLTLRGPLYGNNRSHSKTITRRKWNVNLQSCKIKDTNGKVTRILVSTKTIRTLKKQNRF

SEQ ID NO: 63612 - protein, 572 aa, Mycoplasma genitalium
MKKIIGIGVSDGIAVAKAFIIQTPQFDVKKYTNVKMTPTQAKKLLSSAFQKAKKDLEEIKTITVKNINQEAGMIFDAHIQILNDPTITEQLEQQLNKNIHPVIAVDNVFQQTALMFSEMDDKYFKERASDILDLHQRLLSYLTGVKLNDLIRIKSDVIIVANDLTPSQTATLNKKYVKGFLTESGGKTSHAAIMARSMEIPAIVGLKNITSKVEDGKTVGINGRKGIVGFDFSSKDITQWKQEKELESNFQNELKQYTNKLVKTLDGYEVIVASNIGNVKDMDLAVEYNTNGIGLFRTEFLYMSSQDWPDESVQFEAYKTVLQKAKNDLVIIRTLDIGGDKKLNYFQFPHEDNPFLGYRAIRLTLDKQAVFKTQLRALLRASDYGNLGIMFPMVATLDELVQVKQLLTKVQQEFNETKKFKLGIMIEIPSAALAADCLGKHVDFFSIGSNDLIQYSFAADRMNKNVSYLYQPLNPALLRLIKLVVEGGKLNNVWTGMCGEMASDQYAIPLLLGLGLTELSMSASSMFKARMVIAKITINECKSLVEKALKLTSDSAVRKLVENFFKKKNIFI

SEQ ID NO: 63613 - protein, 298 aa, Mycoplasma genitalium
MATKIELIKELRKSTQASVMDCKQALEKNNDDFEKAVKWLRENGIVKSTKKLNKVASEGIIVLKSNLHKAIMVEINSQTDFVAKNQELKEFSDLMLEKIFEKVNPKTELVEIEKIQINNDEKVSEKLALIASKTDEKIVLRRVVVFETKTNQIFTYLHANKRIGVIIEIQGKLNEDDGKHLAMHIAANSPQFIDQSDVNQTWLQNERNIIRSQAELEVKENPKKAIFLEKTIEGRVNKLLIDTCLINQKYLIDETKTIGQFLKEKQAKVLKFIRYEVGEGIIKETVDFVSEVNAQIKQ

SEQ ID NO: 63614 - protein, 243 aa, Mycoplasma genitalium
MHKSNNKIRQRIIIKLSGAGLTKENSQPFSNDFFETIINQLKVLKESYQVGIVIGGGNIIRGNNCQEFNIAEYHGHQLGIIATVVNGYFLKAKLDAHNLKSALLSAISCPSLAVQILSQQTIDKAFEENDFVIFSGGTGNPYFSTDTALALRAVQTKAVAILIGKNGVDGVYTADPKKDKNATFLPTLNYDHAIKNDLKIMDITAFTMCKENNLKIIIFNINAENALLDALNKKGRFTIIENN

SEQ ID NO: 63615 - protein, 183 aa, Mycoplasma genitalium
MTKAHYIDFFKQAADKKIQWLKEELTKIRTGRPNPKIFDNLLIESYGQKMPLISLAQVTINPPREIIIKPFDPKSNTNAIYSEIQRANIGVQPVIDGEKIRVNFPQITQETRLENIKHVKKIIEQIYQELRVVRRDALQMIKKDNHNEDLENSLKAEIEKINKNYSNQLEEIQKDKEKELLTI

SEQ ID NO: 63616 - protein, 374 aa, Mycoplasma genitalium
MLFLLISAFADGFNFWSPWSADFNSRTLKVEQASGVTSVISTEINENFKAVRFSFSIIIILIVGVIGSLMIWELFTNILKNKPKLSLSLTLLNAGIIIFGMIGTFVVVYFYKWNATVNGIWTLSFTLSVVLLWIIYIACMSKTRIKFSLQLSYSLGAIACFIASIGTIYFSVIRGWTTIFLLMSLAVSVDTFPFLFGKRFGKNPLIKISPSKTWEGAFFGIISTIVVVALLCVLYSIPFFVAKPTFNQTNGIALNTPQNYDSHNLITNIFLIAFISGGSSFYIYWWVSTLALIFTGSVFAIGGDLFFSYIKRLISIKDFSKVLGKHGGVLDRFDSSSFLISFFFVYHLIAGTISNQRLLMEPNTYFSAITSIQS

SEQ ID NO: 63617 - protein, 270 aa, Mycoplasma genitalium
MDTYTSAKINWFPGHMKKIHDQLKKLSSQIDGIIEIVDARAPTLTHNSEIISYFLNKPKLILALKTDLAQYKPNKKILFGSLKEPFKLKKKVLKTLTTLFANKRQQLKAKGLLIKQFRLAVIGMPNVGKSSLINLLINKNHLKVANRAGITKSLNWIQISPELLLSDTPGVFLKRIDEIQIGYKLVLTNVIRREVVNIEEVGMFAFNYLKKHYKQLLPFEADSFINFLEKFAKVRGLIKKANELNTNLACEIFINELINGKYGKLSYELN

SEQ ID NO: 63618 - protein, 119 aa, Mycoplasma genitalium
MKKINKQALIDAVEQKQLKEYVPEFGAGDEVNVAIKLREKEKVRVQNFTGTVLRRRGRGISETFMVRKTTDGIPIEKNFQIHNPNIDIEVKRRGKVRRAYISYMRERSGKSAKIKEKKS

SEQ ID NO: 63619 - protein, 231 aa, Mycoplasma genitalium
MKITVLTLFENTIWPYLNSSIMLQAQKANLVQFEVVNWRNFCNDKHKTVDDMAYGGGSGMVLKAEPIINCLNFYKAPNSHVVLLSPEGEQFSQNCAKKLTKYEHLILLSGHYEGFDQRIYKYIDQIVSLGDFVLSGGELVALSVIDATVRLIKGVINDQSLICESFNDNLLDFPVYTRPYDLKGDKVPEVLLSGDHQKIESFRKEQQILKTAKYRPDLYKKYLENKNEKNK

SEQ ID NO: 63620 - protein, 89 aa, Mycoplasma genitalium
MRMGRVHYPLYRIVAVDSRVKRNGKYIALIGHLNPALKENKCKLDETVALDWLNKGAIPTDTVRSLFSESGLWKKFIESKNKKETSPKK

SEQ ID NO: 63621 - protein, 144 aa, Mycoplasma genitalium
MKRISELLGYDLISLANKVPFVVCEVVSVIPIANTHLKRCKVNTGLTKSLDIVCGANNVRVGMKTVLVQVGGVLPSGTVIKKTKIAGFDSVGMLCSEKELNLKQKNEGIIEINPKIKVGKPFIDVYLNKQHSKWVNTKKRVKLS

SEQ ID NO: 63622 - protein, 394 aa, Mycoplasma genitalium
MAREKFDRSKPHVNVGTIGHIDHGKTTLTAAICTVLAKEGKSAATRYDEIDKAPEEKARGITINSAHVEYSSDKRHYAHVDCPGHADYIKNMITGAAQMDGAILVVSATDSVMPQTREHILLARQVGVPKMVVFLNKCDIASDEEVQELVAEEVRDLLTSYGFDGKNTPIIYGSALKALEGDPKWEAKIHDLIKAVDEWIPTPTREVDKPFLLAIEDTMTITGRGTVVTGRVERGELKVGQEVEIVGLKPIRKAVVTGIEMFKKELDSAMAGDNAGVLLRGVERKEVERGQVLAKPGSIKPHKKFKAEIYALKKEEGGRHTGFLNGYRPQFYFRTTDVTGSIALAENTEMVLPGDNASITVELIAPIACEKGSKFSIREGGRTVGAGTVTEVLE

SEQ ID NO: 63623 - protein, 292 aa, Mycoplasma genitalium
MKTKIRKAVIPAAGLGVRLLPATKAIPKEMLPLVNKPTIQYIVEEAVKSGIEQILVIVSSKKTAILDHFDYDLILENALIQKNKLQEHKEIEDIANLAHIFFVRQKNQDGLGDAILFAESFVGNEDFAVLLGDDVVFSKEPALKQCLEAYYETNCQTIGVQEVDPCHVDKYGIITPEGDYKNKDLIKVLAMTEKPKPKDAKSNLAILGRYVLKPSIFKALRSVPYGVGGELQLTDGLNFCLKNENFYARKFTGTRFDVGTKSGFIKANLFTALNNKDISKKEVLELLNLVKA

SEQ ID NO: 63624 - protein, 407 aa, Mycoplasma genitalium
MLINIDNILVKMLNNILQFLKERELYSQANFETELDNHLKEKKNNFYVGFDPTANSLHIGNYVLIHIAKLLKDMGHTPHIVLGSATALIGDPTGRIELRKILEEKEIVKNTKTIKKQIKQFLGDVIIHENKVWLEKLNYIEVIRELGAFFSVNKMLSTDAFSARWEKGLTLMELNYMILQAYDFYYLHKNHNVTLQIGGSDQWANILAGANLIKRKNNASVFGLTANLLVKANGEKMGKTSSGALWLDENKTSVFDFYQYWINLDDQSLKKTFLMLTMLDKKVIDELCNLKGPKIKQTKQMLAFLITELIHGTKKAKEAQQRSELIFSNQPDLDIKLVKTSTNLIDYLVETKFIKSKSEARRLISQKGLTINNKHVLDLNQIIEWKEELQIIRKGKKSFLTIKTVNS

SEQ ID NO: 63625 - protein, 702 aa, Mycoplasma genitalium
MKKRNKGLVEQTTTEKNNFSRKTAWKVFWWVIILAVVIGVLAYIFSPRAATAVVESWKLNGGSNSTLTAKVSGFSNELTFKQINGSTYVTDTILQVSITFDGLNSPLTVTAHKTVNSNGNVIFNIANLSINQSNGQITVNSNGTMMNGGSSNNTKSIAGFETLGTFIAPDTRARDVLNGLFGLLPIIIFVVFFLLFWRSARGISAGGREEDNIFSIGKTQAKLAKSTVKFTNIAGLQEEKHELLEIVDYLKNPLKYAQMGARSPRGVILYGPPGTGKTLLAKAVAGEAGVPFFQSTGSGFEDMLVGVGAKRVRDLFNKAKKAAPCIIFIDEIDSVGSKRGRVELSSYSVVEQTLNQLLAEMDGFTSRTGVVVMAATNRLDVLDDALLRPGRFDRHIQINLPDIKEREGILKVHAENKNLSSKISLLDVAKRTPGFSGAQLENVINEATLLAVRDNRTTININDIDEAIDRVIAGPAKKSRVISDEDRKLVAYHEAGHALVGLHVHSNDEVQKITIIPRGQAGGYTLSTPKSGDLNLKRKSDLLAMIATAMGGRAAEEEIYGNLEITTGASSDFYKATNIARAMVTQLGMSKLGQVQYVPSQGTLPSNVKLYSEQTAKDIDNEINFIIEEQYKKAKTIIKSNRKELELLVEALLIAETILKSDIDFIHKNTKLPPEILLQKQEQQAKQKLNKSEVKPESETNS

SEQ ID NO: 63626 - protein, 169 aa, Mycoplasma genitalium
MQLRVGLGSKKYHIKLRKESKNKFWLGGVDFENSKYIYDLENSDEVSDVIQLAVADALFGATALGDGHIVFNKGKSTVQFKGTAKKEAPRVLARTYNFIRKNWIINNIDISLEIPQEQKVDDYKHAIFAFICSALRISELTINLKVRKPLDSNEINCLAVVLVERQKTK

SEQ ID NO: 63627 - protein, 484 aa, Mycoplasma genitalium
MEKIRTRYAPSPTGYLHVGGTRTAIFNFLLAKHFNGEFIIRIEDTDTERNIKEGINSQFDNLRWLGVIADESVYNPGNYGPYLQSQKLAVYKKLAFDLIEKNLAYRCFCSKEKLESDRKQAINNHKTPKYLGHCRNLHSKKITNHLEKNDPFTIRLKINNEAEYSWNDLVRGQITIPGSALTDIVILKANGVATYNFAVVIDDYDMEITDVLRGAEHISNTAYQLAIYQALGFKRIPRFGHLSVIVDESGKKLSKRDEKTTQFIEQFKQQGYLPEALLNFLALLGWHPQYNQEFFNLKQLIENFSLSRVVSAPAFFDIKKLQWINANYIKQLTDNAYFNFIDNYLDVKVDYLKDKNREISLLFKNQITHGVQINELIRESFATKIGVENLAKKSHILFKNIKLFLEQLAKSLQGLEEWKAEQIKTTINKVGAVFNLKGKQLFMPIRLIFTNKEHGPDLAHIIEIFDKESAINLIKQFINATNLF

SEQ ID NO: 63628 - protein, 259 aa, Mycoplasma genitalium
MNSFFPSRKLGQNFTVNLSVIKRIFAFVKNLNPQAIVEIGVGKGALTNYLLKLKIPYKGIEIDKRLIEYLLVEKILTEDQLVKGDILKKDFNSFFENLSPLLCGNIPYSITSPIINKFLESKLRSFVLMTQKEFANRLLAKVNSSDYSAFGAFCQYYLTITTVFKIDRHAFKPKPKVDSTLILLEKNKSVSYDFKFGLFLKQCFNQRRKMLINNLKHFFAVDYLLNIIQKQNLKTSIRAQELSPCQLFNLYQNICNGKN

SEQ ID NO: 63629 - protein, 385 aa, Mycoplasma genitalium
MPIKLAQTNKEIKTTFNPFWSAAVVNEKNNWKNFKKFSAIFIKVIKVFIFIFLTIVGLWGCTQTLAQPWTGTNQVLGSGLEIGYKFGTTGDYRYDLISNNFGPYFTFSDYTLAYGPFYGWFVWPAAQIVLPIMYATRVPLGSGVELGFNMILSLIVLLLLVRLITIVITLNSTLALEKMNEVQGKLAEINAKYKGAIDLQSKRNRQLEIMSLYKKHNIKSSAAFVQVFVTLPIFLIIYRIVTTLRPIKAIILFNFWDLSKVPLTEIFSNFTTTGWPFIIFLVIVLPVQFLSQKLPQVWASKRNENAKAHSQKSIEQLNKTKKMQLIFYFVFAAITAFSAAGVGVYWFLNALFTLLQSYLTHVFIVKRREKRKQNYSKLDLILERE

SEQ ID NO: 63630 - protein, 128 aa, Mycoplasma genitalium
MLNSRFPVSVKKSHSLRERKVFTTILQSKTRFFGTFINAYFIKNNHSTWRVAISIAKTKYKLAVQRNLIKRQIRSIFQQISNNLEPWDILVIVNKGFIELTFKEKQKLFLQLLKRIKEVDAYQTSANK

SEQ ID NO: 63631 - protein, 48 aa, Mycoplasma genitalium
MKRTYQPSKLKRAKTHGFMARMATAQGRKVLRQRRFKNRAQLTVSSER

SEQ ID NO: 63632 - protein, 437 aa, Mycoplasma genitalium
MEQFNAFKSLLKKHYEKTIGFHDKYIKDINRFVFKNNVLLILLENEFARNSLNDNSEIIHLAESLYEGIKSVNFVNEQDFFFNLAKLEENSRDTLYQNSGLSKNYTFQNFVISEGNKRAYEAGVRLAETQDNEFSPLFIYGETGLGKTHLLQAIGNEKFRNFPNARVKYVVSSDFAQEVVDAFYQRDKGIEKLKKNYENLDLVLIDDTQIFGRKEKTLEILFNIFNNLVLNKKQIVLVSDKAPDELIDIDARMISRFKSGLLLKIEKHNLSSLCEILTVKLKEKDPNIQITNEARHDAAQISGNDVRALNGIATKLLFFAKTSKQNLINTENLKEILFEEFEKFHKKSFDPYLLIENVCRRFNVPMDSVLSENRKAELVRVRDVCNYLLRQKYNMQFQQIGKIFKRSHSSVLMAVKRVAKMIENDSSLRDVITSLVI

SEQ ID NO: 63633 - protein, 269 aa, Mycoplasma genitalium
MIISFVNNKGGVLKTTMATNVAGSLVKLCPERRKVILDLDGQGNVSASFGQNPERLNNTLIDILLKVPKFSGSNNFIEIDDCLLSVYEGLDILPCNFELNFADIDISRKKYKASDIAEIVKQLAKRYEFVLLDTPPNMATLVSTAMSLSDVIVIPFEPDQYSMLGLMRIVETIDTFKEKNTNLKTILVPTKVNVRTRLHNEVIDLAKTKAKKNNVAFSKNFVSLTSKSSAAVGYEKLPISLVSSPSKKYLNEYLEITKEILNLANYNVH

SEQ ID NO: 63634 - protein, 521 aa, Mycobacterium leprae
MFVPHAKKPEIYENQRDTSLADDLSLGFTTVWNAVVSELNGESNTDDEATNDSTLVTPLTPQQRAWLNLVQPLTIIEGFALLSVPSSFVQNEIERHLRTPITDALSRRLGQQIQLGVRIAPPSTDHIDDNSSSADVLLTDDCGTDTDENYGEPLTGEYQGLPTYFTERPHHTESTVTGGTSLNRRYTFETFVIGASNRFAHAAALAIAEAPARAYNPLFIWGESGLGKTHLLHAAGNYAQRLFPGMRVKYVSTEEFTNDFINSLRDDRKVAFKRSYRDVDVLLVDDIQFIEGKEGIQEEFFHTFNTLHNANKQIVISSDRPPKQLATLEDRLRTRFEWGLITDVQPPELETRIAILRKKAQMERLAVPGDVLELIASSIERNIRELEGALIRVTAFASLNKTAIDKALAEIVLRDLIADASTMQISAATIMTATAEYFDTTIEELRGPGKTRALAQSRQIAMYLCRELTDLSLPKIGQAFGRDHTTVMYAQRKILSEMAERREVFDHVKELTTRIRQRSKR

SEQ ID NO: 63635 - protein, 399 aa, Mycobacterium leprae
MDLAKTNVGCSDLKFCLARESFASAVSWVAKYLPTRPTVPVLSGVLLTGSDSGLTISGFDYEVSAEVQVAAEIASSGSVLVSGRLLSDITRALPNKPVHFYVDGNRVALTCGSARFSLPTMAVEDYPTLPTLPDETGTLPSDVFAEAIGQVAIAAGRDYTLPMLTGIRIEISGDTVVLAATDRFRLAVRELKWSVLSSDFEASVLVPAKTLVEVAKAGTDGSGVCLSLGAGVGVGKDGLFGISGGGKRSTTRLLDAEFPKFRQLLPAEHTAVATIDVAELTEAIKLVALVADRGAQVRMEFGDGILRLSAGADDVGRAEEDLAVAFTGEPLTIAFNPNYLTDGLASVHSERVSFGFTTPSKPALLRPTSNDDVHPTHDGPFPALPTDYVYLLMPVRLPG

SEQ ID NO: 63636 - protein, 678 aa, Mycobacterium leprae
MAAQRKAQDEYGAASITILEGLEAVRKRPGMYVGSTGERGLHHLIWEVVDNSVDEAMAGYATQVDVRLFDDGSVEVADNGRGIPVAVHATGVPTVDVVMTQLHAGGKFGGKDSGYNVSGGLHGVGVSVVNALSTRVEVDIKRDGYEWSQFYDKAVPGILKQGEATEATGTTIRFWADPDIFETTKYDFGTVARRIQEVAFLNKGLTINLVDERVKQDEVVDDVVSDTAEAPVAMTVEEKSTESSAPHKVRHRTFHYPGGLVDFVKHINRTKTPIQQSIIDFDGKGAGHEVEVAMQWNGGYSESVHTFANTINTHEGGTHEEGFRSALTSVVNKYAKDKKLLKDKDPNLTGDDIREGLAAVISVKVSEPQFEGQTKTKLGNTEVKSFVQRVCNEQLIHWFEANPVDAKAVVNKAISSAQARIAARKARELVRRKSATDLGGLPGKLADCRSTDPRSSELYVVEGDSAGGSAKSGRDSMFQAILPLRGKIINVEKARIDRVLKNTEVQAIITALGTGIHDEFDISRLRYHKIVLMADADVDGQHISTLLLTLLFRFMRPLIEHGYVFLAQPPLYKLKWQRMDPEFAYSDSERDGLLETGLKLGKKINKEDGIQRYKGLGEMDAKELWETTMDPSVRVLRQVTLDDAAAADELFSILMGEDVDARRSFITRNAKDVRFLDV

SEQ ID NO: 63637 - protein, 1249 aa, Mycobacterium leprae
MTDITLPPGDGSIQRVEPVDIQQEMQRSYIDYAMSVIVGRALPEVRDGLKPVHRRVLYAMLDSGFRPDRSHAKSARSVAETMGNYHPHGDASIYDTLVRMAQPWSLRYPLVDGQGNFGSPGNDPPAAMRYCVSGNSLVRLLFGKSIRIGDIVTGAQFNSDNPIDLKVLDRHGNPVVADYLFHSGEHQTYTVRTTEGYEITGTSNHPLLCLVNVGGIPTLLWKLIGEIRSGDYVVLQRIPPVEFGPADWYSTMEALLFGAFISGGFVFQDHAGFNSLDRDYFTMVVNAYDTVVGGLRCISSRITVSGSTLLELDVYNLIEFKKTRLSGLCGQRSADKLVPDWLWHSPSTVKRAFLQALFEGEGFSSILSRNIIEISYSTLSERLAADVQQMLLEFGVVSERYCHTVNEYKVVIANRAQVEMFFTQVGFGVTKQAKLIRDVVSMSPCVGMDINCVPGLATFIRKHCDNRWVEEDSFNQHNVDCVQHWHHHSAEIVGHIADPDIRAIVTDLTDGRFYYARVASVTDTGIQPVFSLHVDTEDHSFLTNGFISHNTEARLTPLAMEMLREIDEETVDFISNYDGRVQEPMVLPSRFPNLLANGSGGIAVGMATNIPPHNLYELADAVFWCLENHDADEETMLVAVMERVKGPDFPTAGLIVGSQGIADAYKTGRGSIRIRGVVEVEEDSRGRTSLVITELPYQVNHDNFITSIAEQVRTGRLAGISNVEDQGSDRVGVRIVIEIKRDAVAKVVLNNLYKHTQLQTSFGANMLSIVDGVPRTLRLDQMICYYVEHQLDVIVRRTTYRLRKANERAHILRGLVKALDALDEVITLIRASQTVDIARVGVVELLDIDDIQAQAILDMQLRRLAALERQRIIDDLAKIEVEIADLGDILAKPERRRGIIRNELTEIAEKYGDDRRTRIIAVDGDVNDEDLIAREEVVVTITETGYAKRTKTDLYRSQKRGGKGVQGAGLKQDDIVRHFFVCSTHDWILFFTTQGRVYRAKAYELPEASRTARGQHVANLLAFQPEERIAQVIQIRSYEDAPYLVLATRAGLVKKSKLTDFDSNRSGGIVAINLRDNDELVGAVLCAADGDLLLVSANGQSIRFSATDEALRPMGRATSGVQGMRFNADDRLLSLNVVREDTYLLVATSGGYAKRTSIEEYPMQGRGGKGVLTVMYDRRRGSLVGAIVVDEDSELYAITSGGGVIRTTARQVRQAGRQTKGVRLMNLGEGDTLLAIARNAEESADGGVG

SEQ ID NO: 63638 - protein, 622 aa, Mycobacterium leprae
MTTPPHLSDRYELGDILGFGGMSEVHLARDIRLHRDVAVKVLRADLARDPSFYLRFRREAQNAAALNHPSIVAVYDTGEAETSAGPLPYIVMEYVDGATLRDIVHTDGPMPPQQAIEIVADACQALNFSHQNGIIHRDVKPANIMISATNAVKVMDFGIARAIADSTSVTQTAAVIGTAQYLSPEQARGDSVDARSDVYSLGCVLYEILTGEPPFIGDSPVSVAYQHVREDPIPPSQRHEGISVDLDAVVLKALAKNPENRYQTAAEMRADLIRVHSGQPPEAPKVLTDADRSCLLSSGAGNFGVPRTDALSRQSLDETESDGSIGRWVAVVAVLAVLTIAIVAAFNTFGGNTRDVQVPDVRGQVSADAISALQNRGFKTRTLQKPDSTIPPDHVISTEPGANASVGAGDEITINVSTGPEQREVPDVSSLNYTDAVKKLTSSGFKSFKQANSPSTPELLGKVIGTNPSANQTSAITNVITIIVGSGPETKQIPDVTGQIVEIAQKNLNVYGFTKFSQASVDSPRPTGEVIGTNPPKDATVPVDSVIELQVSKGNQFVMPDLSGMFWADAEPRLRALGWTGVLDKGPDVDAGGSQHNRVAYQNPPAGAGVNRDGIITLKFGQ

SEQ ID NO: 63639 - protein, 972 aa, Mycobacterium leprae
MTELPTTVPGYNSAVAQTDSDAMRYRYTAELAGRIESTWQDNWARLQTFNVPNPVGSLAPPDGSVVPADKLFVQDMFPYPSGDGLHVGHPLGYIATDVYARYFRMTGHNVLHAMGFDAFGLPAEQYAMQTGTHPRILTEANVVNFRHQLGRLGLGHDSRRTFSTTDVEFYKWTQWIFLQIYNAWFDVAANKARPIAELIAEFDSGERRLVDGRDWATLSAGERADVIDNCRLVYRADSMVNWCPGLGTVLANEEVTADGRSDRGNFPVFRKRLRQWMMRITAYADRLLDDLDLLDWPEQVKTMQRNWIGRSSGATVLFSAILSRSDAATTEVDVEVFTTRPDTMFGVTYLVLAPEHNLVDELVATVWPDRTDPRWTYGAATPGAAVAAYRRAIVAKSDLDRQESKEKTGVFLGRYATNPATGKPVPIFVADYVLVGYGTGAVMAVPGHDPRDWDFAHKFHLPIVEVIAGSDISEAAYVGDGVLVNSGYLDGMDVATAQEAITARLESEGRGHARIEFKLRDWLFARQRYWGEPFPIIYDSDGRPHALDEAALPVELPDVPYYSPVLFDPDDADSEPSPPLAKATEWVHVELDLGDGLKPYSRDTNVMPQWAGSSWYELRYTDPHNSERLCAKENEAYWMGPRPTEHGIDDPGGVDLYVGGAEHAVLHLLYARFWHKVLYDLGHVSSREPYRRLINQGYIQAFAYTDAHGSYVPANQVFQRGDGFFCPGPDGEIEVFQEFGKIGKSLKNSVSPDEICDEYGADTLRVYEMSMGPLEASRPWATKDVVGAYRFLQRVWRLVVDERTGETRVVDTAGELDTYTLRTLHRTIAGVSQDYAALRNNTATAKLIEYTNHLTKEHRGSVPRVAVEPLVLMLAPLAPHLAEELWLRLGHTTSLANGPFPQADPAYLVDDTVEYPVQVNGKIRGRIVVAADADYDTLKTVALADDKVQQFLAGATPRKVIVVAGRLISLVI

SEQ ID NO: 63640 - protein, 586 aa, Mycobacterium leprae
MAADYDKLFRLDDGAYASPDQAAEQLFDDAPLYPPPIIPTCTTTPNGEVASPMPDWSEQLPPNPPAASKSPLPPMPIGSSVQPPPASSESPRAPMPVSAPPRSPAASLMPISEPPQWPPAEAPEHQFAKAEPPSVPIPINEPSPAKPATPMPMTPIDGSQRTPVTSPEPSLAEFEAQPPATPKPSLLPRPMSSPPEAPRPSANQHSRHARRGHHHRDETQQANPASATEPMIAPRARTAELRQAPHAAAEPAPTQHLTRPDGLVSHRTALHDSTATSAIGVQTGRSTGAKKPSKVVAKRGWRHWVHTVTRINLGLSPDERYELDLRTRVRRPPRGSYQIGILGLKGGAGKTTVTVTLGSMFARVRNDRILVVDADTSCGNLADRAGRFSEANIADLLADKDVKSYNDIRTHTSVNAVNLEVLPAAEYSTAQHALSGEDWNFAAATVSKYYNVMLADCGVGLFDPVTRGVLSTASGVVIVTSTSVDAARQAAIALDWLRHNGYQDLLSRACVVINHVMPKEPNIASKDLVQQFEQQIQPGRVVVLPWDKHIAAGTEIRLDRLDPLYRRRILELAAALSDDFERAGRH

SEQ ID NO: 63641 - protein, 1527 aa, Mycobacterium leprae
MTAKRVGLYNPAFEHDSCGVAMVVDMYGRRTRDIVDKAITALLNLEHRGAQGAEPRSGDGAGILIQVPDAFLRAVVDFELPAASSYATGIAFLPQSSKDAAAACAAVEKIAVAEGLHVLGWRNVPTDASSLGALSRDAMPTFRQVFMAGATGLTLERRAYVIRKRAEHELGTKGPGQDGPGRETIYFPSLSSQTFVYKGMLTTPQLKAFYRDLQDERLTSALGIVHSRFSTNTFPSWPLAHPFRRIAHNGEINTVTGNENWMRAREALMKTDIFGSKADMEKLFPICTPGASDTARFDEALELLHLGGRSLVHAVLMMIPEAWERHESMDPARRAFYQYHASLMEPWDGPASMTFTDGVVVGAVLDRNGLRPSRIWITDAGLVVMASEAGVLDLDPSIVVRRMRLQPGRMFLVDTAQGRIVSDEEIKAKLAAEHPYQEWLDKGLVPIDELPAGKYVRMPHHRLVMRQLAFGYTYEELNLLVAPMVRAGSEPIGSMGADTPIAVLSRRPRMLYDYFHQLFAQVTNPPLDAIREEVVTSLQGTTGGEYDLLSPDENSCHQIWLPQPILRNYELAKLVNLDPADEVNGRPHGMRSTVVSCLYPVADAGAGLAAALTEVRAQASAAIVGGARVIILSDRNSDEQMAPIPSLLSVAAVHHHLVRDRTRTHVGLVVESGDAREVHHMAALIGFGAAAVNPYLVFESIEEMLDRGVIDGIDRKTALNNYIKATGQGVLKIMSKMGISTLASYVGAQLFQAVGISEDVLDEYFSGLSCPTGGITLDDIAAEVAVRHRVAYLDRPDERAHRELEVGGEYQWRREGEYHLFNPETVFKLQHATRSGQYKIFKEYTRLVDDQSERMASLRGLLKFRSGVRTPVPLDEVEPASEIVKRFSTGAMSYGSISAEAHETLAIAMNRLGGRSNSGEGGEDVNRFEPDPNGDWRRSAIKQVASARFGVTSHYLTNCTDIQIKMAQGAKPGEGGQLPGRKVYPWIAQVRNSTPGVGLISPPPHHDIYSIEDLAQLIHDLKNANPSARVHVKLVSENGVGTVAAGVSKAHADVVLVSGHDGGTGATPLTSMKHSGAPWELGLAETQQTLLLNGLRDRIVVQVDGQLKTGRDVMIAALLGAEEFGFATAPLVVAGCIMMRVCHLDTCPVGVATQNPLLRKRFNGKPEFVENFFMFIAEEVREYMAQLGFRTFNEAVGQVGALDTTPVREHWKAHSIDLTPVLHEPESAFMNQDLYCSSRQDHGLDKVLDQQLIAVSRDALDFGKPVRFSTTIGNVNRTVGTMLGHELTKAYGAQGLPDGTIDITFEGSAGNSFGAFVPKGITLRVYGDANDYVGKGLSGGRIVVRPSDSVPLNYVAEDNIIGGNVILFGATSGEVYLRGVVGERFAVRNSGAHAVVEGVGDHGCEYMTGGKVVILGRTGRNFAAGMSGGEAYVYDSDGELPANLNFEMVELEPLDFDDAAWLYATIQAHVDATDSAVGQRILAGWSEQQRYFVKVMPKDYKRVLQAIALAERNGVDVNKVIMEPAHG

SEQ ID NO: 63642 - protein, 488 aa, Mycobacterium leprae
MADPAGFLKYTQRELPRRRPVPLRLRDWKELYEEFDKETLRNQASRCMDCGIPFCHNGCPLGNLIPEWNDLVRRGRWHDAVERLHATNNFPDVTGRLCPAPCESACVLGINQDPVTIKQIELEIIDKAFDEGWVQPLPPQQLTGKTVAVVGSGPAGLAAAQQLTRAGHRVTVFERDDRIGGLLRYGIPEFKMEKRFLERRLDQLRAEGTEFRSGVNVGVDITADQLCADFDAVVLAGGAATWRELPIPGRELDGVHQAMEFLPWVNRVQEGDDVLGDDGQPPITAKDKKVVIIGGGDTGADCLGAVHRQGAIHVHQLEIMPRPPDARAASTPWPTYPLMYRVSPAHEEGGERVFSVNTEEFVGKNGRVHALKAHEVTMQDGRFVKVENSVFELEADLVLLAMGFVGPEKPGLLTDLGVKFTDRGNVARGADFDTSVPGVFVAGDMGRGQSLIVWAIAEGRAAAAAVDRFLMGATALPAPVKPSSLPLQ

SEQ ID NO: 63643 - protein, 271 aa, Mycobacterium leprae
MMLADEVFAGHPFVVAHRGASAVLPEHTLAAYELALKEGADGVECDVRLTRDGHMVCVHDRRLDRTSTGVGLVSTMTLAQLRALEYGAWHNSWRPDGTHGDTGLLTLDALVSLVLDWHRPVKIFVETKHPVRYGALVESKLLALLHRFGIAAPASADRSRAVVMSFSAAAVWRVRRAAPLLPTVLLGRAGRYLTSSAATAVGATAVGPSLPALKEYPKLVDRAGAQGRAVYCWNVDDYDDIDFCRDIGVAWIATRHPGRTKAWLQNNGRTE

SEQ ID NO: 63644 - protein, 417 aa, Mycobacterium leprae
MIDLQLLREDPDVVRRSQLSRGEDPALVDALLTADTARRAAISAADSLRAEQKATSKSLGAASAEDRPALLERAKDLAEQVKAAETTQAETAAAFAAAYMAISNVVLDGVPTGGKDDYAVLDIVGDPPPLSNPKDHLELGEALGLIDMQRGAKVSGSRFYFLTGRGALLQLGLLQLALRLAVENDFIPMIPPVLVRPEVMSGTGFLGAHAEEVYRVDDLYLVGTSEVPMAGYHSDEILDLSVGPLRYAGWSSCFRREAGSHGKDTRGIIRVHQFDKVEGFVYCAPTDAEVEHQRLLGWQREMLARIEVPYRVIDVAAGDLGSSAARKFDCEAWVPTQGSYCELTSTSNCTTFQARRLATRYRDASGKPQIVATLNGTLGTTRWLVAILENHQRPDGSVRVPPALVPFVGTELLESPR

SEQ ID NO: 63645 - protein, 257 aa, Mycobacterium leprae
MAVEPLYGTVIQFARLLWLIQGLKVSVRGIENLPASGGAVIAINHTSYLDFTFAGLPAYQQGLGRKVRFMAKQEVFDGKITGPIMRRLRHIPVDRQEGAASYEAAVRNLKDGELVGVYPEATISRSFEIKECKGGAARMSAEARVPIIPHIVWGSQRIWTKDCPKKLLRPKVPILVLVGEPIEPTLGVAQLKALLHFRMQHLLERAQELYGPHPAGEFWVPHRLGGGAPSLIKAARLDAEEATERAARRAQRAKVAE

SEQ ID NO: 63646 - protein, 281 aa, Mycobacterium leprae
MTDTTRPAPTPTQPTLIACDVDGTLLDENETVTARTRAAVRSAVAGGAYFVLATGRPPRWVRPVVDALGFPPMAVCANGAVIYDPATDRVVSARTLAVDILGELVEIATRVIPGAGLAVERVGDRAHDSATPQFVSSVGYEHAWLHPDNTEVSIEDLLSVPAIKLLIRKSGARSADMAAELAKHVGIAGDITYSTNNGLVEILPLGISKATGVEEVGRPLGIADGNAAAFGDMPNDVPMLLRAGHGVAMGNAHPAVLAAADEITAPNTDDGVARVLERWWS

SEQ ID NO: 63647 - protein, 413 aa, Mycobacterium leprae
MTVSFDLFVVGSGFFGLTIAERVATQLGKRVLIVEKRPHIGGNAYSEAEPQTGIEVHKYGAHLFHTSSKRVWDYVRQFTEFTDYRHRVFAVHNGQVYQFPMGLGLVSQFFGRYFTPDEARQLIAEQASEIDTADAKTLEEKAISLIGRPLYEAFVKGYTAKQWQTDPAELPAAVISRLPVRYTFDNRYFSDIYEGLPVDGYTAWCTKMADDDRIEVRFGTDWFDVADQLRADSLGAPVVYTGPLDRYFDYAAGRLGWRTLDFEVEVLPIGDFQGTPVMNYSDLDVPFTRIHEFRHFHRERHYPIDKTVIMREYSRFAGYDDEPYYPINTEADRAMLAAYRAKAKSETASSKVLFGGRLGTYQYLDMHMAIAAALNMYDNILAPHLRDGSPLMEEPAVAAAQHAAPAIGREGGA

SEQ ID NO: 63648 - protein, 192 aa, Mycobacterium leprae
MPEDKAPTGELAAIAAVQSVLVDRPGVLPTARGMSHFGEHSIGWLAISLLGAILVPCRRRYWLVAGAGVFAAHVAAVLIKRMVRRIRPNHPAVTVNVGTPSPLSFPSAHATSTAAAAILIGRASRLPKGIVAAVLVAPMALSRIVLGVHYPSDVAFGVVLGAAVAGTTARFDSRLSRRWTVQHGLSSGSAVK

SEQ ID NO: 63649 - protein, 517 aa, Mycobacterium leprae
MIMKSTAEKLAELRVRLELANEPGGEKAAAKRDKKNIPSARARIYALVDPGTFLEIGALTRTPGDPNALYGDGVVTGHGLINGRQVGVFSHDQTVFGGTVGEMFGRKVARLMEWCAMAGCPIVGINDSGGARIQDAVTSLAWYAELGRRHELLSGIVPQISIVLGKCAGGAVYSPIQTDLVVAVRGQGYMFVTGPDVIKDVTGEEVSLDELGGVDSQAKYGNIHQVVESEAAAFGYVRDFLSFLPPNCFDKAPIVNPGLEPEIMAHDLELDSIVPDSDNTAYDMREVLLRIFDDGHFLDVAAQAGQAIITGYARVDGRTVGVVANQPMHLSGAIDNEASDKAARFIRFCDAFNIPLVFVVDTPGFLPGVEQEKNGIIKRGGRFLYAVVEADVPKVTITIRKSYGGAYAVMGSKQLAADLNFAWPTARIAVIGADGAAQLLMKRFPDPSSPDVQAIRKTFVDNYNLNMAIPWIAAERGFIDAVVEPHQTRLLLRKSLHLLRDKQQWWRVGRKHGLIPL

SEQ ID NO: 63650 - protein, 272 aa, Mycobacterium leprae
MVEGPHIETNNAWVEFPIFDAKARSLKKAVLGKAGGTIGRNNSNVVVIEALRDITMSLSVGDRVGLVGHNGAGKSTLLRLLSGIYEPTRGWAKVTGRVAPVFDLGIGMDPEISGYENIIIRGLFLGQTRKQMLGKVDEIAEFTELGDYLSMPLRTYSTGMRVRLAMGVVTSIDPEILLLDEGIGSVDTDFLKKAQSRLQSLVERSGILVFASHSNEFLARLCKTAMWIDHGVIELSGGIEDVVRAYEGEDAARHVREVIAETASAQNASGDE

SEQ ID NO: 63651 - protein, 336 aa, Mycobacterium leprae
MHAIVAESANQMVWREVPDVTAGPGEVLIEVAASGVNRADVLQVAGKYPHPPGASAIIGMEVAGVVAAVSSGVTEWSVGQEVCALLAGGGYAEYVAVPASQVMPIPKGVNVVDSAGIPEVACTVWSNLVMAAHLSAGQLLLLHGGTSGIGSHGIQVARALGAKVAVTAGSEEKLEFCRALGAQITINYRDEDFVARLQQQNGGADVILDIMGAAYLDRNIDALAIDGQLIVIGLQGGVKGELNLGKVLSKRARIIGSTLRARPVNGPNSKSEIVAAVTASIWPMIADGSVRPIIGARMAVQQAADAHQLLLSGKVSGKIVLTVAGSGTETLLSRHH

SEQ ID NO: 63652 - protein, 680 aa, Mycobacterium leprae
MLRRVISLVVSAKSHVLYPAIVGPHQISRRGAGPSMKRRLGFEDTVAKRSYLLAVKSRRIIMKANVSFHARGEVATQPAQGPPEQTGQLVNGTATRFAMGESMLTDLLQKAASQFPNRAAYKFIDYDVDPAGFTETLTWWQVYRRSMSVAYELRIYASDGDRVAILAPQGLEYIVAFMGALQAGLIAVPLPAPQFGIHDERISAALRDSLPSVIITTSAAIVEVTKYAPHARSAQGSAPVVVAVDVLDLDSPRELDPSRYERLNTAYLQYTSGSTRAPAGVIVSHKNVITNCVQLMSDYLGDIEKVPSTAVSWLPFYHDMGLILGVILPMVNQDTAVLLSPMAFLQRPARWMQLLGKYRGQISCAPNFGFELAVRRTSDDDMAGLDLGHVRAIATGAERVNAATLQRFTERFARFNLDETAIRPSYGLAEATVYVATAGPGRPPKSICFDYQHLSAGKAKRSANGAGDGVNLVSYGAPRASVLRIVDPDTRIETSEGTVGEIWVQGDNVARGYWRNPENTERTFGGQLVNPSPGTPDGPWLRTEDLGVIFEGELFITGRIKDLLVVDGSNHYPDDIEATIQEITGGRVVAIAVPDDCTEQLVTIIELTKWGYADCDAMEKLCTVKREVTSAVSKSHRVRVADVVIVAPGSIPVTTSGKVRRAACVERYLNHEFNRLDATA

SEQ ID NO: 63653 - protein, 2103 aa, Mycobacterium leprae
MTASVEGADQKSEKLISYLKKVVVELDETRARLREYEQRATEPVAVVGIGCRFPGGVDSPDRLWDVVSECRDVVSEFPTDRGWDVDGLFDPDPDAEGKTYTRWGAFLDDAAGFDAGFFGIAPSEVLAMDPQQRLMLEVSWEALEYAGIDPLSLRGSATGVFTGIFAPSYGSRDTGGLQGYGLTGTAVSVASGRVSYVLGLEGPAVSVDTACSSSLVAIHWAMSSLRSGECDLALAGGVTVMGLPSIFVGFSRQRGLAADGRCKAFARAADGTGWGEGAGVVVLERLSDAQRLGHTVLAVVRGSAVNQDGASNGLTAPNGLAQQRVIQAALTNAGLSSADVDVVEAHGTATTLGDPIEAQALLATYGQGRPADQPLWVGSIKSNMGHTQAAAGVAGVIKMVQAMRHHVMPATLHVDEPSPRVDWTTGAVSVLTEARDWSVEGRPRRAGVSSFGISGTNAHVILEEAPTPVEASYSTADQQRLSVVPWVVSGRSTAALMAQASRLAFYVQADPEVDPVDVGCALAARSVFEHRAVVVGESREQLIAGLAGLAVGESGAGVAIGQAAPLGKTVVVFPGQGAQRIGMGRELCSQLPVFAEEFDAVTGELDRHMRLPLRDVVWGADAGLLDSTEFAQPALFAVEVALFAVLQHWGLQPDFVMGHSIGELAAAYVAGVLAPADAAMLVVARGRLMQSMPAGGTMWAVAASEDEVVSLLGEGVGIAAINAPESVVISGPQAAVSAIADKFAAQGRRVHQLAVSHAFHSPLMEPMLEEFVRVAAQVEVRKPQIGLVSNVTGELAGPDFGSPQYWGEHVSRAVRFVDSARHLQTLGATHFIESGPSSGLMGAIEQSLAPAEAVVVSMMGKDRPELASVLGAAGQLFATGMPVEWPAVFAGSSRRRVTLPTYAFQRRRFWETPGTDGTASVSGLGLGSTEHALLGAVVERPDSGGVVLTGRLSLANQPWLADHVIGGVVLFPGAGFVELVIRAGDEVGCAGVEELVLAAPLVLHPGSGVQVQVVVAAADESSRRAVSVYSRGDQSHGGWLLNAEGLLEVDAAEATVDLSLWPPEGAESVDISDAYPQLAERGYAYGPAFQGLVAIWRRGSELFAEVVAPTGVVVDGMGMHPALLDAVLHALGLAIENTQATTEMRLPFCWRGVSLHAGGAGRVRARFTSAGADAIAVDIADSAGLPVLTVRSLVTRAMTAEQLRTAVTAAGGALEQGPMDLVWSPIPLSSDGHGGGLPSVVSWADYCAGRGNDTGVVVWEFGSASAGAQAPVDSVAAVYSATHAALQVLQFWFGQDRAGTLVVLTRGAVGLVGEGISDLAAAAVWGMVRSAQSEHSGKIVLIDTDSAVDVAVLADLGESQLLVRCNTVHAARLSPAPQLLALPVGESMWRLAADGGGTLEDLVIQPCPEVQAPLQAGHMRVAVAAVGVNFRDVVAALGMYPGQAPPLGAEGAGVVIEIGPEVTGVAVGDAVMGFLGGAGPLAVVHQQLITQMPQGWSLAEAAAVPVVFLTALFGLADLAGIRAGESVLIHAGTGGVGMAAVQFARHWGVEIFVTASRGKWDTLRDMGFDDDHIGDSRTLEFEEKFLAVTDGRGVDVVLDSLAGDFVDASLRLLVRGGRFLEMGKTDIRDAQEIAANYPGVQYRAFDLSEAGPVRMQEMLCEVRELFDTQVLHRLPVTSWDVRCAPAAFRFMSQARHIGKVVLTMPSALADGLAEGTVLITGASGAIGGVLARHMVSAYGVRHLVLASRRGDRAEGAVELAAELVGAGAKIQVVACDVADNDAVRGLFAQLSREFPPVRGVIHAAGVLDDGAITSLTPDRVDTVLRAKVDAAWNLHEATRDLDLLMFVLCSSIAATVGSPGQGNYSAANAFLDGLAAYRQAAGLAGTSLAWGLWEQPGGMNAHLSSRDLARISRSGLAPMNPAQALELFDAALVIDHPFMVTALLDRAALDAQAQAGALPPLFSRLVRRSRRRQIEDPGDATQSKLALVQRLQGLAANRQLELLVGVVCLQAAAVLGRPSPEDIDPNTKFQDLGFDSLTAVELRNRLKSATGLTLPPTVIFDHPTPTAVAEYVAQQMLKSRPAESGDETSQAVEPKVEEVSVHA

SEQ ID NO: 63654 - protein, 233 aa, Mycobacterium leprae
MNDRKWVTSSVMLVTLSACLALGLSGCSSTKPDAQEQSSSSSPASSDPALTAEIKQSLETTKALSSVHVVVQTTGKVDALLGISNADVDVQANPLAVKGTCTYNDQPGVPFRVLGDNISVKLFDDWSNLGSISDLSTSHVLDPNTGITQVLSGVINLQAQGTEVVDRIPTNKITGTVPTSSVKMLDPKAKGSKLATVWIAQDGSHHLVRASIDLGSGSIQLTQSKWNEPVNTN

SEQ ID NO: 63655 - protein, 902 aa, Mycobacterium leprae
MSTDDSHRSLRLANLLVITAWITAVVIANLIFTLTQAKLRDKNSVLLPQDTMTVTTTNQIAQAFPGTGTNAIAYLVVEGNRTLEPEDQPYYDSAVNALRADTHDVGSVLDWWSDPLTAPLGTSPDSRSAIALIWLQGEAGTTRARASLGAIRSVVRQLPPSEELRARIVVPATTNNMPMEMTAWQGMAIVTAAAVIAILFLLRARQAIRIVVIMLLTADFSLAAAWPLAAVVQRQTGGTVSVFSWNLAAVLTIGTITASTLLASRSYTGDSAAPTCRAHLPALALLGACVALLTGTLLLARTPALHSVGTVALGVVVALAASLTLLPTLIKLAGPSGQISPQVNGNTWTRRLLVPNFSSPARLTAVVLATCALPVIGMRLGLAEDHTAQSGTQILPGNLLPDILLIKSARDLRDPAALIAIDQVSHRLMEIPGVRKVESAAWPAGVPWNDASLSSAAGRLADQMSQQAGSFVPAVTAIKQMKTMIDQMSSTVDELESTVNVALAGAHQVQQYLNPVLSAARNIKSKTAEFSGYLDTVRGWVVSVTNCPNDVLCSAMRKVIEPYDKVAASMDQLSNGVDRISAISDQTISSFNEAPHMVAQMRSALKQARSFIPRLESTIQELMPQIAQASAMLKNLSRDFADTGEGGFHLPMKELMSSSYQHVRESMFSSDGTATRLVVYTNEHNPGLDTAARAQQLEIAAGKAMKYGSLVDSRITLGGAAQVAVAARAALTHDAVLLAGMLFAVVALASMWVSAGSGVAVGLGVLAAYLGGLGISVALWQHILGHELQASVPLVSFAILAPCGVLYLVTSLEAARVSAEAKTAATVSVRRAVVPLTVLGAIFGAGLVVAEASFSALSQVGTVLVIALGALTKVEQVLISYHAEAAMPAWSKLPSRLSGGPN

SEQ ID NO: 63656 - protein, 554 aa, Mycobacterium leprae
MTSMQAIPDITATPAWDALRRHHDEIGATHLRQFFADNPNRGRELVITVGDLYIDYSKHRITHDTVQLLVDLARAANLEQRRDQMLAGVHVNTSENRSVLHTALRLPRDTELIVDGQNVVQDVHAVLDVMGDFTDRLRSGEWTGATGKRINTVVNIGIGGSDLGPVMVYQALRHYADAGISARFVSNIDPADLTAKLSDLEPGTTLFIVASKTFSTLETLTNATAARRWLTDALGEAAVSKHFVAVSTNKRLVKDFGINTANMFGFWEWVGGRYSVDSAIGLSLMAVVGRESFADFLSGFHIVDQHFQNAPLESNAPVLLGLIGLWYSDFLGAQSRAVLPYSNDLARFAAYLQQLTMESNGKSTRADGTPVTTNTGEIYWGETGTNGQHAFYQLLHQGTRLVPADFIGFSQPIDDLPTVDGIGSMHDLLMSNFFAQTQVLAFGKTAEEIAAEGTPAEVVPHKVMPGNRPTTSILANRLTPSVLGQLIALYEHQVFTEGVIWGIDSFDQWGVELGKKQAEALLPVITGNASPAQQLDSSTDTLVRRYRTERGRTS

SEQ ID NO: 63657 - protein, 778 aa, Mycobacterium leprae
MSVHTTDAKPDSEVDRLLDGLNPQQRQAVVHEGSPLLIVAGAGSGKTTVLARRIAYLIAARSVGVSQILAITFTNKAAAEMRERVARLVGDHTGPSMWVSTFHSTCVRILRNQASLIGGLNSNFSIYDVDDSRSLLQMIGQDMGLDIKRYSPRLMANAISNLKNELIDAESAVANLSSDTDDLARTVATVYGEYQRRLRTANALDFDDLIGETVGILQAFPQIAEHYRRRFRHVLVDEYQDTNHAQYVLVRELVGHGARNSPDDMPPGELCVVGDADQSIYAFRGSTISNIEDFERDYPDTTTILLEQNYRSTQNILSAANSVIARNFGRRDKRLWTDAGKGELIVGYVSDNEHDEAKFIADEIDALVGGGEITYDDVAVLYRANNLSRSLEEVFIPTGIPYKVVGGFCFYESKEIRDLIAYLRVLDNPGDAVSMRRILNTPRRGIGDRAEACVSVYAENTGTSFADALQAVAEGKVPMLNTRSVKAIAGFVALLDDLRCRVDDDLGELVESVLERSGYLRELESSTDPQELARLDNLNELVSFAHEFSTEQANAAALAKSLHTPEDEDVPDTGALAAFLEKVSLMSDTDQIPENNSGVVTLMTLHAAKGLEFPVVFVTGWEDGMLPHMRTLGDPTELSEERRLAYVGITRARQRLYLSRAITRSSWGQPILNPESRFLREIPPELIDWRRSILTDSYSTPASGASRFGRVRPSSIRSGASKRALLVLAPGDRVTHDKYGLGRVEEVSGVGESAISLIDFGSSGRIKLMHNHAPVTKL

SEQ ID NO: 63658 - protein, 333 aa, Mycobacterium leprae
MAAEAVRSFRNRWLNHQRNDVTEIIPVDGFDDFDDLYDLDFAEIDELQFSDDDYNFCNETQVLLASEIDDLQDIDSLASEPLAASANVAPNFTSAPRRPCQHRKQPTSATRGRLLISAMAAGAMATAAHTVISHDDIPKTETVLTANASALSGATVSDATQGVQVITVHPAASTAVHNEEHAKGTAFAHERAQREARLSQPLYVMPTKGIFTSNFGYRWGVLHAGIDLANAIGTPILAVSDGVVIDVGPTAGYGMWVKLRHADGTVTLYGHVNTTLVNVGQYVVAGDQIATMGTRGNSTGPHLHFEVLLSGSERIDPVPWLAKRGIYVGNYTG

SEQ ID NO: 63659 - protein, 300 aa, Mycobacterium leprae
MAIFLTKDNTVIVQGITGSEAAVHTARMLKAGTQIVGGVNARKAGTNVTHEDKHGRIITLPVFGTVAEAIENTGADVSIIFVPPRFAKEAIIEAVEAEIPLLVIITEGIPVQDSVYAWAYNLNKGTKTRIIGPNCPGIITPGQSLVGITPATITGAGPIGLVSKSGTLTYQMMFELSDFGFSTAIGIGGDPVIGTTHIDAIEAFEQDPDTKIIVMIGEIGGDAEERAADYIKANVSKPVVGYVAGFTAPEGKTMGHAGAIVSGSSGTAAVKKDALEAAGVKVGKTPSETAVLVREILCTL

SEQ ID NO: 63660 - protein, 181 aa, Mycobacterium leprae
MLVDKQLSELGYTVAPMEKGVELVVGRALIVVVDDRTAHGDEDHSGPLVTELLTEAGFVVDGVVAVAADEVEIRNALNTAVIGGVDLVVSVGGTGVTPRDVAPEATREILDREILGIAEAIRASGLSAGITDAGLSRGLAGVSGSTLVVNLAGSRYAVRDGMATLNPLATQIIGQLSSLEI

SEQ ID NO: 63661 - protein, 197 aa, Mycobacterium leprae
MVTASKATLRKQLLAARRSVADDIRAAETKMLSQHLELLVNSASTVCAYVPVGTEPGAIEMLDVLLRKTGRVLLPVARTGDDEIPLPLQWGEYRPGGLTSGPWGLLEPPELRLPESALAEANLVLVPALAVDHHGVRLGRGGGFYDRSLAGRDPHTLLIALVRDTELLNELPSEPHDVRMTHAVTPERGVIALPNSE

SEQ ID NO: 63662 - protein, 306 aa, Mycobacterium leprae
MSLLLSAQVPIPFTAIVPAAGLGTRFLPATKTVPKELLPVVDTPGIELVAAEAAAAGAERLVIVTSEGKDGVVAHFVQDLVLEGTLLARGNKAMLAKVRRAPELIKVESVVQAEPLGLGHAIGCAEPTLAPDEDAVSVLLPDDLVLPTGVLETMSKVRASRGGTVLCAIEVASEEISSYGVFDVEPVPGGDNPNVLKVIGMVEKPKAEDAPSTFAAAGRYVLDRAIFDALRRVSRGTGGEVQITDAIALLIKEGHPVHVVVHRGSRHDLGNPGGYLKAAVDFALDRDDYGPDLRRWLVERLGLIEQ

SEQ ID NO: 63663 - protein, 424 aa, Mycobacterium leprae
MRSVEEQQARILAAAVVPRPVRVAIAEAQGLMCAEEVMTERPLPGFDQAAIDGYAVRSVDVSGIGESDGGESGSSDEDGRYVLTLPVMGTIEAGARTPSRLLPHQAVRVQTGAPLPVLADAVLPVRWTDGGMSRVRILRGAPSGAYVRRVGDDVQPGDVAVRAGTIIGAAQVGLLAAVGRERVLVHPRPRLSIMAVGGELVDISRTPGNGQVYDVNSYALTAAGRDAGAEVNRIGIVSNNLKEFGEVVEGQISRAEVVVIAGGVGGAAAEAVRAVLSEIGEMEVVRVAMHPGSVQGFGQLGREGVPTFLLPANPVSALVVFEVMVRPLIRLSLGKRQPMRRIVQARTLSPITSVAGRKGYLRGQLMRDQDTGEYLVQALGGALGASSHLLATLAEANCLVVIPSGAEQIRTGEVVDVAFLAQRG

SEQ ID NO: 63664 - protein, 281 aa, Mycobacterium leprae
MTYGRLLLGATPLGQPLDASRRLTDALCCADVVAAEDTRRARTLAKTLGVVITGRVISLFDQIEAVRVSALVAEIEAGATVLVISDAGMSVISDPGYRLVAACIAAGLPVRCLPGPSAVMTALAVSGLSSEKFCFEGFAPRKSSARRTWLASLADERRTCVFFESPRRLAACLRDAVDQLGSARPVVVCRELTKVHEEVVRGSLDELATWAANGVLGEITVVLAGATPRADLFLLVPEVENLVAGGARVKDACGQVAAVHSSVRSRQLYDAVLRARQVSSR

SEQ ID NO: 63665 - protein, 947 aa, Mycobacterium leprae
MKGPRGSRSGRNGSPRRLVIVESPTKARKLSGYLGSAYIVESSRGHIRDLPRTAADVPAKFKSEPWARLGVNVDADFEPLYIITPEKKSTVTELKGLLQGVDELYLATDGDREGEAIAWHLMQTLKPRVPVKRMVFHEITEHAILAAAAHPRELDIDLVDAQETRRILDRLYGYEVSPVLWKKVAPKLSAGRVQSVATRIIVQRERDRMAFCSAVYWDIVAKLDASVSDPTAQPLTFVARLTAVDGLRVATGRDFGAMGTLRGDCEVSKIIVLDDLTATTLAAGLRGAQLTVASAEEKLYTRRPYPPFMTSTLQQEAGRKLRFSAERTMSIAQRLYENGYITYMRTDSTTLSESAINAARTQARQLYGEEYVSDSPRQYTRKVKNAQEAHEAIRPAGETFATPDAVCNELDGDEFRIYELVWRRTVASQMADARGTTLSLRIEGRAGEQHVVFSASGRTLTFPGFLKAYVETVDELAGGEADDAERRLPHLTSGQLLDVIDLTPDGHATNPPARYTEASLVKALEELGIGRPSTYSSIIKTVQDRGYVQKKGSALVPSWVAFAVTGLLEQHFGRLVDYDFTAAMEDELDEIANGNEQRTNWLNNFYFGGNHGVSDSIARSGGLKKLVGVNIEGIDAREVNSIKLFDDEHGRPVYVRVGKTGPYLERLLAGDDGELTPQRANLNGTLTPDELTLEVAEELFATPHEGRVLGVDPETGHEIVAKDGRYGPYVTEVLPKHDDDYGAADQGTKKTKKGRRASASQGPKPRTGSLLRSMDLQTITLEDALKLLLLPRVVGVDPASGEEITAQNGRYGPYLKRGKDSRPLTTEDQMFIITLDEALKIYAEPKRAGRQSTSPPPLRELGTDPTSGKPMLIKDGRFGPYVTDGETNASLRKGDDVVSITDERAAELLADRRARGPVKRPAKKARKVPAKKAARLAPARGISQSPR

SEQ ID NO: 63666 - protein, 569 aa, Mycobacterium leprae
MLAFRGYFYWDDLILIGKTGTQGLLSASYLFDDHDGHLMPAAFLVAGALIRLAPLVWTGPAISLVFLQLLVSLTLLRALYVILGWRRVLLIPLTFGLFTPLAVPGFAWWAAALNSLPMLAALGWVCADAILLVCTGNHRYAATGVMVYCGGLLFFEKAAVIPFVAFAVAALLRHVRGDHAALRTVWRDGLRLWITSLTLTVIWVTLYLAVINQQRWSFDLSMTGQLLLRSITHGIVPGLAGGPWHWDRWAPASPWAAPPPLVMALGWLLLIGVLALSLVHKQRIRLVWLTAAGYTVTCQLPIYLMRSSQQTALELAQTLRYLPDLVIVLALLTAIAFHAPNRAFAARWLDTSPTRTGVTTGIAGLFLASSLYSTVTFLTSWRDNPTQLYLQNVRADLAAMHAASSAPLLDSEVDQLVLQRVAWPENLASHMFALLRDRPEFASATSHLMMLNSSGSLIEARVTWIRTIVAGLTPHCGYFVRPDRPTRMMLDGPLLPADWTVELNYLANRDGLMTLSLTQGPSVKVPVHPGLNRVYARLPGAGDAITVLANTTTLSLCIASGPVGFLAPA

SEQ ID NO: 63667 - protein, 356 aa, Mycobacterium leprae
MAAFRGFGISLLTTAIALLVAYIYGGLASLLPLIVLAIFEVSLSFDNAIINAAILKQMSRFWRKMFLTIGILIAAFGMRLIFPAVIVWATAKLDPVRTMDLALHPPPNHALEFPDGSPSYQKLIMSAHPQIAAFGGTFLLMLFLDFVFQDRDIKWLKWIEAPFTRIGRLGPLSVVAIFVLVLIATALTHSGDERAKVLIAGLLSLVTYLLVSVLNRAFRPPDIDTASGRRMAGRAGLVRFLYLEILDATFSFDGVTGAFAITSDPVIIALGLGLISSVFIRSITIYLVHQDALDRYVYLEYGAHWAIGALSVMMLLSVEPRFEILEAVTALVGVLFIGAALTWSVFRNHREVKACT

SEQ ID NO: 63668 - protein, 461 aa, Mycobacterium leprae
MNPIRWQKSYVVVGLAMLAFIIAAVKAATVFTTGGHSTNGARSAVPPPRASTVKPALVPVTETAVVPSVGGLAAALASALADPSLGSFGGRITDAMTAKELWQQQDDMPLVPASANKLLTAAAALLTLDRQTRISTRVVAAGPNAQGPVVLVGAGDPTLSAASPDQSTWYRGAPRISDLVEQVRRSGVTPTAVQVDTSLFTGPTMAQGWDPADVDNGYTAPIESAMIDAGRIQPTTVKSRRSRTPALDAGRELAKALGVAPDAVTIVKASSGARQLAVVQSAPLVQRLSEMMDNSDNVLAECIGREVAAAINRPLSFAGAVDAVTNRLGTAHIDTTGAALVDSSGLSVNNRLTAKTLGGAVQAAAGPDQPVLRALLDLLPIAGGSGTLSDRFLSSATHQGPAGWLRAKTGSLTAINSLVGVVTDRSGRVLTFAFISNDAGPTGRAAMDELATRLWMCGCAT

SEQ ID NO: 63669 - protein, 323 aa, Mycobacterium leprae
MDRQGAVGQLRRTVEEFAGTYCDIDDQWCVALSGGSDSLALTAVAAQLRSTTAFIVDHGLQSDSAAVAETARKQAISLGCVDAQVLCVQIDPPFGPKGGLEAAARAARYAVLGANRNGPVLLAHTLDDQAETVLLGLGRGSGARSIAGMRPHDPPWCRPLLGVRRSVPRAACHELGLNAWQDPHNTDCRYTRTRLRLEVLPLLEDVLGGGVVEALARTATALREDTELIDTFAAQALPNICAGSGLHARALAALPDAVRRRVIRGWLLNGGATGLTDKQIRGVDTLVTAWRGQGGVAVGSTLRGQRLIASRYDGVLTLHCAPV

SEQ ID NO: 63670 - protein, 790 aa, Mycobacterium leprae
MLLMNRKNVIRMVTAIAVVVLLGWSFFYFSDDTRGYKFVDTSVAMSQINGHNVKSAQIDDREQQLRLTLKKGNNDTDGSDKVITKYPTGYAVDLFNALSAKNTKVTTAVNEGSILGELLVYVLPLLLLVGLFVMFSRMQGGARMGFGFGKSRAKQLSKDMPKTTFADVAGVDEAVEELYEIKDFLQNPCRYQTLGAKIPKGVLLYGPPGTGKTLLARAVAGEAGVPFFTISGSDFVEMFVGVGASRVRDLFDQAKQNSPCIIFVDEIDAVGRQRGTGLGGGHDEREQTLNQLLVEMDGFGDRAGVILIAATNRPDILDPALLRPGRFDRQIPVSNPDLAGRRAVLRVHSKGKPIADDADLDGLAKRTVGMTGADLANVVNEAALLTARENGLVITGPALEEAVDRVIGGPRRKGRIISEQEKKITAYHEGGHTLAAWAMPDIEPIYKVTILARGRTGGHAVAVPEEDKGLRTRSEMIAQLVFAMGGRAAEELVFREPTTGAVSDIEKATKIARSMVTEFGMSSKLGAVRYGSEHGDPFLGRTMGTQADYSHEVARDIDDEVRKLIEAAHTEAWEILTEYRDVLDTLAGELLEKETLHRPELEGIFASVEKRPRLTMFDDFGGRIPSDKPPIKTPGELAIERGEPWPQPVPEPAFKAAIARASQAAEASHQAAQSDTDGPPGQGANGSHAGDRQRQHGPTQPDYGAPPGWHAPGWPPQQPPDYWYPPEQQPSQSPYWPQPAPSYPGQAPPPYPSYPPCPSYPPPGQSAPDAGKPPAQLDEGVSPSNPPAHG

SEQ ID NO: 63671 - protein, 284 aa, Mycobacterium leprae
MSLAPVQVIGVLNVTDNSFSDGGRYLDPDDAVQHGLAMVAEGAAIVDVGGESTRPGAIRTDPRVELSRIVPVVKELAAQGITVSIDTTRADVARAALQSGARIVNDVSGGRADPAMAPLVAEAGVAWVLMHWRLMSAERPYEAPNYRDVVAEVRADLLAGVDQAVAAGVDPGSLVIDPGLGFAKTGQHNWALLNALPELVATGVPILLGASRKRFLGRLLAGADGAVRPPDGRETATAVISALAALHGAWGVRVHDVRASVDALKVVGAWLHAGPQIEKVRCDG

SEQ ID NO: 63672 - protein, 191 aa, Mycobacterium leprae
MTRVVLSIGSNLGDRLAWLQSAVDGLGDAVVAVSPVYDTVPWGAVEQRSFLNAVVIADGPAYDTKAWLCRAQELERNAGRVRGQRWGARTLDVDLISCYQTSGATTGAVEVITCESNLTLPHPRAHLRAFVLVPWLAVDSDAELTVAGRAQRVDRLLAEMEPTEREGVRLTNLTLKLKRSSPARPVSPKSD

SEQ ID NO: 63673 - protein, 507 aa, Mycobacterium leprae
MNADPLETDAALPEQFRIRRDKRARLLAEGRDPYPVAIERTHTLAEVRAAYPDLATDSATDDIVGIAGRVIFARNSGKLCFATLQDGDGTNLQVMISLNKVGSETLDAWKVDVDLGDIVYVHGNVISSRSGELSVLADSWQMVSKSLRPLPVAHKEMSEESRVRQRYVDLIVCPQVRIVAHQRIAVIRAIRTALERRGFLEVETPMLQTLAGGAAARPFVTHSNALDIDLYLRIAPELFLKRCIVGGFDKVFELNRVFRNEGADSTHSPEFSMLETYQTYGTYDDSAVVTREIIQEVADEAIGTRQLQMPDDSVYDIDGEWETIQMYPSLSAVLGEEITPQTSVDRLRAIADRLGRGIGPEILDKPSYGHGRLVEQLWEYTVGNTLSAPTFVKDFPVETTPLTRQHRSIPGVTEKWDLYLRGVELATGYSELNDPVVQRERFGQQVRAAAAEEDEAMALDEEFLAALEYAMPPCTGTGMGIDRLLMSLTGLSIRETVLFPIVRPHSN

SEQ ID NO: 63674 - protein, 848 aa, Mycobacterium leprae
MFERFTDRARRVVVLAQEEARMLNHNYIGTEHILLGLIHEGEGVAAKSLDSLGISLEAVRSQVEDIIGQGQQAPSGHIPFTPRAKKVLELSLREALQLGHNYIGTEHILLGLIREGEGVAAQVLVKLGAELTRVRQQVIQLLSGYQGKEAAEAGTGGRGGESGSPSTSLVLDQFGRNLTAAAMESKLDPVIGREKEIERVMQVLSRRTKNNPVLIGEPGVGKTAVVEGLAQAIVHGEVPETLKDKQLYTLDLGSLVAGSRYRGDFEERLKKVLKEINTRGDIILFIDELHTLVGAGAAEGAIDAASILKPKLARGELQTIGATTLDEYRKYIEKDAALERRFQPVQVGEPTVEHTIEILKGLRDRYEAHHRVSITDSAMVAAATLADRYINDRFLPDKAIDLIDEAGARMRIRRMTAPPDLREFDEKIAEARREKESAIDAQDFEKAASLRDREKQLVAQRAEREKQWRSGDLDVIAEVDDEQIAEVLGNWTGIPVFKLTEAETTRLLRMEEELHKRIIGQEDAVKAVSKAIRRTRAGLKDPKRPSGSFIFAGPSGVGKTELSKALANFLFGDDDALIQIDMGEFHDRFTASRLFGAPPGYVGYEEGGQLTEKVRRKPFSVVLFDEIEKAHQEIYNSLLQVLEDGRLTDGQGRTVDFKNTVLIFTSNLGTSDISKPVGLGFTQGSGENDYERMKQKVNDELKKHFRPEFLNRIDDIIVFHQLSRDEIIRMVDLMISRVANQLKVKDMTLELTNKAKALLAKRGFDPVLGARPLRRTIQREIEDQLSEKILFEEVGPGQVVTVDVDNWDGEGPGEDVKFTFTGIRKPSTEPDLAKAGVHSAGGPEPVEQ

SEQ ID NO: 63675 - protein, 537 aa, Mycobacterium leprae
MRPYYITTAIAYPNAAPHIGHAYEYIATDAIARFKRLDGLDVRFLTGTDEHGLKVAQAAEAAGVPTAQLARRNSGVFQRMQEALHISFDRFIRTTDADHYKAAKEIWRRMDAAGDIYLGTYSGWYSVRDERFFVDSETKLLDNGIRVAVETGTLVTWTEKEQTYFFRLSAYVDKLLAHYDANPDFIGPEVRRNEVISFVSGGLEDFSISRTSFDWGVQVPEHPDHVMYVWIDALTNYLTGAGFPDTDSELFGRYWPANLHMIGKDIIRFHAVYWPAFLMSAGIELPRRIFAHGFLHNHGEKMSKSVGNIVDPMALVQTFGVDQVRYFLLREIPFGQDGNYSEEAIITRMNTDLANEFGNLAQRSLSMVAKNLGGVVPEPSEFTSADTALLTTADGLLERVRGNFDGQAMNLALEAIWLMLGEANKYFSSQQPWILRKSESEADQARFRTVLYTTCEVVRIAALLVQPVMPESAGKMLDLLGQEEDQRAFTAVSVRLAPGTVLPPPTGVFPRYQPSEIEGADPVKSSSKRREHNKRRE

SEQ ID NO: 63676 - protein, 262 aa, Mycobacterium leprae
MVDAHTHLDACGARDADDVNAIVERAAAVGVVAVVTVADDLESARWVIAAAGWDRRVYAAVALHPTRANSLTSAARAKIEQLAAHPRMVAVGETGMDLYWPGRLDSCAPPDVQREAFAWHIDLAKRCGKPLMIHNRQADAEVLDVLRAEGAPEQVIFHCFSSNAAMARRCVDAGWMLSLSGTVSFRNARPLREAVPLIPAQQLLVETDAPFLTPHPHRGLANEPYCLPYTVRAVAELVERSPEELAQITTSNALRVYKLGSV

SEQ ID NO: 63677 - protein, 306 aa, Mycobacterium leprae
MQRKSGCTLTIRLLERTEIRWLVKELECRPRKSLGQNFVHDANTVRRVVSTSRVNRSDFVLEVGPGFGSLTLALLDCGAAVSAIEIDPVLAGRLPQTVAEHSNNEIHRLTVCNRDVLSFRRGDLATEPTALVANLPYNVAVPALLHLLAEFPSIRTVTVMVQAEVAERLAAEPGGKDYGVPSVKLSFFGRVRRCGMVSPTVFWPIPRVYSGLVRVDRYATSPWPTDDAFRRQVFELVDIAFTQRRKTSRNAFVKWAGSSNESANRLLAASIDPARRGETLSIDDFVRLLRRSDGRDDAAVRSASAS

SEQ ID NO: 63678 - protein, 215 aa, Mycobacterium leprae
MAKSTVNKLSVSVRTNTGKGASRRARRDGKVPAVLYGHGEEPQHLELPAHAFSAVLRHVGTNAVLTLEVAGKEQLALTKAIDVHPIRHTIMHADLLVVRSGEKIVVEVPVEVEGDAGPDILVTQETTSIEIEAEALSIPEQLTMSIEGAEPGTQFTARQIPLPVGVTLVSDPEMLVVNVVNAPTDAQTKAKYAGEAHEAPEVGTAENKTAATESE

SEQ ID NO: 63679 - protein, 327 aa, Mycobacterium leprae
MLSHDWTDNRKNLMLFSGRAHPELAEQVAKELDMHVTTQDAREFANGEIFVRFHESVRGCDAFVLQSCPAPVNTWLMEQLIMIDALKRGSAKRITAVIPFYPYARQDKKHRGREPISARLVADLLKTAGADRIVTVDLHTDQIQGFFDGPVDHMRGQNLLTGYIKNNYPDTNMVVVSPDSGRVRIAEKWGDALGGVPLAFIHKTRDLRVPNQVVSNRVVGEVEGRTCVLIDDMIDTGGTVAGAVQLLRNDGASDVIIAATHGVLSPPAAERLAQYGTREVIVTNTLPIGEEKRFPQLTVLSIAPLLASTIRAIFENGSVTGLFDGEA

SEQ ID NO: 63680 - protein, 492 aa, Mycobacterium leprae
MTFRGDTAVLVLAAGPGSRMRSDTPKVLHTIAGRSMLSHSLHAITKLAPQHLVVVLGHEHQRIAPLVAELADTLERTIDVALQDRPRGTGHAVFCGLSALPDDYGGIVVVTSGDTPLLDANTLAELIATHNATSAAVTVLTTTFSDPLGYGRILRTQDNEVMAIIEHADASPSQREIREVNAGVYAFDITALRSALIRLNSNNTQQELYLTDVISILRREGQKVNAQHIDDNALVAGVNNRVQLAELSAELNRRIVATHQVAGVTIIDPATTWIDIDVTIGNDTVIHPGTQLLGRTQIGECCVIGPDTTLTDVLVSQRATVVRTHGTSSTIGAGAMVGPFTYLRPGTVLGTKGKLGAFVETKNSTIGTGAKVPHLTYVGDADIGEHSNIGASSVFVNYDGTAKQRTTIGSHVRTGSDTKFVAPVTVGDGAYTGAGTVVRNDVPPGALAVSVSPQRNIENWVQRKRPGSAAAQAAEKASTRTGKQSQQKSEPD

SEQ ID NO: 63681 - protein, 1224 aa, Mycobacterium leprae
MTAPGPACLDTPIAGLVELALTAPTFGQLMERAGTRPAELILAGPACARLFVASALARLGPLLVVTATGREASNLTAELRGVFGAAVAMFPSWETLPHERLSPGVDTVGARLMVLRRLAHPDDARLGPPLQVVVTAVRSLLQPMTAQLGLVEPVTLSVGDEIGFERVIARLVELAYTRVDMVGRRGEFAVRGGILDIFGPTAEHPVRVEFWGDEITEMRMFSVVDQRSIPEIGVDTLVAIACRELLLSDDVRARAVELAAQAAARRPTEEPAISGSVTDVLAKLAEGIPVDGMEALLPVLCPDDYALLTDQFAADTPVLLCDPEKVRIQAADLIKTDRAFLEASWSVAAIGADNAAPVDVEQLYGSGFVELGDVQAAAIRSGHPWWTLSQLSDESALELDIRAAPSTRGHQHAIDGIFAMLRAHVATGGYAAIVTPGTGTAHRVVERLAESDIPGAMLEPAAAPGLGLRPGLVGVLKGPLLDGVVIPGANLVIITEADLTGSRATPVEGKRLAAKRRSAADPLALTAGDLVVHDQHGIGRFVEMVERTVGGARREYLVLEYASNKKSKQADKLYVPMDSLDQLSRYVGGQAPALSRLGGSDWANTKTKARCAVREIAGELVSLYAKRQASPGHAFGPDTPWQAEMEDAFGFTETVDQLTAITEVKGDMEKSVPMDRVICGDVGYGKAEIAVRAAFKAVQDGKQVAVLVPTTLLADQHLRTFTERMAGFPVTVKGLSRFTDAAESRAVIDGLAEGSVDIVIGTHRLLQTGVCWKDLGLVVVDEEQWFGVEHKEHIKSLRTHVDVLTMSATPIPRTLEMSLAGIREMSTILTPPEERYPVLTYVGPHDDKQVAAALRRELLRDGQAFYVHNRVSSIYQAAARVCGLVPEARVVVAHGQMPEDLLETTMRGFWNREYDILVCTTIVETGLDIPNANTLVVERADTFGLSQLHQLRGRVGRSHERGYAYFLYPPQAPLTEIAYDRLVTIAQNNELGAGMAVALKDLEIRGAGNVLGVEQSGHVAGVGFDLYVRLVGEAVEAYRAVADGKTAITPEEPKDVRIDLPVDAHLPPDYIASDRLRLEGYRRLAAASSDTEVAAVVDELIDRYGALPEPAQRLVAVAQLRLLCRGSGIIEVTAPSASTMRLSPIRLIDSAQVRLKRMYPGAQYRATAATVQVPIPRAGSSGGTLGVPCIRDVELVQAVADLITALQGLPRKVIGITGPEPTSK

SEQ ID NO: 63682 - protein, 447 aa, Mycobacterium leprae
MSPPTGRPRLSHDYKENLVPVIEQVGAREILDSRGNPTVEVEVVLIDGTFARAAVPSGASTGEYEAVELRDGDGRYGGKGVKRAVDAVLDEIGPVVIGLNANDQRLIDQELLDLDGTPDKSRLGGNAILGVSLAVAKAAADSAELPLFRYIGGSNAHILPVPMMNILNGGAHADTAVDVQEFMVAPIGAPSFVEALRWGAEVYHALKSVLKKKGLSTGLGDEGGFAPEVAGTTAALDLVTLAIEAAGFKPGADVALALDAAATEFYTDGIGYHFEGMTHTADQMTEFYADLLGSYPLVSIEDPLSEDDWDGWAALTASIGEQVQIVGDDIFATNPERLEEGIGRGVANALLVKVNQIGTLTETLEAVALAHHSGYRTMISHRSGETEDTMIADLVVALGSGQIKTGAPARSERVAKYNQLLRIEEELGDAARYAGDLAFLRYVVETR

SEQ ID NO: 63683 - protein, 432 aa, Mycobacterium leprae
MPAVVLIGAQWGDEGKGKVTDLLGGRAQWVVRYQGGNNAGHTVVLPTGENFTLHLIPSGVLTPGVTNVIGNGVVVDPGVLLSELQGLEDRGVDTSQLLISADAHLLMPYHVAIDKVTERYMGNKKIGTTGRGIGPCYQDKIARMGIRVADVLEPGELTHKIEAALEFKNQVLVKIYNRKALDLAQVVETLLEQAQQFRHRITDTRLLLNDALEAGETVLLEGAQGTLLDVDHGTYPYVTSSNPTAGGAALGSGIGPTRIHTVLGILKAYTTRVGSGPFPTELFDENGEYLAKTGSEIGVTTGRRRRCGWFDAVIARYATRVNGITDYFLTKLDVLSSLETVPVCVGYQIAGVRTHDMPITQSDLARAEPIYEELPGWWEDISGAREFEDLPAKARDYVLRLEELAGAQVACIGVGPGRDQTIVRCDVLRSRR

SEQ ID NO: 63684 - protein, 345 aa, Mycobacterium leprae
MPIATPEIYAEMLRRAKENSYAFPAINCTSSETVNAAIKGFADAGSDGIIQFSTGGAEFASGLGVKDMVTGAVALAKFTHTIAAKYPINVALHTDHCPKDKLDSYVRPLLAISARRVATGKDPLFGSHMWDGSAIPIDENLAIAQDLLKDAAAAKIILEVEIGVVGGEEDGVAGEINEKLYTTPKDFVKTIDALGAGEHGKYLLAATFGNVHGVYKPGNVKLRPDILAEGQKVAAAKLSQSEGSKPFDFVFHGGSGSEKSEIEEALRYGVVKMNVDTDTQYAFTRPVSGHMFTNYDGVLKVDGDVGNKKVYDPRSYLKKAEASMTERVLEACNDLRCAGKSVAAS

SEQ ID NO: 63685 - protein, 235 aa, Mycobacterium leprae
MQEPHRQPAICLSTRLAKARLYLCTDARRERGDLAQFVNAALAGGVDIVQLRDKGSVGEQQFGPLEARDALAACEIFTDATGRHDALFAVNDRADIARAAGADVLHLGQGDLPPGVARQIVCRQMLIGLSTHDRHQVAAAVAALDAGLVDYFCVGPCWPTPTKPDRPAPGLELVRAAAELAGDKPWFAIGGIDAQRLPDVLHAGARRIVVVRAITAAADPRAAAEQLISTLTATS

SEQ ID NO: 63686 - protein, 541 aa, Mycobacterium leprae
MAKTIAYDEEARRGLERGLNSLADAVKVTLGPKGRNVVLEKKWGAPTITNDGVSIAKEIELEDPYEKIGAELVKEVAKKTDDVAGDGTTTATVLAQALVKEGLRNVAAGANPLGLKRGIEKAVDKVTETLLKDAKEVETKEQIAATAAISAGDQSIGDLIAEAMDKVGNEGVITVEESNTFGLQLELTEGMRFDKGYISGYFVTDAERQEAVLEEPYILLVSSKVSTVKDLLPLLEKVIQAGKSLLIIAEDVEGEALSTLVVNKIRGTFKSVAVKAPGFGDRRKAMLQDMAILTGAQVISEEVGLTLENTDLSLLGKARKVVMTKDETTIVEGAGDTDAIAGRVAQIRTEIENSDSDYDREKLQERLAKLAGGVAVIKAGAATEVELKERKHRIEDAVRNAKAAVEEGIVAGGGVTLLQAAPALDKLKLTGDEATGANIVKVALEAPLKQIAFNSGMEPGVVAEKVRNLSVGHGLNAATGEYEDLLKAGVADPVKVTRSALQNAASIAGLFLTTEAVVADKPEKTAAPASDPTGGMGGMDF

SEQ ID NO: 63687 - protein, 241 aa, Mycobacterium leprae
MAVATGTVVAVVPAAGAGKRLAAGIPKAFCELDGRTLVERAVVGLLESGVVDHVVVAVPADRIAQTQWVLSQRLANSAGQHATVVAGGADRTKSVCQALATLPAPSRVGAPEFILVHDAARALTPARLIVRVVDALRAGHTAVVPALPLSDTIKAVDANGMVLGTPARVGLRAVQTPQGFATELLWCAYQRGPHLDAVDFTDDASLVEHLGGQVQVVAGDPLAFKITTQLDLLLAKKILRR

SEQ ID NO: 63688 - protein, 158 aa, Mycobacterium leprae
MSELPRVGLGFDVHVFEPGRPCWLVGLLFPDNDGCAGHSDGDVAVHALCDAVLSAAGQGDIGGLFAVGDPRWERVSGADMLRHVVELLLRHGYEVVNASVQVIGNRPKIGPRRTEAQRLLSALLRAPVSVAATTTEGLGLTGRGEGLSAIATALVVQV

SEQ ID NO: 63689 - protein, 473 aa, Mycobacterium leprae
MIDSGHLRLHDTVAGAVRDFVPLRAGHVSIYLCGATVQGQPHIGHVRSGVAFDILRRWLMARGYDVAFIRNVTDIDDKILNKAAAAGRPWWEWAATHERAFTAAYDALDVLPPSAEPRATGHITQMIELIELLIETGHAYTGGSDVYFDVLSYPDYGQLSGHKMDYIHQGEGVTTGKRDQRDFTLWKGAKSGEPSWPTPWGRGRPGWHLECSAMARAYLGSEFDIHCGGMDLVFPHHENEIAQSRAVGDGFARYWLHNGWVTMGGEKMSKSLGNVLSIPAVLQRVRPAELRYYLGSAHYRSMLEFSEAALQDAVKAYVGVENFLTRVRTRVGAVGTGELTPRFAAALDDDLAVPIALAEVHHARVEGNRALDIGDHEGALTNAGAIRAMMGILGCDPLDERWESRDETSAALAAVDVLVAAELESRQMAREQRNWVLADQIRDRLKDAGIEVTDTVNGPQWELLAGDKQVDAR

SEQ ID NO: 63690 - protein, 252 aa, Mycobacterium leprae
MACIDLNADLGEGFGVWRLGDDEAMLRIVTSANVACGFHAGDPAGLLRVCRLAAERGVRIGAQVSYRDLVGFGRRFIDVTADDLLADVVYQIGALQAIAQTAGSAVSYVKPHGALYNTIVTNREQGAAVAAAIQLVDSTLPVLGLAGSTFFDEAARIGLRTVAEAFADRTYRPDGQLISRREPGAVLHDPAVIAQRVVTMVTTGKATAVDGTQLAVTVESICLHGDSPNAIQMATAVRDQLNAAGIDIRAFC

SEQ ID NO: 63691 - protein, 147 aa, Mycobacterium leprae
MPTYAPKAGDTTCSWYVIDATDVVLGRLAAVAATLLRGKHKPTFAPNVDGGDFVIVINADKVAISGDKVQHKMVYRHSGYPGGLRKRTIGELMQKHPDRVVEKAIVGMLPKNKLSRQIQRKLRVYAGPDHPHSAQQPVPFEIKQVAQ

SEQ ID NO: 63692 - protein, 153 aa, Mycobacterium leprae
MTETSEAVEIAVGTPAAKHSESFVFERSIQTVGRRKEAVVRVRLVLGTGKFDLNGRSLEDYFPNKVHQQLIKAPLVTVERTRNFDIFALLHGGGPSGQAGALRLGIARALILASPEDRPALKKAGFLTRDPRSTERKKYGLKKARKAPQYSKR

SEQ ID NO: 63693 - protein, 463 aa, Mycobacterium leprae
MGRLFGTDGVRGVANRELTPELVLALGAAAARCLANSGEPGRRVAVIGRDPRASGEMLEAAVIAGLTSAGVDALRVGVLPTPAVAYLTGAYDADFGVMISASHNPMVDNGIKIFGPGGHKLDDDTEDQIEDLVTGGPGLRPAGVAIGRVIDAEDATERYLRHVGKASTIRLDGLTVVVDCAHGAASSAAPRAYRAAGARVIAINADPNGININDRCGSTDLGSLRSAVLAHRADLGLAHDGDADRCLAVDANGDLVDGDAIMVVLALAMQEAGELSSNTLVTTVMSNLGLHLAMRSVGVIVRTTDVGDRYVLEELRAGDFSLGGEQSGHIVMPALGSTGDGIITGLRLMTRMVQTSSSLAALASAMRALPQVLINVEVADKTTAAAAPLVQTAVETAEVELGNTGRILLRPSGTEPMIRVMVEAAEEDVAHRVATRVAAAVSAQGSPLRCWNPDAISGVELRL

SEQ ID NO: 63694 - protein, 625 aa, Mycobacterium leprae
MCGLVGYVGQRPACGVVMDALRRMEYRGYDSSGIALINGSAKSGNLTVRRRAGRLSNLESVLAEMVPASLAGNVGLGHIRWATHGRPTDRNAHPHRDATGKIAVVHNGIIENFPSLRHELEIAGVEFVSDTDTEVAVHLVAQAYCAGETAGDFVGSVLAVLRRLQGHFTLVFANADEPGTIVAARRSTPLVLGIGDGEMFVGSDVAAFIEHTRQAVELGQDQAVVITADGYRISDFDGNDDAVNARTFHIDWDLAAAEKGGYEYFMLKEIAEQPDAVVDTLLGHFTGGRIVLDEQRLSDQELREIDKVFVVACGTAYHSGLLAKYTIEHWTRLPVEVELASEFRYRDPVLDRSTLVVAISQSGETADTLEAVRHAKEQKAKVLAICNTNGSQIPRECDAVLYTRAGPEIGVASTKTFLAQVAANYLLGLALAQARGTKYPDEVQREYRELEAMPDLVARVIAGMGPVADLAYRFAQSTTVLFLGRHVGYPVALEGALKLKELAYMHAEGFAAGELKHGPIALIEENLPVIVVMPSPKGSAMLHAKLLSNIREIQTRGAVTIVIAEEGDDTVRLYADHLIELPAVSTLLQPLLSTIPLQVFAASVAQARGYDVDKPRNLAKSVTVE

SEQ ID NO: 63695 - protein, 388 aa, Mycobacterium leprae
MAVTPISLRPGVLAEAVVDLGAIDYNVRVLREHAGMAQLMVVLKADAYGHGATQVALAALAAGAAELGVATVDEALALRADGISAPVLAWLHPPGIDFGPALLADVQIAVSSVRQLDELLDAVRRTGRTATVTVKADTGLNRNGVVTDQYPAMLTALQRAVVEDAVRLRGLMSHLVYADQPDNPSNDVQGKRFAALLAQAHEQGLRFEVAHLSNSSATMSRPDLAYDLVRPGIAVYGLSPVPSRGDMGLIPAMTVKCAVAMVKSIRAGEGVSYGHDWIAQHDTNLALLPVGYADGVFRSLGGRLDVLINGKRRPGVGRICMDQFVVDLGPGPIDVAEGDEAILFGPGARGEPTAQDWADLLGTIHYEVVTSLRGRITRTYREAQTVDR

SEQ ID NO: 63696 - protein, 351 aa, Mycobacterium leprae
MTISAVPGTIILAIETSCDETGVGIACLDDYGTVTLLADEVASSVDEQARFGGVVPEIASRAHLEALGPTIRCALAAAGLTGSAKPDVVAATIGPGLAGALLVGVAAAKAYSAAWGVPFYAVNHLGGHLAADVYEHGPLPECVALLVSGGHTHLLQVRSLGAPIVELGSTVDDAAGEAYDKVARLLGLGYPGGKVLDDLARTGDRDAIVFPRGMTGPADDLNAFSFSGLKTAVARYVESHPDALPADVAAGFQEAVADVLTMKAVRAATGLGVSTLLIVGGVAANSRLRELAAQRCAAAGLMLRIPGPRFCTDNGAMIAAFAAHLLAAAAPPSPLDVPSDPGLPVVKRQIN

SEQ ID NO: 63697 - protein, 529 aa, Mycobacterium leprae
MADSAGLDQPEPSPRPVLVVDFGAQYAQLIARRVREARVFSEVIPHTTSIEEITARDPLAIVLSGGPASVYTEGAPQLDPALFDLGLPVFGICYGFQAMAQVLGGTVARTKTSEYGRTELKVLGGDLHSGLPGVQPVWMSHGDAVTAAPDGFDVAASSSGAPVAAFENRDRRLAGVQYHPEVMHTPHGQQVLSRFLHDFAGLDADWTAANIAGVLVEQVRAQIGNGHAICGLSGGVDSAVAAALVQRAIGDRLTCIFVDHGLLRDGERGQVQRDFVAATGAKLVTVDAAETFLQALSGVTNPEGKRKIIGRQFIRAFEGAVRDLLGDSTFDSGIEFLVQGTLYPDVVESGGGSGTANIKSHHNVGGLPDNLRFKLVEPLRLLFKDEVRAVGRQLDLPEEIVARQPFPGPGLGIRIVGEVTAERLDTLRRADSIAREELTTAGLDYQIWQCPVVLLADVRSVGVQGDNRSYGHPIVLRPVSSEDAMTADWTWVPYEVLECISTRITNEVAEVNRVVLDITNKPPGTIEWE

SEQ ID NO: 63698 - protein, 602 aa, Mycobacterium leprae
MDHTTKCDAEQYFQAIVTSMADGVIVVDIDGRIESINPAATRILGLRAHDVVDMKHGHPFCFYDTDNQRVDLEREVMRVVRREVTTVSKVVGIDQHSGQRLWLSVNVSLLAYKAPPHSALVVSFSDISAHHLSIERLTYEATHDCLTGLANRRFAEDQITKSLQHDERSRLAAVLLLDLDDFKVINDSLGHDVGDAVLQTVAQRLRSAVRPDDVVARLGGDEFIVLLRGPLSDMNANDVAKRLHTTLSESLVVDQLTVPIGASVGILEVRPDDRRRAADILRDADSAMYAAKNKKQCAVTPQQLVPFVALIALFVFFTAAAGAKFYAPSNLLVILQQTVVLAIVGYGMTFVIMAGSVELSVGSIVALTGVTAALVAAQNQFAAIVTALLVGLAAGMVNGIVFAYGKIPSFVSTLGMLQVCRGITLMISDSSAKPMPFHGILGAMGAMPWILIVCLFVTILAGILFQFTMFGRWVKAIGGNERVATLAGVPTRGIKVAIFAICGLTAGLGGIVLASRLGAGTPTAATGFEIDVIAAVVIGGTPLTGGLGRLSGTLIGAIIISMLSNGMVFMGVGNAASQIIKGIMLAAAVFVFLQRRKIGIIK

SEQ ID NO: 63699 - protein, 345 aa, Mycobacterium leprae
MSTGTSVPLRVASIMLILGLLPAILPACGFSESHHKLTIGVSYPTANSPFWNAYTRFIDEGSHQLGVYINAVSAEEDEQKQLSDVETLINQGIDGLIVTPQSTSIAPTLLRIATQANIPVVVVDRYPGYAPGQNKNADYVAFLGPNNEKAGSGIAEALMAGGGSKFLALGGMPGNSVAQGRKAGLESALTAVGHRLVQFQYAGDSEDKGLAAAENMLQAHPAGDANAIWCFNDKLCQGAIKAVYNANREKEFIFGGMDLTPQAIAAIENGLYTVSLGAHWLEGGFGLAILYRKIHGQDPAERMVKLDLLKVDKSNVAKFKARYIDNTPHYNWKSTTPFDMTITLN

SEQ ID NO: 63700 - protein, 408 aa, Mycobacterium leprae
MFDFMVYSPEVNAFLMSRGPGSTPLWGAAEAWISLAEQLMEAAQEVSDTIVVAVPASFAGETSDMLASRVSTFVAWLDGNAENAGLIARVLHAVAYAFEEARAGMVPLLTVLGNIIHTMALKAINWFGQVSTTVAALEADYDLMWVQNSTAMTTYRDTVLRETGKMENFEPAPQLVSRYCMDRRDSVNSFHSSSSSDSLYESIDNLYDSVAQSEEHGSDSMSQSYNTCGSVAQSELCDSPFGTPSQSSQSNDLSATSLTQQLGGLDSIISSASASLLTTNSISSSTASSIMPIVASQVTETLGRSQVAVEKMIQSISSTAVSVDVAASKVVAGVGQAVSVGALRVPENWATASQPVMATAHSVPAGCSAITTAVSGPLEGVTQPAEEVLTASVAGGSGTGGPAFNEAV

SEQ ID NO: 63701 - protein, 158 aa, Mycobacterium leprae
MISKMFRLLFYTPRIPPNTGNAIRTAAVTGCALHLVEPIGFDLSNPKLRRAGLDYHDLASVTVHTSLSEAWNALSPARVFAFSTLANTLFTDVSYQAGDVLMFGPEPTGLDAATLADDHITQQVRIPMLSGRRSLNLSNAAAVAVYEAWRQHGYAGLV

SEQ ID NO: 63702 - protein, 307 aa, Mycobacterium leprae
MDSAAQSNQAQSVFGQTGTARVKRGMAEMLKGGVIMDVVIPEQARIAEGSGAVAVMALERVPSDIRAQGGVSRMSDPDMIESIIAAVTIPVMAKARIGHFVEAQILQSLGVDYIDESEVLTPADYTHHIDKWKFTVPFVCGATNLGEALRRINEGAAMIRSKGEAGTGDVSNATTHMRAIAGDIRRLTSLSEDELYVAAKELHAPYELVIEVARTNKLPVTLFTAGGIATPADAAMMMQLGAEGIFVGSGIFKSSDPAQRAAAIVKATTFYDDPDVLAKVSRGLGEAMAGIDVEQIAQPDRLAQRGW

SEQ ID NO: 63703 - protein, 702 aa, Mycobacterium leprae
MSAPVHPVPGADGGDPLRPATPGLRSPQVPIQVPAGSTAAAAVSEAGLPTHGAPDAIVVVRDADGKLRDLSWVPDVDVEVTPVPVNTDDGRSVIRHSTAHVLAQAVQDLFPQAKLGIGPPITDGFYYDFDVAEPFTPEDLKALEKRMRQIVKEGQLFSRRIYESKEQARTEWAGEPYKLELVDDESGDAEIMEVGGDELTAYDNLNARNGERIWGDLCRGPHIPTTKHIPAFKLTRSSAAYWRGNQKNASLQRIYGTAWESQEALDRHLEMITEAQRRDHRKLGIELDLFSFPDEIGSGLAIFHPKGSIVRREMEEYSRRKHIEAGYQFVNTPHITKAQLFHTSGHLDWYAEGIFPPMHLDAEHNDDGTVRKPGQDYYLKPMNCPMHTLIFSSRGRSYRELPLRLFEFGTIYRYEKSGVVHGLTRARGFTMDDSHIFCTREQLHCELASLLRFVLDLLGDYGLEDFYLELSTKDPEKFVGSEEIWEEATAALAEVAENSTLPLVPDPGGAAFYGPKISVQVRDALGRSWQMSTIQVDFNFPERFALEYTSADGTRQRPVMIHRALFGSIERFFGILTEHYAGAFPAWLAPIQVVGIPVTGEHVSYLEEVAAQLKSCGVRTEVDVSDDRMAKKIVRHTNQKVPFMLLAGDRDVRTGSVSFRFGDRTQINGVARDSAVEAIVCWIVDRENDFPTAELVKVTGGE

SEQ ID NO: 63704 - protein, 301 aa, Mycobacterium leprae
MRRFWRTVVEVTSQNSQALAQASGAFTLGGDLKVNRLGFGAMRLTGKGVWGPPVDRYEAVRVLRRAVELGVNFIDTADSYGPYVSEEIIAEALHPYKGLVIATKAGLLRTGRDVWIPLGNPSYLRQELEMSLRRLNVDTIDLFQLHRIDPNFPLADQVGELFTLKNEGKIRHIGLSEINLDQLTAAQQITEIVSVQNMYNLSARAAEPLLDAVTSRGIGFIPWSPLAAGPLAAPDGPLQRIAVNHHATPSQLALAWLLKRSPVMLPIPGTSRVAHLEENVAAAEISLSDDEFEMLSAAGAQ

SEQ ID NO: 63705 - protein, 223 aa, Mycobacterium leprae
MAAVMQEGLIRFPAGYPADSAVERVVSFPRVGVLALQGDTREHLTALREAGADSMPVRRRGELDEVDALVIPGGESTTISHLLLDCELLEPLRARLADGLPAYGACTGMILLASEILDAGVCGREALPLGAIDITVRRNAFGRQVDSFEGDIGFAGLVDPVRAVFIRAPWVERAGDGVQVLAQAAGHAVAVRQGSMLATAFHPEMTSDRRIHQLFVDIVNGIA

SEQ ID NO: 63706 - protein, 787 aa, Mycobacterium leprae
MADDQGTAQALQPVQVVPGPAVEAPETPVETLKTSSSASRRVRARLARRMTAQRSTISPVLEPLVAVHKEFYPKANLSIVQRAFEVADQRHASQLRRSGDPYITHPLAVANILAELGMDITTLVAALLHDTVEDTGYTLEALSEEFGDEVGHLVDGVTKLDRVVLGSAAEGETIRKMITAMARDPRVLVIKVADRLHNMRTMRFLPPEKQARKARETLEVIAPLAHRLGMASVKWELEDLSFAILHPKKYEEIVRLVAGRAPSRDTYLAKVRAEIISTLGASKIKATVEGRPKHYWSIYQKMIVKGRDFDDIHDLVGIRILCDEIRDCYAAVGVVHSLWQPMAGRFKDYIAQPRYGVYQSLHTTVVGPEGKPLEVQIRTRDMHRTAEYGIAAHWRYKEAKGRNGVLHPHAAAEIDDMAWMRQLLDWQREAAEPGEFLESLRYDLAVQEIFVFTPKGDVITLPTGSTPVDFAYAVHTEVGHRCIGARVNGRLVALERKLENGEFVEIFTSKAPNAGPSRDWQQFVVSPRAKTKIRQWFAKERREEALEAGKDAMAREVRRGGLPLQRLVNGESMAAVARELHYIDVSALYTAIGEGHVSARHVVQRLLAELGGIDQAEEELAERSTPTTMLRRQRSTDDVGVSVPGAPGVLTKLAKCCTPVPGDAIMGFVTRGGGVSVHRTDCTNTASLQQQAERIIEVLWAPSSSSVFLVAIQVEALDRHRLLLDITRALADERVDILSASVTTSGDRVAISRFTFEMGDPKHLGHLLNVVRNVEGVYDVYRVMSAS

SEQ ID NO: 63707 - protein, 427 aa, Mycobacterium leprae
MTESCTVFSFSGPKGIPDYFPPDSAQFVAVRDGLLTAARRAGYGDIELPVFEDTALFARGVGESTDVVAKEMYTFADRGDRSVTLRPEGTAGVVRAVIEHGLDRGALPVKLCYAGPFFRYERPQAGRCRQLQQVGVEAIGVDDPALDAEVITIADAGFRSLGLDGFQLEITSLGDGTCRPQYRKLLQEFLLQLDLDEDTRRRAELNPLRVLDDKRPQVQAMTAAAPVLLDHLSDGAKQHFDTVLAHLDALRVPYVINPRMVRGLDYYTKTTFEFVHPGLGAQSGIGGGGRYDGLMRQLGGQDLSGIGFGLGVDRTLLALHAEGKTVGETTRCDVFGVSLGEAAKLKVAMLAGQLRAAGVRVDLIYGDRGIRGAMRAAGRSGARIALIVDDCAIKADGVGVRDLATGEQISVAVDSVVAEVISRIAPS

SEQ ID NO: 63708 - protein, 589 aa, Mycobacterium leprae
MLRSHGAGVLRKSDAGQQVTLAGWVSRRRDHGGVIFIDLRDSSGITQAVFREPDVLAQAHRLRAEFCIAVSGVVEIRPEGNANAEIPTGDIEVNATSLTVLGESAPLPFQLDEPAGEELRLKYRYLDLRRDGPGSAIRLRSKVNATARAVLARHDFVEIETPTITRSTPEGARDFLVPARLRPGTFYALPQSPQLFKQLLMVAGMERYYQIAHCYRDEDFRADRQPEFTQLDMEMSFVDAEDVIAISEEILTELWMLIGYHIPAPIPRISYADAMRRFGSDKPDLRFGLELVECTEFFCDTTFRVFQAPYVGAVVMPGGAAQPRRTLDEWQDWAKQRGHRGLAYVLVTDDGTLGGPVAKNFSDAERSRLASHVGAEPGDCIFFSAGPAKSSRALLGAARGEIANRLGLIDPEAWAFVWVVDPPLFERADEATKVGEMAVGSGAWTAVHHAFTSPKPEFEDSIESDPGSVLADAYDIVCNGHEIGSGSVRINRRDIQERVFAVMGLEKAEAEEKFGFLLEAFTFGAPPHGGIAFGWDRTNALLAGMESIREVIAFPKTGGGVDPLTDAPASITAQQRKESGIDTKPKEVE

SEQ ID NO: 63709 - protein, 473 aa, Mycobacterium leprae
MGTRWVPESSGFTVTDLSVLRGISNVVSDSLFDLPGAPQPTDYGLGGSTGVPLAVRMRPASLDELVGQGHLLAPGSPLRRLVEGSGVVSAILHGPPGCGKTTLAALISQATGHRFEALSALSAGVKDVRAVLKIARSALLSGKRTVLFIDEVHRFSKTQQDALLSAVENRVVLLVAATTENPSFSVVAPLLSRSLILQLRPLNADDIRAVVQRAVDDPRGLGGQIAVAPEAVDLLVRLAAGDARRVLTALEVAAEAVQTGDELTVATIEQSLDNAAVRYDRDGDQHYDIVSAFIKSVRGSDVDAALHYLARMLIAGEDPRFIARRLLILASEDIGLADSTALPLAVAAAQTVQLIGMPEAQLALAHATIHLATAPKSNAVMTALGSAIDDIKAGKAGLVPAHLRDGHYSGAAALGNAKGYKYSHDDPDGVVAQQYPPYELVEVDYYRPTGRGGERELVGRLDRLRAIIRGRRG

SEQ ID NO: 63710 - protein, 908 aa, Mycobacterium leprae
MQTHEIRKRFLDHFVKAGHTEVPSASVILDDPNLLFVNAGMVQFVPFFLGQCTPPYATATSIQKCIRTPDIDDVGITTRHNTFFQMAGNFSFGDYFKRGAIELAWALLTNSFADGGYGLDPERLWATVYLDDDEAAGLWQEIAGLPPERIQRRGMADNYWSMGIPGPCGPSSEIYYDRGPEFGPEGGPIVNEDRYLEVWNLVFMQNERGEGTTKEDYEIRGPLPRKNIDTGMGVERIALVLQGVHNVYEIDLLRPVIDLVATRAPRPYDPENEDTNHADNVRYRIIADHSRTAAILIGDGVSPVNDGRGYVLRRLLRRIIRSAKLLGIDSPIVGDLMATVCNAMGRAYPGLVTDFDRINRIAVAEETAFNRTLTSGSKLFDDVVGATVASGSTVVAGLDAFTLHDTYGFPIELTLEMAAEAGLTVDEKGFHELMLQQRQRAKVDAAARKQAHVDLTAYRELVDAGPTEFTGFDELTTEARILGIFVEGKRVPVVAHAVRGQAGITNRVELVLDRTPLYAESGGQIADAGTISGIGAGASSRAAVTDVQKIAKTLHVHRVNLESGEFVEGDTVVAVVDPGWRRGAAQGHSGTHIVHAALRQVLGPNAVQAGSLNRPGYLRFDFNWQGSLTGEQRTQIEEVTNEAVQADFEVHTFTEKLDTAKAMGAIALFGEAYPDEVRVVEMGGPFSLELCGGTHVHNTAQIGPVTILGESSIGSGVRRVEAYVGLDSFRHLAKERALMAGLASSLQVPSEEVHARVATLVERLKAAEKELERARQANVQAAATKAAAGAEWIGNVRVVVQRMSGPIAPDDLRFLVGDIRGKLGSDPAVVALIAVTSDGPTATVPYAVAANPAAQDLGIRANDLVEQLAMVVDGRGGGKADLAQGSGKDPTGIDAALDTVRAQIAQVG

SEQ ID NO: 63711 - protein, 184 aa, Mycobacterium leprae
MFSSQHRLLYQPSGPDLSKNLDPERGRRLGIDVGSVRIGVAFSDPDGILATPVETVRRYRSAKHLRRLAELVVELQVVEVVVGLPWTLTDRTGSSAKDAIDTAEALARRVAPVPVRLVDERLTTVSAQRLLRAAGVRAKDQRAVIDQAAAVVILQNWLDQCRAATPARADEPTTGSVAGEVIDG

SEQ ID NO: 63712 - protein, 278 aa, Mycobacterium leprae
MSLTACANKGPRKAGIIGSPIAHSRSPHLHLAAYRALRLHDWTYERIECDAEELPTVVSGFGPQWVGVSVTMPGKFAALRFADEHTARASLVGSANTLLRTQRGWRADNTDIDGVAGALAAIGPLAGRALVCGSGGTAPAAVMGLAELGVTDITVLARNPDKASRLVDLGVQVGVATRLCGLDSGGLADEVKAAEVLVSTVPADVAARYVDVFATVPVLLDAIYDPWPTPLVAAVSAAGGRVISGLQMLLHQAFAQVEQFTGMPAPREAMACALAGLH

SEQ ID NO: 63713 - protein, 407 aa, Mycobacterium leprae
MLRWITAGESHGRALVAVVEGMVAGVEVTSTAIADQLARRRLGYGRGARMAFERDGVTVLSGVRHGVTLGGPIAIEIDNTEWPKWESVMAADPVDAAELEDSARNAPLTRPRPGHADYAGMLKYGFDDARPVLERASARETAARVAAGTIARQFLRQALGVEVLSHVISIGASARYDGPPPGSEDLTVIDASLVRAFDEQVEKSMIAEIEAAKKDGDTLGGVVEAVVLGLPVGLGSFTSGDDRLDSQLAAAVMGIQAIKGVEIGDGFATARRRGSCAHDEMYSGPGGVVRLTNRSGGLEGGMTNGQPLRVRAAMKPISTVPRALATVDLATGEEAIAIHQRSDVCAVPAAGVVVETMVALVLARAALRKFGGDSLGETRRNLAAYQRAVADREAPVAQYCGESGIGG

SEQ ID NO: 63714 - protein, 190 aa, Mycobacterium leprae
MSNPVKGRHQARKRAVDLLFEAEARDLSPLEIIEVRSALAKSKLDVAPLHPYTVVVAQGVSEHTARIDELIISHLQGWKLDRLPAVDRAILRVSIWELLYADDVPEPVAVDEAVELAKELSTDDSPGFVNGLLGKVMLVTPQIRAAAQAVQQAVRMAAGTSEDHVPQREPAAGQLGQDDSNGGQVAAVCR

SEQ ID NO: 63715 - protein, 430 aa, Mycobacterium leprae
MSVLLRGVRLYGEGEQVDVLVEGEQIANIGAGIDIPDTADVIDAIDQVLLPGLVDLHTHLREPGREYAEDIETGSAAAALGGYTAVFAMPNTTPVADSPVVTDHVWRRGQQVGLVDVHPVGAVTVGLAGAELTEMGMMAAGAAQVRIFSDDGNCVHNPLVMRRALEYATGLGVLIAQHAEEPRLTVGAVAHEGPTAARLGLSGWPRAAEESIVARDALLARDAGARVHICHASTAGTVEILKWAKEQGISITAEVTPHHLLLDDSRLASYDGVNRVNPPLRETADAVALRQALADGIIDCVTTDHAPHADHEKCVEFSAARPGMLGLQTALSVVVHTMVVPGLLSWRDVAQVMSENPARIAGLPDHGRPLEVGEPANLTVVDPDVTWTVTGDGLASRSANTPYEAMTLPATVTATLLRGKVTARGQKSPV

SEQ ID NO: 63716 - protein, 375 aa, Mycobacterium leprae
MSKALLVLEDGRVFTGMPFGAIGQTLGEAVFSTGMSGYQETLTDPSYHRQIVVATAPQIGNTGWNDQDGESRDDRIWVAGYAVRDPSPCASNWRATGTLEDELVRQRIVGIAGIDTRAVVRHLRRYGSMKAGVFSGKAMIEPLNIEALVQHVRTQQSMLGADLVGEASTLDAYVVEPKGKERFTVAALDLGIKTNTPRNFARRGIRSYVLPASATFNQIADIKPHGLFLSNGPGDPATADHVVALTREVLNAGIPLFGICFGNQILGRALGLSTYKMVFGHRGINIPVIDHATGRVAVTAQNHGFALEGEAGQSFDTPFGSAVVSHTCANDGVVEGVKLADGRAFSVQYHPEAAAGPHDAEYLFDSFVELMAAQR

SEQ ID NO: 63717 - protein, 1129 aa, Mycobacterium leprae
MRPERGTLVPRRTDLNHVLVIGSGPIVIGQACEFDYAGTQACRVLRAEGLQVSLVNSNPATIMTDPEFADHTYVEPITPAFVERVIVQQAERGNRIDALLATLGGQTALNTAVALYENGVLERYGVELIGADFEAIQRGEDRQRFKDLVAKVGGESARSKVCFTMDEVRETVEDLGLPVVVRPSFTMGGLGSGMAHSDEEVGRMAGAGLVASPSANVLIEESVYGWKEFELELMRDGHDSVVVVCSIENVDPMGVHTGDSVTVAPAMTLTDWEYQRMRDLGIAILREVGVDTGGCNIQFAINPHDGRLIVIEMNPRVSRSSALASKATGFPIAKIAVKLAVGYTLDEILNDITKETPACFEPALDYVVVKAPRFAFEKFPGADPTLTTTMKSVGEAMSLGRNFVEALGKVMRSLETGRFGFWTAPDPQGDVDQVLLRLKTPTEGRLYDVELALRLGASTEKVAQVSGIDPWFVAQIGELVKLRDELVAAPVLDAELLRRAKHNGLSDRQITALRPELLGEDGVRSLRKRLGIHPVYKTVDTCAAEFEAKTPYHYSSYELDPAAETEVVPQTEKPKVLILGSGPNRIGQGIEFDYSCVHAAITLSHNGFETVMVNCNPETVSTDYDTADRLYFEPLTFEDVLEVFYAEEQSAAGGAGVAGVIVQLGGQTPLGLAQRLADAGVPIVGTSPEAIDLAEDRGAFGDVLTAAGLPAPKYGTATTFAQARRIAAEIGYPVLVRPSYVLGGRGMEIVYDEETLKDYITRATALSHEHPVLVDRFLEDAVEIDVDALCDGTEVYIGGVMEHIEEAGIHSGDSACALPPVTLGRSDLEKVRQATEAIARGIGVVGLLNVQYALKEDVLYVLEANPRASRTVPFVSKATAIPLAKACARIMLGSSISQLRFEGMLAASGDGGNVASHAPIAVKEAVLPFNRLRRADGAAIDSLLGPEMKSTGEVMGIDHDFGRAFAKSQTAAYGSLPTQGTVFVSVANRDKRLLVFPVKRLADLGFHVIATEGTAEMLRRKGIPCDEVRKHFEPPKAGRPALSAVDAIRAGDVDMVINTPYGNSGPRIDGYEIRSAAVSVNIPCVTTVQGASAAVQGIEAGIRGDIGVRSLQELHSAIGAGIAADNEVQ

SEQ ID NO: 63718 - protein, 403 aa, Mycobacterium leprae
MSEKGRLFTSESVTEGHPDKICDAISDSILDALLAEDPCSRVAVETLVTTGQVHVVGEVTTLAKTAFADISNTVRERILDIGYDSSDKGFDGASCGVNIGIGAQSSDIAQGVNTAHEVRVEGAADPLDAQGAGDQGLMFGYAINDTPELMPLPIALAHRLARRLTEVRKNGVLPYLRSDGKTQVTIAYEDNVPVRLDTVVISTQHAAGVDLDATLAPDIREKVLNTVIDDLSHDTLDVSSVRVLVNPTGKFVLGGPMGDAGLTGRKIIVDTYGGWARHGGGAFSGKDPSKVDRSAAYAMRWVAKNIVAAGLAERIEVQVAYAIGKAAPVGLFVETFGTEAVDPAKIEKAIGEVFDLRPGAIIRDLHLLRPIYAQTAAYGHFGRTDVELPWEQLNKVDDLKRAI

SEQ ID NO: 63719 - protein, 339 aa, Mycobacterium leprae
MNVQTVDSLDAAMRLAVEQSYLVKGATYPNPPVGAVIVDPDGRVVGVGATEPAGGDHAEVVALRSAGVTAAGAIAVVTLEPCNHYGKTPPCVNALLEAKVDKVAYAIADPNASAGGGAARLTAAGVHVQSGVLADLVTAGPLREWLHKQRTGLPHVTWKYASSIDGRSAAADGSSRWLSSEASRADLHRRRATADAIVVGTGTVLADNPTLTARLANGALADRQPLRVVVGMREIPLEANVLNDDSPTMVIRTHDPMEVLKALADRTDVLLEGGPTLAGAFLRAGTINRILAYVAPILLGGPVTAVDDVGVPNIARALRWQFDGIDRAGSDLVISLVTR

SEQ ID NO: 63720 - protein, 207 aa, Mycobacterium leprae
MFTGIVEELGEVVGRDAHADAARLIIRGRTVTADAGHGDSIAVNGVCLTVVEVLPDGQFSADVMAETLHRSNLGELRVGNRVNLERAVAINSRLGGHIVQGHVDGTGEVVARTLSDHWEVVRIEVPPAVARYFVEKGSITVDGISLTVSGLGAEPRDWLEVSLIPTTRELTTLGRTPLGTQVNLEVDVIAKYVERLLQSVPTGDLTR

SEQ ID NO: 63721 - protein, 435 aa, Mycobacterium leprae
MGPFDSKVAKMTRLDSVERAVADIAAGKAVVVIDDEDRENEGDLIFAAEKATLEMVAFMVRYTSGYLCAPLDGAICDRLGLLPMFAVNQDKHGTAYTVTVDARNGVGTGISASDRATTMRLLADPASVADDFTRPGHVVPLRAKDGGVLRRPGHTEAAVDLARLAGLQPAGAICEIVSQKDEGSMAQTDELRVFADEHDLALITIADLIAWRRKHEKHIERVAEARIPTRHGEFRAIGYTSIYDDVKHVALVRGEIAGSSGDGDDILVRVHSECLTGDVFGSRRCDCGTQLDAAMAMVAREGRGVVLYMRGHEGRGIGLMHKLQAYQLQDAGADTVDANIKLGFPSDARDYGIGAQILVDLGVRSMRLLTNNPAKRVGLDGYGLQIIERVPLPVRANADNIRYLMTKRDKMGHDLGGLDDFHESNYFPGEFGGAL

SEQ ID NO: 63722 - protein, 160 aa, Mycobacterium leprae
MSGGAGIPEVPGIDASGLRLGIVASTWHSRICDALLAGARKVAADSGIDGPTVVRVLGAIEIPVVVQELARHHDAVVALGVVIRGDTPHFDYVCNSVTQGLTRIALDTSTPVGNGVLTTNTEKQALDRAGLPTSAEDKGAQAAAAALTTALTLLNLRSRI

SEQ ID NO: 63723 - protein, 298 aa, Mycobacterium leprae
MSGNNHPGDASAEIDVVLVTGLSGAGRGTAAKVLEDLGWYVADNLPPQLITWMVDFGLAAGSRITQLAVVMDVRSRGFTGDLDSVRRELATRNIIPRVVFMEASDDMLVRRYEQNRRSHPLQGEQTLAEGIAAERRMLAPVRATADLIIDTSALSVPGLRESIERAFGGDASATTSVTVESFGFKYGLPMDADIVMDVRFLPNPHWVDELRSLTGQHSAVRDYVLGQPGAAEFLRTYRRLLSLVVDGYRREGKRYMTVAIGCTGGKHRSVAIAEALMGLLQSDLQLSVRVLHRDLGRE

SEQ ID NO: 63724 - protein, 359 aa, Mycobacterium leprae
MISPGSPPSIVALGGGHGLYVTLSAARRLTPYVTAIVTVADDGGSSGRLRSELGVVPPGDLRMALAALASDSPYGRLWATILQHRFGGSGALAGHPIGNLMLAGLSEVLADPVAALDEVGRILGVKGRVLPMCPIALQIEADVSGLEADPRIFRLIRGQVAIASTPGKVRRVRLLPVDPPATRQAVDAIMAANLVVLGPGSWFTSVIPHVLVPGLVTALRATTARRALVLNLAAGPGETAGFSVERHLHVLAQHAPGFTVHDIIIDADRVPNNREREQLRRAATLLQAEVHFVDVARPGTSLHDPGKLATALDGVRVGNQDSSAPTVAATEQIRLDGKRPQTGVNGPVGKGPRGDDAWR

SEQ ID NO: 63725 - protein, 325 aa, Mycobacterium leprae
MTIEVKDELSRLAVKSISARRAEVTSLLRFAGGLHIVGGRVVIEAEVDLENIARRLRKDIFDLYGYNAVVHVLSASGIRKSVRYVLRVANDGEALARQTGLLDMRGRPVRGLPAQVVGGSLIDAEAVWRGAFLAHGSLTEPGRSSALEVSCPGLEAALALVGAARKLGVNAKAREVRGADRVVVRDGEAIGVLLTRMGAQDTRLVWEERRMRREVRATANRLANFDDANLRRSARAAIAAAARAERALEILGDTVPDHLASAGKLRVEYRQASLEELGRLADPPMTKDAVAGRIRRLLSMADRKAKVEGIPDTESAVTPDLLEDA

SEQ ID NO: 63726 - protein, 339 aa, Mycobacterium leprae
MTVRVGINGFGRIGRNFYRALLAQQEHGIADVQVVAINDITDNSTLAYLLKFDSILGRLPHDVSLEEEDTIVVGSEKIKALAVREGPAALPWHAFGVDVVVESTGLFTNAAKAKGHLEAGAKKVIVSAPATDPDITIVFGVNDDKYDGSQNIISNASCTTNCLAPLAKVLHDQFGIVKGLMTTVHAYTQDQNLQDGPHSDLRRARAAALNVVPTSTGAAKAIGLVMPELKGKLDGYALRVPIPTGSVTDLTADLSKCVSVNEINAVFQDAAEGRLKGILKYVDAPIVSSDIVTDPHSSIFDSGLTKVIASQAKVVSWYDNEWGYSNRLVDLVGLVGKSL

SEQ ID NO: 63727 - protein, 416 aa, Mycobacterium leprae
MRIPNLKDLLEEGVSGRCVLVRCDLNVPLGDDGAITDLGRVTASVPTLKALLEAGAKIVVAAHLGRPKNGPDPKLSLEPVAAALGEQLGQNVQLVCSTDRSPVGGDALACVERLTDGDLLLLQNIRFDPRETSKVDDERLALAKQLVELVGSAGAFVSDGFGVVHRRQASVYDVATLLPHYAGILVADEIRILEQLTSSAKRPYAVVLGGSKVSDKLGVIESLATKADSIVLGGGMCFTFLAAQGFSVGKSLLETEMIETCRSLLDTYADVLRLPMDIVVTEKFVADSPPQTVAADAIPDGLMGLDIGPESVKRFATLLSNASTIFWNGPMGVFEFPAYAAGTRGVAEAIVAVTGKGAFSVVGGGDSAAAMRALSLPEGSVSHLSTGGGASLEYLEGKTLPGIEVLGREQPRGGDS

SEQ ID NO: 63728 - protein, 247 aa, Mycobacterium leprae
MSASVEIFSDSKTMVGAAGKRLASTIQSAVAARERALIVLTGGSSGIGLLRDLATRGQQIDWSRVHLFWGDERYVPKDDDERNEKQARVALLDHIDIPPSQVHPMPAGDGEFGNDLEAAALAYEQLLAAYAAPGYPTPNFDVHLMGMGPEGHINSLFPNTVAVRETSRMVVGVRNSPKPPPERITLTLNAIQRSREVWLMVSGTAKADAVAAAMGGAPSASIPAAGAVGLETTLWLLDEEAAAKIPG

SEQ ID NO: 63729 - protein, 375 aa, Mycobacterium leprae
MTSKIQNPNLAALSAAGVSVWLDDLSRDRLQSGNLQKLIDTKSVVGVTTNPSIFQKAFANGHAYDAQIAELAKRGANVDVTVRTVTTDDVRHACDVLACEWEASHGKDGRVSIEVDPRLAHDTDKTIAQAVELWRIVDHPNLFIKIPATKAGLPAITAVLAEGISVNVTLIFSVQRHREVIDAYLAGIEKAAEAGRDLSKIVSVASFFVSRVDTEIDKRLEKLGSEQALALRGQAGVANARLAYAAYQKAFEGGQRYQTLMARGAQVQRPLWASTGVKNPDYADTLYVTELVAPNTVNTMPETTIDAVADHGVIRGDTISGTTLSSQKVFDSLVAVGVDLIDVFAVLEHEGVQKFVKSWNELLKETQEQLDSVAK

SEQ ID NO: 63730 - protein, 699 aa, Mycobacterium leprae
MTTLDQISTLTQPRHPDDWTEIDSAAVDTIRVLATDAVQKAGNGHPGTAMSLAPLAYTLFQRTLRHDPNDTAWLGRDRFVLSAGHSSLTLYIQLYLGGFGLELSDIESLRTWGSTTPGHPEFRHTKGVEITTGPLGQGLASAVGMAMASRYERGLFDPDAEPGASPFDHYIYVIASDGDIEEGVTSEASSLAAVQQLGNLIVFYDHNQISIEGDTKITLCEDTAARYRAYGWHVQEVEGGENVVGIEEAIANAKAATDRPSFISLRTIIGYPAPTLINTGKAHGAALGEDEVAATKRILGFDPDKTFAVREDVITHTRGLIARGKEAHERWQLEFEAWAQREPERKALLDRLLAQQLPDGWDADLPNWEPRSKELATRAASGAVLSAIGPKLPELWGGSADLAGSNNTTIKDVDSFGPPSISTDEYTAHWYGRTLHFGVREHAMGAILSGIVLHGPTRAYGGTFLQFSDYMRPSVRLASLMDIDTIYVWTHDSVGLGEDGPTHQPIEHLAALRAIPRLSVVRPADANETAYAWRTILARGANSGPVGLILTRQSVPVLEGTNTEGVARGGYVLGDGGSSEAKEPDVILIATGSEVQLAVAAQKLLADKDIIVRVVSMPCVEWFESQPYEYRDSVLPPSVSARVAVEAGVAQCWHKLVGDTGKIVSIEHYGESADYQTLFREYGFTPEAVVAAAEQVLDN

SEQ ID NO: 63731 - protein, 265 aa, Mycobacterium leprae
MTQNNTLRNSPLFPAGTFTPNPRPNAVTRMVAAQFMLELKLLLRNGEQLLLTMFIPITLLIGLTLLPLGSFGHHRATTFVPVIMALAVVSSAFTGQAIAVAFDRRYGALKRFGATPLPVWGIIAGKSLAVVTVVFLQAIILGAIGVMLGWRPALICLALGAAIIALGTAGLAALGLLLGGTLRAEIVLAVANLMWFVFAGLGALTVKMNMISAVVKWAARLTPSGALTEALSQAMTLSVDWFGVIILTAWGTLAALAALHWFRFT

SEQ ID NO: 63732 - protein, 260 aa, Mycobacterium leprae
MTTLIVKDLYVSVEHPNAAESECQIPILNGVDLTVKSGETHALMGPNGSGKSTLSYAIMGHPKYRVISGAITLDGADVLTMSVDERARAGLFLAMQYPVEVPGVSVSNFLRSAATVIRGEPPKLRHWVKEVKAAMGALEIDPVFAERSVNEGFSGGEKKRHEILQLELLKPKIAILDETDSGLDVDALRVVSDGVNRYADSEHGGILLITHYTRILRYIRPEFVHVFVGGRIVESGGSELADELEQNGYVRFSQPAATGV

SEQ ID NO: 63733 - protein, 165 aa, Mycobacterium leprae
MILRLEQIYQEVILDHYKHPQHRGLREPFCAQVYHVNPICGDEITLRVALSDNGASVADISYEGQGCSISQASISVLAQQVIGQSVPDALNIISAFTEMVSSRGTIEGDEDVLGDGVAFAGVAKYPARVKCALLGWMACKDALIHANSADKVLEEVMDEQNHRVG

SEQ ID NO: 63734 - protein, 86 aa, Mycobacterium leprae
MTNIKSQQKRNRTNERARLRNKSVKSSLRTAVRAFREAVHAGEKEKAAKLLVSTSRKLDKAASKGVIHKNQAANKKSALARTLNKL

SEQ ID NO: 63735 - protein, 257 aa, Mycobacterium leprae
MVSTLFYVDALPDTGTVAVVGGDEGFHAVTVRRIRPGEELVLGDGVGGLAHCLVERAGRDGLYARVLGHWTVAPGLPPATVVQALPKAERSELAIEMATEAGADAFVAWQSDRCVASWYGVRVDKGLRRWRAVARAAARQSRRAHIPSVDGVLTTAALLQRIRDEVAAGATVLALHESATDRLSDVFADISVAQANSLVLLVGPEGGIAPDEIAALTEAGAVAVRLGPTVLRSSTAAAVALGALGVLTSRWDASSIL

SEQ ID NO: 63736 - protein, 302 aa, Mycobacterium leprae
MDMAEFRSGFVCLIGRPNTGKSTLTNALVGTKVAITSMKPQTTRHTIRGIVHREGNFQIVLVDTPGLHRPRTLLGKRLNDLVRDTYTEVDLIGLCIPADEATGPGDRWIVNQIRSVAPKTILVVIVTKIDKVPKDRLSAQLVAVSDLVADSAEIVPVSAVTGEQVDVLIDVLAAALPPGPAYYSAGELTDEPEELLMAELIREAVLEGVHDELPHSLAVVIDEVSPRAGRGDLIDVHAVLYVERPSQKGIVIGKSGARLREVGIAARRQIEKLLGTNIYLDLHVNVAKNWQRNPKQLGRLGF

SEQ ID NO: 63737 - protein, 296 aa, Mycobacterium leprae
MVRNERTLKSTDFPQLPPAPDDYPTFPDKSTWPVVFPMLPPSPDGGPRRPPQHTSKAVAPRLSAAQLPTHVAIVMDGNGRWANQRGLHRTEGHKMGEAVVIDVACGAIELGIKWLSLYAFSTENWKRSVEEVRFLMGFNRDVVRRRRENLKEMGVRIRWVGSRPRLWRSVINELAIAEHMTAGNDVITINYCVNYGGRTEIAEATREIARLAAAGRLNPERITESTITRHLQRPDIPDVDLFVRTSGEQRSSNFMLWQAAYTEYIFQDKLWPDYDRRDLWAACEEYASRNRRFGSA

SEQ ID NO: 63738 - protein, 340 aa, Mycobacterium leprae
MNRRILTLLVALVPILVFGVLLAVVTVPFVSLGPGPTFDTLGEVDGKQVVAIKGAHTHPTSGHLNMTTVSQRDDLTLGEALTLWLSGQEQLVPRDLIYPPGKSREDVDKVNYADFKQSEDSAAYAALGYLQYPSAVTVAKVTDPGQSVGKLKSGDAVDAVNGSPVANVEQFTGLLKKTKPGEVVTIDFRRKNEPPGVVQITLGANKDRDYGFLGVAVLDAPWAPFVVDFNLANVGGPSAGLMFSLAVVDKLTTGDLVGSTFVAGTGTISIDGKVGPIGGIAHKMAAARAAGATVFLVPAKNCYEARSDNRTGLRLVKVESLSQAVDALHAMTSGGQLPSC

SEQ ID NO: 63739 - protein, 374 aa, Mycobacterium leprae
MEPDRQTDIAALDSTLTTVERVLDVEGLRTRIEKLEHEASDPKLWDDQVRAQRVTSELSHAQGELRRIEELRRRLDDLPVLYELAAEERAAAAASGMEAFAEADAELKALRVDIEATEVRTLLSGEYDEREALITIRSGAGGVDAADWAEMLMRMYIRWAEQHKYGVEVLDTSYAEEAGVKSATFAVHAPFAYGTLASEQGTHRLVRISPFDNQSRRQTSFAEVEVLPVVEITDHIDIPEGDVRVDVYRSSGPGGQSVNTTDSAVRLTHVPTGLVVTCQNEKSQLQNKVSAMRVLQAKLLERKRLEERAELDALKGRGGSSWGNQIRSYVLHPYQMVKDLRNEYEVGNPTAVLDGDIDGFLEAGIRWRNRRDIS

SEQ ID NO: 63740 - protein, 160 aa, Mycobacterium leprae
MARNPRGGKQIVATNRKARHDYAIIELFEAGVALLGTEVKSLREGHASLADAFATVDSGEVWLRNMHIPEYQHGSWTNHDPRRNRKLLLHRRQIDTLVGKIRDGNLALVPLSLYFAEGKVKVELALARGKKLHDKRQDMARRDAQREVIRELGRRAKGML

SEQ ID NO: 63741 - protein, 343 aa, Mycobacterium leprae
MSTATGFSRIFSGVQPTSDSLHLGNALGAITQWVALQYDHPDEYEAFFCVVDLHAITIAQDPETLWRRTLVTAAQYLALGIDPGRAVVFVQSHVPAHTQLAWVLGCFTGFGQASRMTQFKDKALRQGADSTTVGLFTYPVLQAADVLAYDTDLVPVGEDQRQHLELARDLAQRFNSRFPDTFVVPDMFIPKMAAKIYDLADPTSKMSKSASSDAGLINLLDDPALSVKKIRAAVTDSEREIRYDPEVKPGVSNLLNIQSAVTGVDVDTLVQRYVGHGYGDLKKDTAEAVVEFVSPIKDRVDELMADLTELEVVLAVGAQRAQDVAGKTMQRVYDRLGFLPQRG

SEQ ID NO: 63742 - protein, 584 aa, Mycobacterium leprae
MIQQHRYDVVIVGAGGAGMRAAVEAGPRVRTAVLTKLYPTRSHTGAAQGGMCAALANVEDDNWEWHAFDTVKGGDYLADQDAVEIMCKEAIDAVLDLEKMGMPFNRTPEGRIDQRRFGGHTRDHGKAPVRRACYAADRTGHMILQTLYQNCVKHDVEFFNEFYALDLVLTQTPSGPVTTGVVAYELATGDIHVFHTKAVVIATGGSGRMYKTTSNAHTLTGDGIGIVFRKGLPLEDMEFHQFHPTGLAGLGILISEAVRGEGGRLLNGENERFMEHYAPTIVDLAPRDIVARSMVLEVLEGRGAGPHKDYVYIDVRHLGEEVLESKLPDITEFSRTYLGVDPVHELVPVYPTCHYVMGGIPTTVTGQVLRDNTSTVPGLYAAGECACVSVHGANRLGTNSLLDINVFGRRSGIAAASYASANDFVDMPPNPAEMVISWVANILSEHGNERVADIRGALQQTMDNNAAVFRTEETLKQALTDIHSLKERYSRITVHDKGKSFNSDLLEAIELGFLLELAEVTVVGALNRKESRGGHAREDYPHRDDTNYMRHTMAYKQGTDLLSDIALDFKPVVQTRYEPQERKY

SEQ ID NO: 63743 - protein, 538 aa, Mycobacterium leprae
MKAAVTPEEWITHDPDPQTAAELAACDPDELAARFTRALRFGTSGLRGPVRGGPDAMNLAVVLRATWAVAQVLLQRAGSRPATVIVGRDSRHGSAAFVAATAEVLAAEGFSVLLLPNPAPTPVVAFAVRNTGAAAGIQITASHNPPTDNGYKVYFDGGIQIISPIDHQIENAMAAAPLADQITRKPVNPSENSASDLVDHYIQRAAAVRRSNGSVRVALTPMHGVGGAVAVETLRRTGFDDVHTVAAQFEPDPDFPTVAFPNPEEPGATDALLALAAHVGADVAIALDPDADRCAVGIPTNSGWRMLSGDETGWLLGDYILSQTDKPETAVVASTVVSSRMLPAIATHYNAVHVETLTGFKWLARADANLPGTLVYAYEEAIGHCVDPTAVRDKDGISAAVLVCDLVAALHKQGRSVPDMLDQLALRHGVHDVTAISRRIGPKQTGVDEAVDLIQRLRAAPPSQLAGFTATTTDITDALIFTGGDDDTWVRVVVRLSGTEPKLKCYLEVRCSVAGNLPSTRQRARVLRDELVTLVQQW

SEQ ID NO: 63744 - protein, 598 aa, Mycobacterium leprae
MASHASSRIAKVLVANRGEIAVRVIRAARDARLPSVAVYAEPDAEAPHVRLADEAFALGGHTSAESYLDFGKILDAAAKSGANAIHPGYGFLAENADFAQAVIDAGLIWIGPSPQSIRDLGDKVTARHIAARAQAPLVPGTPDPVKNADEVVAFAKEHGVPIAIKAAFGGGGKGMKVARTLEEISELYESAVREATVAFGRGECFVERYLDKPRHVEAQVIADQHGNIVVAGTRDCSLQRRFQKLVEEAPAPFLTDAQRKEIHESAKRICKEAHYYGAGTVEYLVGQDGLISFLEVNTRLQVEHPVTEETTGIDLVLQQFKIANGEKLELIKDPIPCGHAIEFRINGEDAGRNFLPSPGPVSKFHPPTGPGVRLDSGVETGSVIGGQFDSMLAKLIVHGATRQEALARARRALDEFEVEGLATVIPFHRAVVSDPALIGDNNSFSVHTRWIETEWNNTIEPFIDNQPLDEEDTRPQQTVIVEVDGRRLEVSLPADLALANPAGCNPAGVIRKKPKPRKRGGHTGAATSGDAVTAPMQGTVVKVAVAEGQTVMTGDLVVVLEAMKMENPVTAHKDGIITGLAVEAGTAITQGTVLAEIK

SEQ ID NO: 63745 - protein, 213 aa, Mycobacterium leprae
MTRLVLGSASAGRLKVLRQAGIDPLVAASGVDEDLVTAGLGSDTSPRDVVSTLARAKATQVAAALSHAVADDCVVISCDSQLSIDGRLYGKPQSVANARQQWQSMAGRAGQLYTGHCVIRLLNNETTYSVDETSMTTICFGNPSAEDLEAYLACGESLQVAGGFTLDGLGGWFIDAVYGDPSTVVGIGLPLTRSLLSRAGLSIAAMWAANPVI

SEQ ID NO: 63746 - protein, 549 aa, Mycobacterium leprae
MTSVTDHSAHSMERAAEHTINIHTTAGKLAELHKRTEEALHPVGAAAFEKVHAKGKFTARERIYALLDDDSFVELDALARHRSTNFGLGENRPVGDGVVTGYGTIDGRDVCIFSQDVTVFGGSLGEVYGEKIVKVQELAIKTGRPLIGINDGAGARIQEGVVSLGLYSRIFRNNILASGVIPQISLIMGAAAGGHVYSPALTDFVVMVDQTSQMFITGPDVIKTVTGEDVTMEELGGAHTHMAKSGTAHYVASGEQDAFDWVRDVLSYLPSNNFTDAPRYSKPVPHGSIEDNLTAKDLELDTLIPDSPNQPYDMHEVVTRLLDEEEFLEVQAGYATNIVVGLGRIDDRPVGIVANQPIQFAGCLDINASEKAARFVRVCDCFNIPIVMLVDVPGFLPGTEQEYDGIIRRGAKLLFAYGEATVPKITVITRKAYGGAYCVMGSKNMGCDVNLAWPTAQIAVMGASGAVGFVYRKELAQAAKNGANVDELRLQLQQEYEDTLVNPYIAAERGYVDAVIPPSHTRGYIATALHLLERKIAHLPPKKHGNIPL

SEQ ID NO: 63747 - protein, 489 aa, Mycobacterium leprae
MPVQRVVRAVVTALTLAIVLGTGITWTSFRSFEDGIFHMSAPSLGKGGNDGAIDILLVGLDSRTDAYGNPLSAEELATLRAGDEEATNTDTIILIRIPNNGKSATAISIPRDSYVQAPGLGKAKINGVYGQTREAKRASLVRTGDSAEDAAAQGTEAGREALIKTVADLTGVTVDHYAEIGLLGFALIVDALGGVDVCLKDAVFEPMSGADFPAGRQKLNGPQALSFVRQRHELPRGDLDRVVRQQAVMASLVHRVISGQTLSNPSTIKHLEQAIQRSVVISSGWNLMDFLKQLQSLADRKVAFATIPVLDETGWSDDGMQSVVRVDPHQVQNFVSGLLHNQAQDKTDELAYTPAKITANVANDTDINGLAAAVSDILTTKGFIAGSVANNQGSHVKSSQVRAAKSDDLGAQKVSKELGGLPIVVDGSIPAGSVLVILANDYTGPGSGLFGNGSIASDYASNPGASADPNIPVPSPILTAGSDQPECIN

SEQ ID NO: 63748 - protein, 457 aa, Mycobacterium leprae
MTSSDSHRSAPSPEHGTASTIEILPVAGLPEFRPGDDLSAALAAAAPWLRDGDVVVVTSKVVSKCEGRLVPAPEDTRGRNELRRKLINDETIRVLARKGRTLIIENGLGLVQAAAGVDGSNVGRGELALLPVNPDASAAVLRIGLRAMLGVNVAVVITDTMGRAWRNGQTDVAIGAAGLAVLHNYSGAVDRYGNELVVTEIAVADEVAAATDLVKGKLTAMPVAVVRGLSPTDDGSTAQHLLRNGPDDLFWLGTTEALELGRQQAQLLRRSVRQFSDEPIAAELIETAVAEALTAPAPHHTRPVRFVWLQTPAVRTRLLDRMADKWRLDLASDALPADAIAQRVARGQILYDAPEVIIPFMVPDGAHAYPDAARASAEHTMFIVAVGAAVQALLVALAVRGLGSCWIGSTIFADDLVRAELELPADWEPLGAIAIGYAHEPTDLREPVRVADLLLRK

SEQ ID NO: 63749 - protein, 410 aa, Mycobacterium leprae
MELLRGALRTYAWGSRTAIAEFTGRPVPAAHPEAELWFGAHPGDSVWLQAANGETSLLEALVADPEGQLGSVSRARFGDVLPFLVKVLAADEPLSLQAHPSTKQAVEGYLREERLGIPVSSPERNYRDTSHKPELLVALQSFEALAGFRQSSRTAELLTALAVSDLDPFIHLLSDQSDADGLRALFTTWITAPQTDIDMLVPAVLEGAIAYVSSGATEFLAEVKTVMELGERYPGDAGVLASLLLNRISLTPGEAIFLPAGNLHAYLRGVGVEVMANSDNVLRGGLTPKHVDVPELLRVLDFNPTPEEALRPPTRCEGFAVVYETPTDEFEVALLALDGDYLGHEVDASPHDVSQGPQILLCTEGEITVHGKFQALTVERGMAVWMAADDGPIRLVAQQPAKLFRATVGL

SEQ ID NO: 63750 - protein, 210 aa, Mycobacterium leprae
MLIAIEGVDGAGKRTLSEELRQAFEATGKSVATLAFPRYRQSVAADIAAEALHGQHGDLASSVYAMALLFAFDRAGAVEDIEALDRNHDIVILDRYVASNAAYSAARLHEDCSGRAVAWVQRIEYQRLRLPSPDWQVLLAVSVELAGKRSRYRARTDPDRLRDSYERDDGLQQRTGAVYAGLAAADWGGRWLVVDADIDSGWLVATLMGC

SEQ ID NO: 63751 - protein, 228 aa, Mycobacterium leprae
MDIMRQRILVVDDDASLAEMLTIVLRGEGFDTAVIGDGTQALTAVRELRPDLVLLDLMLPGMNGIDVCRVLRADSGVPIVMLTAKTDTVDVVLGLESGADDYIMKPFKPKELVARVRARLRRNDDEPAEMLSIADVDIDVPAHKVTRNGEHISLTPLEFDLLVALARKPRQVFTRDVLLEQVWGYRHPADTRLVNVHVQRLRAKVEKDPENPTVVLTVRGVGYKAGPP

SEQ ID NO: 63752 - protein, 940 aa, Mycobacterium leprae
MLSKLLRLGEGRIVKRLKRVAEYVNTLSDNVEKLTDVELKAKTDEFKQRLADEKNPESLDDLLPEAFAVAREAAWRVLDQRPFDVQVMGGAALHLGNVAEMKTGEGKTLTCVLPAYLNALAGKGVHIVTVNDYLAKRDSEWMGRVHRFLGLQVGVILASMTPDERRVAYNADITYGTNNEFGFDYLRDNMAHSLDDLVQRGHSYAIVDEVDSILIDEARTPLIISGSADGASNWYTEFARLVRLMDKDVHYEVDLRKRTVGVHEKGMEFVEDQLGIDNLYEVANSPLVSYLNNALKAKELFNRDKDYIVRDGEVLIVDEFTGRVLIGRRYNEGMHQAIEAKEHVEIKAENQTLATITLQNYFRLYDKLAGMTGTAQTEAAELHEIYKLGVVAIPTNKPMIREDRSDLIYKTEEAKYMAVVDDVAERYEKGQPVLIGTTSVERSEYLSRQFTKRHIPHNVLNAKYHEQEAGIVAVAGRRGGVTVATNMAGRGTDIVLGGNVDFLTDQRLRRRGLDPVETPDEYEQAWHSELPKVKEEAGQEAAEVIEAGGLYVLGTERHESRRIDNQLRGRSGRQGDPGESRFYLSLGDELMRRFHGATLEALLTRLNLPDDVPIEAKMVTRAIKSAQTQVEQQNFEVRKNVLKYDEVMNQQRKVIYAERRRILEGESLQQQALGMVRDVITAYIDGATTDSYVEDWDLDALWSALGTLYPVGIKHESLTHADEDSECDELSRDELLEALLIDAQHAYAAREAELAELAGEGAMRQLERNVLLNVVDRKWREHLYEMDYLKEGIGLRAMAQRDPLVEYQREGYDMFMAMLDGVKEESVGFLFNLAVEAVPASHVAPVEIPEGFTGLVADVEAIRPREEASSALRTKDIDNESTGLTYSGPSEDGSTQVQLNSGGGQKTPAGIPVGASRRERREAARRRGRGAKPSRSVKKR

SEQ ID NO: 63753 - protein, 385 aa, Mycobacterium leprae
MEISGALLSQVGALLTTLAVLGAGARRYSLSPIPVYLMAGLSLGKGGIMPVSAADEFITTGAPIGIVLLLLTLGLEFSATEFASSLRRHLPSAGVDIILNATPGAVAGWLLGLDGVAVLALAGVTYISSSGVIARLLADLRRLGNRETPAVLSVLVLEDFAMAAYLPLFAVLAAGGSWLDAVVGMIVAVCALFAAFAASYHWGHHVGRLVAHPDSEQLLLRVLGVTLIVAAVAESLHASAAVGAFLVGLTLTGDTAERARKVLGPLRDLFAAIFFLAIGISVDPHKLLPMFPTALILATVTAVTKVATGILAARYDGVARRGQLRAGTALVARGEFSLIIIGLVGTSTPAVAALATAYVFIMAIAGPVLARYTPGSLPTSSGSAN

SEQ ID NO: 63754 - protein, 500 aa, Mycobacterium leprae
MSTLGDLLAEHTVLPGNAVGHLHAVVGEWQLLADLSFADYLMWVSRDDGVLVCVAQCRPHTAPTVLQTDAVGSVASADMLPLVTEMFTSGAVQHEDAAGQQYSWLPFGRNVAASPVRYGDQVVAVLTQHQVELAARRRPGNLEIAYLACATDLLHMLAEGTFPDVGDVAVSHSTPRAGDGFIRLDRNGVVAFASPNALSAFHRMGLTAELQGRNLVKVTRPLLSDPFEAQEVAKHVQDLLDGGPSMRVEVNAGGATVLLRTLPLVVHGSSVGAAVLVRDVTEVKRRDRALISKDATIREIHHRVKNNLQTVAALLRLQARRMANAEGREALIESVRRVSSIALVHDALSMSVDEQVNLDEVIDRILPIMNDVASVDRPIRINRVGNLGMLDSDRATALIMVITELVQNAIEHAFDPASQEGFVAISAERSARWLDVVVHDDGRGLPQGFNLERSDSLGLQIVRTLVSSELDGSLGMRKAPNRGTDVVLRVPIGRRARLLL

SEQ ID NO: 63755 - protein, 544 aa, Mycobacterium leprae
MNRDSKTPTQNRFSHRKAFHPHMTAPTSTAEPAFAKLGVRDEIVRALAERGIQQPFAIQELTLPLALAGDDVIGQARTGMGKTFAFGVPLLQRISVTTTARPLSGAPRGLVVVPTRELCLQVADDLATVAKYLTADDDNRRFSVVSIYGGRAYEPQIEALQTGADVVVSTPGRLLDLCQQGHLQLSGLSVLVLDEADEMLDLGFFPDIERLLGQIPTDRQSMLFSATMPDPIITLARTFMDQPIHIRAEAPHSLAVHDTTQQFVYRAHALDKVELISRILQARGRGATMIFTRTKRTAQKVTNELNERGFAVGAVHGDLGQIARENALEAFRTGNVDVLVATDVAARGIDIDDVTHVINYQCPEDEKMYVHRIGRTGRAGRTGVAVTLVDWDELHRWETIDKALGLGTPDPAETYSNSPHLYTELAIPAEASGTVGTPRKAQVKRRKTDRDGDKSGTSAQAAKAARTSNSVQRHRIRGGQPVTGHPTNNPSADSLATNGKVVAETLPNSSSGSPSTNVRRRRHRRKPTEVAENGLDKNLAVQAN

SEQ ID NO: 63756 - protein, 395 aa, Mycobacterium leprae
MSTSSTSLPPLVEPAGQLSRDEVIRYSRHLIIPDIGVDGQMRLKSARVLVIGAGGLGAPVLLYLAAAGVGTIGIIDFDVVDESNLQRQIIHGVADVGRSKAQSARDSIVAINPLVQVRLHEFRLESSNVVNLFKQYDLIVDGTDNFATRYLINDAAVLAKKPYVWGSLYRFEGQVSVFWEDAPDGLGLNYRDLYLEPPPPGMVPSCAEGGVLGIVCASIASVMGTEAIKLITGIGAPLLGRLMIYNALEMSYRRIRIHKDPSRPKITELTDYQQFCGVVSDDAAQVATGSIVTPRELRELLDSGKKLALIDVREPVEWDIVHIDGAQLIPRSLINSGEGLAKLPQDRMSVLYCKTGVRSAETLATVKKAGFSDAVHLQGGIVAWAKQVQPDMVIY

SEQ ID NO: 63757 - protein, 140 aa, Mycobacterium leprae
MVTSPSTSTTVDLPSTTTDLSSGLVEGHEHGADGISRLADYPAPPPRETLDAAGELLRALAAPVRIAIVLQLRESQRCVHELVDALGIPQPLVSQHLKILKGAGIVAGERSGREMLYRLADYHLTHIVVDAVAHAGVDAL

SEQ ID NO: 63758 - protein, 463 aa, Mycobacterium leprae
MPCLVASVIDTVVNLAKRRGFVYPAGEIYGGTKSAWDYGPLGVEFKENIKRQWWRSVVTGREDVVGIDSSIILPRQVWVASGHLEIFHDPLVESLITHKRYRADHLIEAYEAKHGQSPCNGLADIRDPDTGEPGQWTEPREFNLMLKTYLGPIETEEGLHYLRPETAQGIFINFANVVTTARRKPPFGIGQIGKSFRNEITPGNFIFRTREFEQMEMEFFVEPSTARDWHQYWIDTRMQWYVELGIDPQNLRLFEHPKDKLSHYSDRTVDIEYKFGFVGNPWGELEGVANRTDFDLSTHARYSGVDLSFYDQVNDTRYTPYVIEPAAGLTRSFMAFLIDAYTEDEAPNTRGGMDKRALLRLDPRLAPIKAAVLPLFRHVDLSPKARDLAAELRKCWNSEFDDAGAIGRRYRRQDEVGTPFCVTVDFESLDDNAVTVRERDAMTQERVAMTNVADYLAVRLKGS

SEQ ID NO: 63759 - protein, 429 aa, Mycobacterium leprae [sequence omitted]

SEQ ID NO: 63760 - protein, 642 aa, Mycobacterium leprae
MVGRIPDRDIAAIRERVCIEEVVGDYVQLRRAGADSLKGLCPFHNEKSPSFHVRPNHGHFHCFGCSEGGDVYAFIQKIEHVSFVEAVEMLADRIGHTINYFGTATSVQRDRGSRSRLIAANAAAAAFYAAALESDEAAPARQYLMERNFDANAARHFGCGFAPSGWDSLTKYLISKGFEFTELEAAGLSRQGRRGPMDRFHRRLLWPILTLAGEVIGFGARRLFDDDPMEAKYVNTPETLLYKKSSVMFGIDLAKRDIVKGHQAVVVEGYTDVMAMHLAGVTTAVASCGTAFGDEHLAMLRRLIMDDNWYRGELIFVFDGDAAGQAAALKAFDGDQQVAGKSFVAVAADGMDPCDLRLSSGDQALRDLVACRKPMFEFAIRSLIPDGMVLDDDPQAKVDALRRSVPLVARIRDYALRDEYARRLAGWTGWSDEGQVLARVREEANRRSVPERTRRRSVSVEQSPFMQPPGAPADQLAARPDPRDPTLWPQREALKSVLQYPVLAGPVFDTLTVESFTHPGYGAVRAAIDAAGGASAGITGAQWIDVVRQQTTSALIAGLINELGVESIQVDDEKLPRYIDGVLARLQEVWMGRQIAEVKSKLQRMSPIDQGDEYHELFGDLVAMEAYRRSLLEQASGDDMTA

SEQ ID NO: 63761 - protein, 227 aa, Mycobacterium leprae
MFAAIRRDIQAARQRDPAQPTVLEVICCYPGVHAVWGHRISHWLWNRRARLAARAFAELTRILTGVDIHPGAVLGAGLFIDHATGVVIGETAEVGDDVTIFHGVTLGGTGRETGKRHPTIGDRVTIGAGAKVLGAIKIGEDSRIGANAVVVKEVPASAVAVGVPGQIISSDSPANGDDSVLPDFVGVSLQSLLTRVAKLEAEDGGSQTYRVIRLPEAGVWHGEDFSI

SEQ ID NO: 63762 - protein, 310 aa, Mycobacterium leprae
MSIAEDVTQLVGNTPLVRLRRVTEGALADVVAKLESFNPANSVKDRIGVAMIDTAEEAGLIKPDTVILEPTSGNTGIALAMVCAARGYHCVLTMPETMSIERRMLLRAYGAELILTPGADGMSGAIAKAEELAKSDKRYFIPQQFENPANPAIHAATTAEEVWRDTDGKVDIFVSGIGTGGTITGVARIIKERRPATQFVAVEPAASPVLSGGQKGPHPIQGIGAGFVPSVLVLDLVDEIVTVGNEEALDLARRLAKEEGLLVGISAGAAVCAALHVARRPENTGKLIVVVLPDFGERYLSTMLFADLAN

SEQ ID NO: 63763 - protein, 517 aa, Mycobacterium leprae
MDQLVLLQAEESLYGPGRRSKTVPIDHRHSLKSSFFRLRLRRACRISHWDPEDQAAWEAGNKTIARLNLLWSVLTVHLGYSVWTLWPVMELFMPKDVYGFSAGDKFLLATTATLVGACLRVPYSLATALFGGRNWAIFSVMVLLIPTIATMVLLAHPGLPLWPYLACAALTGLGGGNFAASMTNANAFYPHRLKGAAFGLAGGAGNLGVSVIQVVGMLVIASVGDRKPYIVCGLYVVLLIIAGIGAMLFMNDIEHHRIGVNTIRPVLFVVVSTRDSWVLALLYLASFGSFIGFSFAFGQVLETNFVAGGQSTAQAALHAAELAFIGPTLAAVARFWGGRLADRLGGSRVTLVVFGAMVFAAGLLGVLGIIEGSRVCPIRGVMMASYFAGFITLFILSGLGNGSVYKMIPTIFEACSHSLGINDDECRDWSRVISGVVIGFVAEVGALGGVGIDLALRESYLNTGGVTAAFWIFMLCYAAAGVLTWKMYVCRPLPGNLHDEAANAFAASVGASRTHRG

SEQ ID NO: 63764 - protein, 283 aa, Mycobacterium leprae
MTSLSMSEHHVPRRRSRPVVLLVPVPGTSTIHDLWAGTKLLVVFGVEVLLTFYPGWVTIGLVAALVCGAAWIARIPRDVLPSMPRWLWIVVVLGGFTAALAGGSPVVSMGGVDIGLGGVLNFLRITAWSVVLLGLGAMVSWTTNVAEIGPAMATLGRPLRIFRIPVDEWAVAVALALRAFPMLINEFQVLYAARRLRPKQILNSRKARRQRQARELIDLLAAAITVTLRRADEMGDAITARGGIGQLSAYPARPKLADWVTLAITITTSSTAVVLETILHTAS

SEQ ID NO: 63765 - protein, 331 aa, Mycobacterium leprae
MGSRRLAIVQRWRGQDEIPTDWGRCVLTIGVFDGVHRGHTELIAHTVQTGRARNVPTVLMTFDPHPMEVVYPGSHPAQLTTLTRRAELIEELGIDVFLVMPFTTDFMKLTPDRYVHELLVEHLHVVEVVVGENFTFGKKAAGNVIMLRRAGQRFGFAVGSMSLLSEHRGNETVAFSSTYIRSCVDAGDMMAATEALGRPHRVEGMVVRGQGRGTELGFPTANVASPMYSATPADGVYAAWFTVLGHGPVTGTVVPGECYQAAVSVGTNPTFSGRTRTVEAFVLDAVADLYGQHVALDFVGRIRGQRKFDSVADLVAEMEKDIDRARALLAD

SEQ ID NO: 63766 - protein, 89 aa, Mycobacterium leprae
MALTSEQKKEILSSYGLHATDTGSPEAQIALLTKRIADLTEHLKVHKHDHHSRRGLLLLVGRRRRLIKYLSLIDVQRYRSLIERLGLRR

SEQ ID NO: 63767 - protein, 773 aa, Mycobacterium leprae
MSVAEIEEGVFEATVTIDNGSFGTRAIRFETGRLALQAAGAVVAYLDADNMLLSATTASKNPKEQFDFFPLTVDVEERMYAAGRIPGSFFRREGRPSTDAILTCRLIDRPLRPSFVDGLRNEIQVVVTILSVDPNDLYDVLAINAASASTQLGGLPFSGPIGGVRVALIDGTWVAFPTVEQLERAVFDMVIAGRIVGTDDEGKPDVAIMMVEAEATENVIELVECGAQAPTESIVAQGLEVAKPFIAALCTAQQELADVVSSRQAKPPVEYPTFPDYGDDVYYSVASMATDELAAALTIGAKLERDQRTNEIKTQVLERLAGTYEGREKELGAAFRSLTKKLVRQRILTNHFRIDGRGITDIRALSAEVAVVPRAHGSALFERGETQILGVTTLDMVKMAQQIDSLGPETSKRYMHHYNFPPFSTGETGRVGSPKRREIGHGALAERALVPVLPSVEEFPYAIRQVSEALGSNGSTSMGSVCASTLALLNAGVPLKAPVAGIAMGLVSDDVEFDGGTERRFVTLTDILGAEDAFGDMDFKCAGTKDFVTALQLDTKLDGIPSQVLAGALAQAKDARLTILEVMAEAIDRPDEMSPYAPRVITIKVPVDKIGEVIGPKGKVINAITEETGAQISIEDDGTVFVGATDGLSAQAAINKINAIANPQLPTVGERFLGTVVKITEFGAFVSLLPGRDGLVHISKLGKGKRIAKVEDVVNVGDKLRVEIADIEKRGKISLVLVADDDSATVPAAPADAGAAQEFGSGTAPADAATASS

SEQ ID NO: 63768 - protein, 424 aa, Mycobacterium leprae
MCRTTLPGGLRVVTEHLPAVRSASVGVWVGVGSRDEGATVAGAAHFLEHLLFKSTSTRTAMDIAQAIDAVGGELNAFTAKEHTCYYAHVLDSDLELAVDLVADVVLNGRCAVDDVELERDVVLEEIAMRDDDPEDALGDMFLAALFGDHPVGRPVIGTMESVSAMTRTQLHSFHVRRYTPERMVVAVAGNVDHDEMVALVREHFGSRLIRGRQSAPPRKSTGRINGGPALTLGKRDAEQTHVLLGVRTPGRSWEHRWALSVLHTALGGGLSSRLFQEIRETRGLAYSVYSALDIFADSGALSVYAACLPGRFADVMQVISEVLASVAGDGITEAECRIAKGSLRGGIILGLEDSNSWMSRLGRSELNYGKYRGIEHTLQQIDEVTVEQVNALAHQLLNKRYGAAVLGPYASKKTLPRQLRIMVN

SEQ ID NO: 63769 - protein, 314 aa, Mycobacterium leprae
MTVAPEDCRLLRLEVRNAQTPIERKPPWIKTRARMGPEYTALKNLVRRVALHTVCEEAGCPNIFECWEDREATFLIGGDQCTRRCDFCQIDTGKPAALDRDEPRRVAESVQTMGLRYTTVTGVARDDLPDGGAWLYATTVRAIKELNPSTGVELLIPDFNGQPARLAEVFDSRPQVLAHNVETVPRIFKRIRPAFTYQRSLDVLTAAREAGLVTKSNLILGLGETADEVRTALADLRKTGCDIVTITQYLRPSMRHHPVERWVRPEEFVEYTQYAEGLGFSGVLGGPLVRSSYRAGRLYEQAAGTRTVGTSVSR

SEQ ID NO: 63770 - protein, 307 aa, Mycobacterium leprae
MAQASRKAVVAIAGSSGMIGSALAAALRANDHLVLRIVRRTPANAEELHWNPESGEFDTDAITDVDAVVNLCGVNLGQRRWSGSFKQNLRDSRITPTEVLSAAVAEAGVKTFINASAVGYYGNTRDRVVDENDRAGTGFLAQLCQDWEGATLPAQYAGTRVILARTGMVLAQEAGVLSRMRPLFSFALGARIGNGRQYMSWISLEDEVRALLFAISHQSLSGPLNLTGPAPVTNAEFTTAFGRAINRPTPLMLPSFAVRAALGEFADEGLLIGQRAIPAALERAGFQFHHNTIGEALSYATTRPSQN

SEQ ID NO: 63771 - protein, 530 aa, Mycobacterium leprae
MACSVQMPALGESVTEGTVTRWLKQEGDTVELDEPLVEVSTDKVDTEIPSPAAGVLTKIIAQEDDTVEVGGELAVIGAPSEAAAAAPAPRPEPKAQPEPAASSQPAAPAQQPSGAATATPVLMPELGESVTEGTVTRWLKKIGDSVQADEPLVEVSTDKVDTEIPSPVAGVLVSITTNEDTTVPVGGELARIGVTLDSIATPAPAPRAESVPSRPTPARKEANGAPYVTPLVRKLATENNIDLAKVIGTGVGGRIRKQDVLAAAEQRKQQQAPTSAPSAAAPTPTPVLAHLRGTTQKVSRIRQITAKKTRESLQATAQLTQTHEVDMAKIVGLRAKAKAAFAEREGVNLTFLPFIAKAAIDALKIHPNINASYNEDTKEITYYDAEHLGFAIDTDKGLLSPVIHYAGDLSLAGLARAIVDIAARARSGNLKPEELSGGTFTITNIGSQGALFDTPILVPPQAAMLGIGAIVKRPRVVIDASGNESIGVRAICYLPLTYDHRLIDGADAGRFLTTIKHRLEEGAFEADLGL

SEQ ID NO: 63772 - protein, 524 aa, Mycobacterium leprae
MPVTTDPGYQGPSVHVAASLPKHDVSSSVLIVPVVSASDSDESEDRPGAVVAAAEPFLTAAAVAEIEAGLRALEATGGSDQVHRLVAPSLPVGSVLTVSLGKPRSEWPADTIRRAAGVAARSLGRAEVVITTLAELPGESGASICSAVVEGLMLGSYRFTDFRSRKTAPKDNGLRKITVLANAKDAKKQSAHGATVASAVATARDLVNTPPSHLFPAEFAKCAKTLGESAGLEVEVLDDKALQKAGYGGVIGVGQGSSRTPRLVRLIHQGSRLAKNPKNARKVALVGKGITFDTGGISIKPAASMHHMTSDMAGAAAVIATITLAAQLKLPIDVVATVPMAENMPSGTAQRPGDVLTQYGGITVEVLNTDAEGRLILADAIVRACQDNPDYLIETSTLTGAQTVALGSRIPGVMGSDKFRDRVAKTSQQVGENGWPMPLPDELKDDLKSTVADLANVSGQRFAGMLVAGAFLREFVADGVDWAHIDIAGPAYNTDSPWGYTPKGATGVPTRTMFAMLEDIANHG

SEQ ID NO: 63773 - protein, 367 aa, Mycobacterium leprae
MTDAPELLKGPLEDRHRELGANFAEFGGWLMPVSYAGTVSEHSATRNAVGLFDVSHLGKALVRGPGAAQFVNSVLTNDLGRIRPGKAQYTLCCSESGGVIDDLIAYYVDDDEIFLVSNAANTAAVVDALQAVVPAGLTIINQHRSHAVLAVQGPRSTDVLGELGLPTGIDYMGYVDASYAGVPVRVCRTGYTGEQGYELLPPWESADVVFDALVAAVVDARGEPAGLGARDTLRTEMGYPLYGHELSLDISPLQARCGWAIGWKKDAFLGRDALLAEKAAGPRRLLRGLRMAGRGVLRPGLTVCAGDIPIGVTTSGTFSPTLQVGVALALIDSEAAVQDGQQIIVDVRGRAVECEVVRPPFIEVKTR

SEQ ID NO: 63774 - protein, 368 aa, Mycobacterium leprae
MTSGFLEFTVSLSAHPVTDAERESILAEPGFGKYHTDHMVSIDYIDGRGWHDARVIPYGPIQLDPSAIVLHYAQEVFEGLKAYRWADGSIVSFRPDANAARLRSSARRIAIPELPDELFIDSLCQLIAVDNAWVPRVGGEEALYLRPFIFATEPGLGVRPAKQYRYLLIASPVGAYFKGGINPVTVWVSMEYVRASPGGTGAAKFGGNYAASLLAQTEAAANGCDQVVWLDAVERRFVEEMGGMNIFFVLGSGGSARLVTPELSGSLLPGVTRASLLQLAIDAGFSVEERKIDIDEWQKKAAAGEITEVFACGTAAFITPVSRVKYGDTEFTIAGGAPGEVTMALRDTLTGIQRGTFADTHGWMARLG

SEQ ID NO: 63775 - protein, 324 aa, Mycobacterium leprae
MTIAVTGSIATDHLMRFPGRFSEQLLVDNLHKVSLSFLVDDLVIHRGGVAGNMAYAIGVLGGDVALIGAVGDDFADYRDWLQNHGVNCDSVLISKTAHTARFVCTTDLDMAQIGSFYTGAMSEARNIKLVDAIATIGTPELVIIGANDPAAMLGYTQECRKLGLAFAADPSQQLARLSGEEIRNLIDGATYLFTNDYEWDLLLSKTGWSEADVMAQIQLRVTTLGAKGVDLVEPDGTRVHVSVVPEAGQVDPTGVGDAFRAGFLTGRSAGLSLERSAQLGSLVAVLVLESTGTQQWGWDRDVAVARLAGAYGEEAAAEITVVLS

SEQ ID NO: 63776 - protein, 677 aa, Mycobacterium leprae
MDDRRLRTLPNEAYWIAVCGLLAFVVASARADSRGSGGTNNILQADHSMARAVHLMRHRGPDELSTWSDPDIDGFSGGVAFGFNRLSIIDIAHSHQPLRWGPPETPNRYILVFNGEIYNYLELRDELVIRHGAAFATDGDGESIVAGFHYWGTEILTRLRGMFAFALWDTIAHELFCARDPFGIKPLFMATGTNGTAVASEKKCLLELAEVIRFDTQIDTRALQHYTVLQYVPEPETLHRGVHRLESGCYARIRPEQLDPATTRYFVPQFAATPITSSTEQTRYGEITAVLADSVAKHMRADVTVGSFLSGGIDSTAIAALAIRHNPRLITFTTGFEHEGFSEIDVAAASAEAIGARHIVKVVTPNEFVAALPEIVWYLDEPIADPALVPLFFVAREARKHVKVVLSGEGADELFGGYRIYREPLSLKPFDYLPGPLRRSMGKVSKSLPEGMRGKNLLHRGSLTLEERYYGNARNFSEAQLQAVLPRFHTGWTHTDVTAAVYAESVGWDPVARMQHIDLFTWLRGDILAKADKMTMANSLELRVPFLDPEVFAVASRLPMQAKITRTTTKYALRRALESIVPAHVLHRPKLGFPVPIRHWLRAGELLEWAYALVNSSQAEHLVNLAAVHRMLDEHRGGISDHSRRLWTVLIFMLWHAIFIEHSVVPQISEPQYPVQP

SEQ ID NO: 63777 - protein, 353 aa, Mycobacterium leprae
MTARELVCSQRVGQGLSRRLRPLVLAVTLGVLVVTLSGCSWSDALAIGWPEGITPEAHLNRQLWIGAVVASLVVGVIVWGLIFWSTIFHRKKTTDTELPRQFGYNMPLELVLTVTPFLIISMLFYFTVIVQDKMLYLAKDPEVVIDVTAFQWNWKFGYQRVDFKDGTLTYDGVDPARKKAMVSKPEGKDSHGEELVGAVRGLNTEDRAYLNFDKVETLGTTTEIPVLVLPAGKRIEFQLNSADVVHSFWVPKFLFKRDVMPNPVANNSVNVFQVEEITKTGAFVGHCAEMCGTYHSMMNFEVRVVAPNDFKAYLQQRIDGKTNAEALQVIAQPPLAVTTHPFDTRRGQLTNSQ

SEQ ID NO: 63778 - protein, 366 aa, Mycobacterium leprae
MVLSSQPPSSRSATGSVLSWPQVLGRLTAGQDLTRGQAAWAMGQVMTGNARPAQIAAFAVAMKMKVPTAAEVSELADVMLSHARKLPTEAICQDIGETVDIAGTGGDGANTVNLSTMAAIVVAAAGVPVVKHGNRASSSLSGGADTLEALGVRIDLGPEQVANSLAEIGIGFCFAPLFQPSYRYASAVRHEIGVPTVFNILGPLTNPAWPRAGLIGCAFGNLAEVMAGVFAARRSSVLVVHGDDGLDELTTTTTSTIWRVQAGTVDKLTFDPVEFGFARAHLDDLLGGDAQTNAAKVRAVLAGAKGPVRDAVVLNAAGAIVAYAGLSSHAEWSPAWDDGLARASAAIDSGAAEQLLARWVRFSQQV

SEQ ID NO: 63779 - protein, 384 aa, Mycobacterium leprae
MSRVLLVTNDFPPRRGGIQSYLGEFVDRLINIGSHDVMVYAPQWTGADTFDNAAHDGGYQVVRHPGTLMLPGPAVDARMRRLIVDHGIDTVWFGSAAPLALLAPCARKAGATRVLASTHGHEVGWSMLPVARSVLRRIGDVTDVVTFVSRYTRSRVTAAFGPRAALEYLPPGVDADRFRPDPASRAELRNRYRLGERPTVVCLARLVPRKGQDMLIRALPSIRQRADGAALMIVGGGPYLGTLRKLAQGCGVADHVIFAGGVAAVEVPAHYTLADVFAMPCRTRGGGMDVEGLGIVFLEASATGVPVIAGKSGGAPEAVQHNKTGLVVDGRSVNMVADAVTELLTDRDRAAAMGAAGRHWVTAEWRWDTLAARLADLLCGNDSR

SEQ ID NO: 63780 - protein, 143 aa, Mycobacterium leprae
MFLGTHTPKLDDKGRLTLPAKFRDALVGGLMVTKSQDHSLAVYPRAEFEQLARRASKMSRSNPEARAFLRNLAAGTDEQHPDMQGRITLSADHRRYANLSKDCVVIGAVDYLEIWDAQAWHDYQQTHEENFSAASDEALGDII

SEQ ID NO: 63781 - protein, 372 aa, Mycobacterium leprae
MPSDRDHDAGIFAFFGAVPRSDRCRQTRGGGEVVDGSSVFGHVPVFAQRCVTLLAPALTRHHADGSNAILVDATLGVGGHAERFLTEFPGLRLIGLDRDPSALDIARTRLMRFADRVTLIHTRYDNLAVALNKFGYAAVESVDGVLFDLGVSSMQLDCAERGFSYAQDVPLDMRMDPWSPVSAADIVNNYDEAALADILRRYGEERFARRIAAHIVRRRAHTPFTSTAELVALLYQAIPAPARRIGGHPAKRTFQALRIAVNDELNSLSNVLPAALDALTVAGRLVVLAYQSLEDRIVKRVFADAVSSRTPAGLPIELPGHGPRFRLLTRGAEHADAAEIECNPRSAAVRLRALQRTQHGVEPQQPTRRGDS

SEQ ID NO: 63782 - protein, 675 aa, Mycobacterium leprae
MRRGDAHRPCSSRSAQLGNSSSTPPVRQPKRLRQPEKARKAKDTKKSRSAVAADAVTEGRSARKRRTRQVVEIGTYGPSFIFRHRGGNVVIFALMLVAATQLFNLQVSNAAGLRAQAAGQLRVTDVEKAVRGSITDRNNEQLAFTIESRALTFQPKKIRQQLEEAKQKTPSAPDPQQRLQDIAKEVAGRLSNKPDGPSLLKKLQSNDSFVYLARAVDPAVAEAISAKYPEVGSERQDLRQYPGGSLAANIVGGIDWDGHGLLGLEDSLDSVLSGTDGSVTYDRGSDGVVIPGSYRNRHRAVNGSTVQLTIDDDIQFYVQQQVQQAKNLSGAHNVSAVVLDAKTGEVLAMANDNTFDPSQDIGRQGGKQLGNLAVSSPFEPGSVNKVITASAVIEYGLSTPDEVLQVPGSIQMGGVSVHDAWEHGVMPYTTTGVFGKSSNVGTLMLAQRVGPERFYDMVRKFGLGQLTGVGLPGESEGLVPSVDQWSGSTFSNLPIGQGLSTTLLQMTGMYQVIANDGVRIPPRIIKATNAADGTRTQEPRPDGIRVVSPQTAQTVRQMLRAVVQKDPMGYQQGTGPAAGVSGYQIAGKTGTAQQVNPACRCYFDDVYWITFAGMATVDNPRYVIGTMMDNPERNADGTPGHSAAPLFHNVAGWLMQRENVPLSPDPGPPLTLQAT

SEQ ID NO: 63783 - protein, 530 aa, Mycobacterium leprae
MTEVVAVPVRLRPSATAGVRLPELVAQVGAVLADGPGQAATVPDIPVTGVTLRAQEVLSGDLFAALAGASTHGARYAGVALERGAVAVLTDVAGVAELTAQASSVPILIHPEPRSVLGGLAAAAYGHPSNRMTVVGITGTSGKTTTTYMVEAGLRAGGRVVGLVGTIGIRIDGADIPSFLTTPEAPALQAMLAAMVERGVETVVMEVSSHALSLGRVEGTQFAVAGFTNLSRDHLDFHPDMEEYFEAKAVLFDPHSLLRARTVVVCIDDDAGRATAARAGDAITVSALGQPASWRATDIRSPGVGAQEFTAVDPAGVQHRVGIRLPGRYNVANCLVALAILDVVGVSPEQASLGFRDIRIPGRLERIDCGQDFLALVDYAHKPGALHSVLTALLQPDHRLAVVFGAGGERDPGKRAPMGEIAAELADLVVVTDDNPRGEDPAAIRRDILTGTVAAGGAAQVVEIGDRRAAIQYAVAWAGPDDVVLVAGKGHETGQRGAAETCPFDDRVELARALQVRDARLLPAPGRACQ

SEQ ID NO: 63784 - protein, 517 aa, Mycobacterium leprae
MIDLTVARVTEIVGGALVDISPEEAAERRVTGSVEFDSRAVGPGGLFLALPGARSDGHDHAASAIAAGAVAVLAARPVGVPAIVVAPDPRTGDGGLTGVLEHDADGSGAAVLAALAKLAKAVAAELVAGGLTIIGITGSSGKTSTKDLVAVVLELLGEVVAPPESFNNELGHPWTVLRATRSTDYLILEMSARRPGNIAALAAIAPPKIGVVLNVGTAHLGEFGSREAIARTKTELPQAIMQSGVVILNVDDPAVAAMADATVARVIRVSRGSYSHPGSPNSPDVWTGPVSLDELARPRFTLHTRDPRAGATEIQLGVYGDHQVANALCAAAVGLECGASVEEVAVALAATGPVSRHRMQVTTRADGVTVIDDTYNANPDSMRAGLQALAWIAHGGTHDKNQPGSCARRSWAVLGEMAELGEDSITEHDRIGRLAVRLDVSRLVVVGGGRSINAMHRGAVMEGSWGLETVNVADPAAALTLLRAEVRPGDVVLIKASHSVGLGALADVLVGDGAIRP

SEQ ID NO: 63785 - protein, 359 aa, Mycobacterium leprae
MRQILVAVTVALVVSILLTPALIRLFTRHGFGQEIREDGPPSHHNKRGTPSMGGVAIVAGIWAGYLGTHLAGLAFDGEGVSASGVLVLGLATALGGVGFLDDLIKIRRSRNLGLNKTAKTVGQITAAVLFGVLVLQFRNGAGLTPASADLSYVREIATVTLAPALFVLFCMVIVSAWSNAVNFTDGLDGLAAGSMAMVTAAYVLITFWQYRNACVTAPGLGCYNVRDPLDLTLIAAATVGACIGFLWWNAAPAKIFMGDTGSLALGGVIAGLSVTSRTEILAVVLGSLFVAEITSVVLQILAFRTTGRRVFRMAPFHHHFELAGWAETTVIIRFWLLTAIACGLGVVLFYGEWLATIGA

SEQ ID NO: 63786 - protein, 490 aa, Mycobacterium leprae
MLDTLVPGAPVLVAGGGVTGRAVLAALTRFGMAATLCDDDPAALQQYADNGVATVSAATATQQMFERGRKYVLVVTSPGFAPTTPVLVAASAARVPIWGDVELAWRLDAAGYYGPPRRWLVVTGTNGKTTTTSMLHAMLAADNRRSLLCGNIGRPVLDVLTEFAEPSDFLAVELSSFQLHWAPSLRPEAGVVLNIAEDHLDWHSTMADYTMAKARVLTGRVAVVGLDDSRAAALLSTTVAPVRVGFRFGEPAVGELGVRDGYLVDRAFAEDLALMPVTSIPVSGPVGVLDALAAAALARSVGVGATAIADAVALFRLGRHRAEVVAVADGIRYVDDSKATNPHAALVSVLAYPRVVWVAGGLLKGASVDAEVARMAPQLVGAVLIGRDRAMVAEALSRHAPNVPVVQVVAGEDAGMHAVAVVSGTDVISISDVGGTIGTRVMVAAVAAARDLAQPGDTVLLAPAGASFDQFSGYADRGDTFATAVRAAIR

SEQ ID NO: 63787 - protein, 534 aa, Mycobacterium leprae
MGNALGRDRGRGTGDNNSVQAATTVEAVEPGTATTGEVSEAEAKRAGSLRAGVRGPQTRFDAWLGRPMASFHLIIAVAGLLTALGLIMVLSASGVRSYGDDGSAWIIFGKQVLWTIIGLIGGYSSLWMSIRFIRRIAFFSYVITIILLVLVLIPGIGNLANGSRKWFVIAGFSMQPSELAKIAFVIWGAHLLAARRMERASLREMLIPLVPAAVIALGLIVAQPDLGQTVSLGIILLALLWYAGLPLRVFITSLLAVFIAGAILAMSAGYRSERVRSWMNPEADPQDTGYQARQAKFALAHGGIFGDGLGQGVAKWNYLPNAHNDFIFAIIGEELGLVGALGLLGLFGLFAYTGMRIARRSADPFLRLLTATTTMWVLGQAFINIGYVIGVLPVTGLQLPFISAGGTSAAAILFMIGIMANAARHEPEAVAALRAGRDDKVNQLLRLPLPVPYLPPRVETFRDRKQVRPQPGKASVGRKPARKAPREPDRPLRPAFPRVADRLEHRSGQYRAGQLRAGQRYTPRVRVFEGQRYG

SEQ ID NO: 63788 - protein, 407 aa, Mycobacterium leprae
MNNSVREPTRGRRGSPPVADAALSVNPPLSVVLAGGGTAGHVEPAMAVADALRALDPQVRITALGTSRGLETRLVPERGYHLELITPVPLPRKLTGDLARLPLRVWRAVRETRAVFEVVEAHVVVGFGGYVALPAYLAARGIPRVRRRIPVVVHEANARAGIANRVGVRTAERVLSAVPGSGLRGAEVVGVPIHATITTLNRPALRADARKHFGFTDDARVLLVFGGSQGAVSLNRAVAGAAEDLAASGVAVLHAYGLKNTLELRTPEYGEPPYVAVPYLDRMDLAYAAADLVICRSGAMTVAEVSAVGLPAIYVPFPIGNGEQRLNALPVVNAGGGLVVADADLTPGLVARQVVRLFSDPAQLAAMTAAAARVGHRDAAHHVAKVALDLARAERDTASGRSAGGKP

SEQ ID NO: 63789 - protein, 495 aa, Mycobacterium leprae
MNAGQLPPELQRVHMVGIGGSGMSGIARILLDRGGLVSGSDAKESRVVHALRARGALIRIGHDASLLDLLPGGATAVITIRTAIPKTNPELVEARRRGIPVLLRSAVLARLMDGCTTLMVAGTHGKTTTTSMLVVALQHCGCDPSFVVGGELAVVGTNAHHGLGACFVAEADESDGSLLEYTPNVAVVTNIDSDHLDFYGSVDAYIRVFDSFVERFALGGALVVCNDDPGAAALARRTAELGIRVLRYGSDDRIGETLAARLLSWEQQGTGAVAHIQLAGQPNSRVMRLPVPGRHMALNALGALLAAIEIGASTDEVLDGLAGFRGVRRRFELVGTSGVGQASNSLVRVFDDYAHHPTEISATLAAFRIMLEQSGGGRCIVVFQPHLYSRTKALSREFGRALSAADEVFIVGVNGAREQPLAGVSGASVAKHVSVPVRYIPDYSAVVIEVAAAAGPGDVIVTMGIGDVGLLGPEIVAALRVRANCNTPGCSGVLQ

SEQ ID NO: 63790 - protein, 341 aa, Mycobacterium leprae
MTETDEGAPVNHSATMWAVVGVPPVCGGQPGDSGVVAGTSRALVDAAIIAPVTTLTRDEPAQYDRYEFEGPRRRARRERAERRAAQACAIAIEEARREAKHRIHRQMSSEANSPKPVARGVVRGLKTLFATVMFSIAGFGLGLALYVTPAMSVRNIVVTGIETVTREEVLDAAGVQLGTPLLQINTNQVADQVAAIRRVASARAQRQYPSALRITIVERVPVVVKDFPDGPHLFDCDGVDFATAPPPPALPYIDVGHPGPIDPATKAALVVLLALRPEVVSQVARIAAPSVSSITLILTDGRAVIWGSTDRAEEKAEKLAALLTQPGRTYDVSSPDLPTVK

SEQ ID NO: 63791 - protein, 379 aa, Mycobacterium leprae
MTPPHNYLAVIKVVGIGGGGVNAVNRMIEQGLKGVEFMAINTDAQALLMSDADVKLDVGRDSTRGLGAGADPEVGRKAAEDAKDEIEELLRGADMVFVTAGEGGGTGTGGAPVIASIARKLGALTVGVVTRPFSFEGKRRSNQAENGIAALRESCDTLIVIPNDRLLQMGDTAVSLMDAFRSADEVLLNGVQGITDLITTPGLINVDFADVKGIMSGAGTALMGIGSARGDGRSLKAAEIAINSPLLEASMEGAQGVLMSIAGGSDLGLFEINEAASLVQDAAHPDANIIFGTVIDDSLGDEVRVTVIAAGFEANGPGRTPVMGSTGGAHRIESAKAGALTSTLFEPVDAASAPLHTNGAALSIGGDDDDVDVPPFMRR

SEQ ID NO: 63792 - protein, 260 aa, Mycobacterium leprae
MTAMAADIDLQGDRESELMHALATVRSRLAAASQAAGRNVGEIELLPISKFFPATDVAILSRLGCRSVGESRAQEASTKAAEFAELLGVSREEKSSIHWHMVGQIQRNKVRSLAQWAHTAHSIDSLQLVAALDRAVAAALAGGRREQPLQVYVQISLDGDISRGGVNVTAPGAVDRVCAQVEESKSLELVGLMGIPPLGWNPDQAFEQLRLEHRRVLRSHPDAIGLSAGMSNDFEIAVKHGSTCVRVGTALLGPSRLRSP

SEQ ID NO: 63793 - protein, 210 aa, Mycobacterium leprae
MSTLHKVKAYFGMAPMEDYDDEYYDDRSPTHGYGRSRFEEGYGRYEGRDYSDLRGDPTGYLPLGYRGGYGDEHRFRPREFDRPDLSRPRLGSWLRNSTRGALAMDPRRMAMLFDEGSPLSKITTLRPKDYSEARTIGERFRDGTPVIIDLVSMDNADAKRLVDFAAGLAFALRGSFDKVATKVFLLSPADVDVSPEERRRIAETGFYAYQ

SEQ ID NO: 63794 - protein, 601 aa, Mycobacterium leprae
MPGQSHKEPHRRATSTPRSLKQATSELRWALSLAAPESPAFMRHLLGNAHDKVDITTSSEHVAAFTEHAIVLLNGNAHQTRELLGGKGYNINAMRRHQLAVPPAFCITTEVGVRYLAAPTPTMEAIWNDVLDQMRWLEAETSRTFGWGPRPLLVSIRSGAVQSMPGMMDTILNLGINDPVEQALAAASPSPIPQTFARDTRLRFIRTYRRIVDPLNPPPANTYDQLRAAIESIFSSWNSPRAVAYRTHYGLDDQSGTAVIVQAMVFGNQGAYSGAGTLFSRNPITRESKLFGEWLPGGQGDDVVSGLVEVQPITSLRDEQPTVYDELVDTAGRLERLGSDVQEIEFTTEDSKLWLLQTRVAERSAQVAVRLALQLWQEGLIDDAEALRRVTPVHVETVLLPVLQPENHLSATLLAKGTPTCPGVISGKAYTEVDEALDAAESAEQVILVRDHTRPDDVLGMLASQGVVTEVGGAASHAAVVSRELSRVAVVGCGQGTAVSLAGKQITVDGDKGEVRQGNLTLSAWSENETPELRELADIARRISPLRVHMTEDHTRLDDSSDTAVRLAINTGHADVVSATPLIVMMTTLRLQDSKDSSAKS

SEQ ID NO: 63795 - protein, 886 aa, Mycobacterium leprae
MIRVIRSSFYPRMLTIDLDAWEETKKQSIASVACSADDIIAIRLVAMASKTVARSGNRTSSLKATSRGVSQSRRPVPPRPRRNRPAERRNQSLLLAAGLTCGQAIRATWLVAAKGAGGAARSIGRARDIEPGHRRDGIALALLGLAVVVAASSWFDAARPIGAWVDAVLRTFIGSAVVVLPLVIAAVAVVLMRTQPNLDTRPRLILGATLIALSFLGLRHLWSGSPETPEVRRGAAGFLGFAIGGPLSDGLTAWIAAPLLFIGALFGLLLLTGTTVREVPEVLRGMFDTGLFQRDYDDQYDAEYRYDDIPGAPPEDFSGCYDGSLVGGGDAEQKVRGWPVTDLAEVSLQDDVPTTPEPAVQAGTAEVHRLTPRSAEEHRTQALDRAIEGSYTLPSMSLLLTGDPPKKCSAANNHMASAIGGVLTQFKVDAAVTGCTRGPTVTRYEVELGPGVKVEKITALQKNIAYAVATESVRMLAPIPGKSAVGIEVPNTDREAVRLADVLTAPSTRRDHHSLVIGLGKDIEGNFISANLAKMPHLLVAGSTGSGKSSFVNSMLVSLLTRSTPEEVRMILIDPKMVELTPYEGIPHLITPIITQPKKAAAALVWLVEEMEQRYQDMQASRVRHIDVFNEKVRSGEITAPLGSQRVYRPYPYILAIVDELADLMMTAPRDVEDAIVRITQKARAAGIHLVLATQRPSVDVVTGLIKTNVPSRLAFATSSLTDSRVILDQAGAEKLIGMGDGLFLPMGASKPVRLQGAFITDEEIHAVVTACKDQAEPEYTEGVTTAKTTGERTDVDPDIGDDMDVFLQAVELVVSSQFGSTSMLQRKLRVGFAKAGRLMDLMETRSIVGPSEGSKAREVLVKADELAATLALIRGGASADGSNED

SEQ ID NO: 63796 - protein, 193 aa, Mycobacterium leprae
MVDCVRIANLANILTGLRLMLVPVFLVALFAGNGHEIVGRIAAFVIFTVACITDRLDGLLARRYGMATEFGAFVDPIADKTLIGAALIGLSMLGDLPWWVTVLIMTRELGVTLLRLAVIHRGVIPASWGGKLKTVVQAVAIGLFLLPLTQLSVPFHVGAAVVMAVAVVLTVVTGVDYVAGTIRAVRGVHQTAS

SEQ ID NO: 63797 - protein, 711 aa, Mycobacterium leprae
MAQVPDREKALELAMAQIEKNYGKGSVMRLGDEMCQPISVIPTGSIALDVALGIGGLPRGRIVEIYGPESSGKTTVALHAVANAQAVGGVAAFIDAEHALEPEYAKKLGVDTDSLLVSQPDTGEQALEIADMLIRSGALDIVVIDSVAALVPRAELEGEMGDSYVGLQARLMSQALRKMTGALSNSGTTAIFINQLREKIGVMFGCMNYSTRVTLADGSTEKIGKIVNNKMDVRVLSYDPVTDRIVPRKVVNWFNNGPAEQFLQFTVEKSGSNGKSQFAATPNHLIRTPGGWTEAGNLIAGDRVLAVEPHMLSDQQFQVVLGSLMGDGNLSPNLCDRNGVRFRLLGYGCKQVEYLQWKKALMGNIRHTVRENSMGASFIDFTPLPELVELQRAVYLGDGKKFLSEEYLKALTPLVLAIWYMDDGSFTVGSKRVQERTAGGSGRIEICVDAMTEGTRVRLRDYLCDTHGLDVRLREVGSAGKAVLVFSTAATAKFQSLIAPYVAPSMEYKLLPQFRGRGSVTPQFVEPTQQLVPARVLDVHVKLSTRSMNRFDIEVEGNHNYFVDGVMVHNSPETTTGGKALKFYASVRMDVRRIETLKDGVDAVGNRTRVKIVKNKVSPPFKQAEFDILYGKGISREGSLIDMGVEQGFVRKSGSWFTYEGEQLGQGKENARNFLLENADVANEIEKKIKEKLGIGAVVTDDDILPTPVDF

SEQ ID NO: 63798 - protein, 574 aa, Mycobacterium leprae
MEQSRRVPPLQWLSAVARPIARVLTLISTPTFDIADTFGYACPNPPEVSPTEGVYVVATKTSPATGQPVKRTATKTPATPAKRSTTKAANGSAPTKRATSTASRATKSTTPPKASGASDAAKKARTSVKSVDTKAPSAQDHTTKASAAKDTLNDPEATLNTLDSDATADDLDAEPDLDVEPSEDIDIDIEAADLGLDDLEDDDVVTDIEPGETEDGEATAATKTDEASTDDDEEIVEPTEKDKASGDFVWDEDESEALRQARKDAELTASADSVRAYLKQIGKVALLNAEEEVELAKRIEAGLYATQLMTELSERGTKLPTAQRRDMMWICRDGDRAKNHLLEANLRLVVSLAKRYTGRGMAFLDLIQEGNLGLIRAVEKFDYTKGYKFSTYATWWIRQAITRAMADQARTIRIPVHMVEVINKLGRIQRELLQDLGREPTPEELAKEMDITPEKVLEIQQYAREPISLDQTIGDEGDSQLGDFIEDSEAVVAVDAVSFTLLQDQLQSVLETLSEREAGVVRLRFGLTDGQPRTLDEIGQVYGVTRERIRQIESKTMSKLRHPSRSQVLRDYLD

SEQ ID NO: 63799 - protein, 324 aa, Mycobacterium leprae
MIRLRSAAARDRCQVLSLAYRITVAGRCQTVSPHHRQAKVSEQPSLAKEIAITSTDATADTPRTSPPSDTAGTTSRHRGFGIDIGGSSIKGGIVDLDIGQLIGDRIKLLTPQPATPLAVAKTIAEVVNAFGWTAPLGVTYPGVVTQGVVRTAANVDDSWIGTNARDIISAELNSQEVTILNDADAAGLAEGRYGAGKNNSGLIVLLTFGTGIGSAVIHNGKLIPNTEFGHLEVDGKEAEQRAASSVKDKYKWSYRTWAKQVTRVLVAIENAMCPDLFIAGGGISRKADRWIPLLENRTPMVAAALQNTAGIVGAAMASTADVTH

SEQ ID NO: 63800 - protein, 187 aa, Mycobacterium leprae
MRSDRGKPNAWAICVFCAAGPMHPELLELAAELGEAIAERGWTLVWGGGRVSAMGAVASAAWTRGGRIVGVIPEMLQRREIADTYVGELIVTETMAERKQVLDDHADAFIVLPGGLGTLDELFEAWTAGYLGMHRKPIVMLDPWGHYEGLWAWLHGLIDSGYVSPVAMERLVVVDQVDAALEACMSV

SEQ ID NO: 63801 - protein, 533 aa, Mycobacterium leprae
MNTRVDTDNAVIRYRRRNRPCLERSEEDNVTSDQGTNNDQNPGHHLATRPVARPPVDAASREAFGRPCGFSGSFVAEYVRPQKYRDRSEFRPDDQPADPVLAEAFSRPFGSVDSLQRHPIDAGALAAEKDATQLDEPDDPWRDPAAAATLASPAVASPVPHTELGQCGKLGVRDVLFGGRVSYLALVILVFIALALGAIGGVIGRKTAEIVDAFTTSKVTLATTNNTEEPAGRFAKVAAAVADSVVTIESKSDQEEMQGSGVIIDGRGYIVTNNHVISEAANKPSQFKTTVVFNDGKDVPANLVGRDPKTDLAVLKVDNVDNLTVARLGDSGKVRVGDEVIAAGAPLGLRSTVTHGIVSALHRPVPLSGEGSDTDTVIDAIQTDASINHGNSGGPLIDMDSQVIGINTAGKSLSDSASGLSFAIPVDEMKSVVQTLIKDGKIVHPTLGVSTRSVSNAIASGAQVANVKAGSPAQKGGILENDVIVKVGNRKVADADEFIVAVRQLTIGQDASVEVVRDGRHVTLTVKSDPDSS

SEQ ID NO: 63802 - protein, 277 aa, Mycobacterium leprae
MEGFAGKVAVVTGAGSGIGQALAIELARSGAKLAISDVDGEGLAQTEGQLKAIGASARTDRLDVTEREAFLTYADVVHENFGKVNQIYNNAGIAFTGDVEVSHFKDIERVMDVDYWGVVNGTKAFLPYLISSGDGHVINISSVFGLFSVPGQAAYNSAKFAVRGFTEALREEMALAGRPVNVTTVYPGGIKTAIARNATAAEGLDVSKIASRFDTWVAHTSPQHAARIILKAVRKKKARVLVGPDAKVANVVVRFSGGAGYQRLFAQVASRLILNQR

SEQ ID NO: 63803 - protein, 1260 aa, Mycobacterium leprae
MQKVASVAQCACRTEELRRTAAVANISSPFGQNEWLVEEMYRKFRDDPSSVDPSWHEFLVDYNPESTAEPVLTDPTSTDKQPSATPQAKPAAAADPVASRAKPATTPTVANGTAAGSAAAPAKTTTTPPIEGDELQVLRGAAAVVVKNMSASLDVPTATSVRAVPAKLMIDNRTVINNQLKRNRGGKISFTHLLGYALVQAVKKFPNINRHYAEIDGKPIAVTPAHTNLGLAIDLQGKDGKRSLVVAGIKRCEELRFAQFVTAYEDIVRRARDGKLTAEDFAGVTISLTNPGTIGTVHSVPRLMTGQGAIIGVGAMEYPAEFQGASAERIAELGIGKLITLTSTYDHRIIQGAESGDFLRTIHEMVLSDSFWDEIFRELSIPYLPVRWRTDNPDSIVDKNARVMELIAAYRNRGHLMADIDPLRLDNTRFRSHPDLDLLTHGLTLWDLDRVFKVNGFGGWKYKKLRDVLGLLRDAYCRHIGVEYTHILDPEQQEWLQQRVETKNVKPTVAEQKYILSKLNAAEAFETFLHTKYVGQKRFSLEGAESVIPMMDAAIDQCAKHGLDEVVIGMPHRGRLNVLANIVGKPYSQIFTEFEGNLNPTLAHSSGDVKYHLGATGLYLQMFGDNDIQVSLTANPSHLEAVDPVLEGLVRAKQDLLNKDTNGNQDEAFSVVPMMLHGDAAFAGQGVVAETLNLANLPGYRVGGTIHIIVNNQIGFTTAPEYSRSSEYCTDVAKMIGAPIFHVNGDDPEACVWVAKLAVDFRQRFKKDVVIDMLCYRRRGHNEGDDPSMTNPYMYDVVDTKRGARKSYTEALIGRGDISLKEAEDALRDYQGQLERVFNEVRDLEKHGVQPSESVESDQMIPAGLSTAVDKALLARIGDAFLAVPEGFTVHPRVQPVLEKRREMAYEGKIDWAFAELLALGSLVAEGKLVRLSGQDTKRGTFSQRHSVIIDRHTGEEFTPLQLLANNPDGSPTGGKFLVYNSPLSEYAAVGFEYGYTVGNPDAVVLWEAQFGDFVNGAQSIIDEFINSGEAKWGQLSTVVLLLPHGHEGQGPDHTSGRIERFLQLWAEGSMTFAVPSTPSNYFHLLRRHALDGIKRPLIVFTPKSMLRNKAAVSDIKDFTEIKFRSVLEEPTYEDSIDDRSKVTRVLLTCGKLYYELAARKIKDNRDDVAIVRIEQLAPLPRRRLGETLDRYENAKEFFWVQEEPANQGAWPRFGLELPELLPRLTGIKRISRRAMSAPSSGSSKVHAVEQQEILDTAFG

SEQ ID NO: 63804 - protein, 383 aa, Mycobacterium leprae
MRFLHTADWQLGMTRHFLAGDAQPRYSAARRDAVAGLGALAAEVGAEFVVVAGDVFEHNQLAPQVVSQSLEAIRAIGIPVYLLPGNHDPLDASSVYTSALFTAECPDNINVLDRAGVHQVRPGLEIVAAPWRSKAPTTDLVAEMLGGLTADIVTRVLVAHGSIDVFDPDRDKPSLIRLAGIDDALAGGAVHYVALGDRHSLTQVGSSGRVWYSGSPEVTNFDDIESNSGHVLVVEIDENDPRRPVTVTARHVGHWRFFTLHWQVDNGRDIADLDMNLDQMMDKDRSVVRLALTGSLTITDRAVLDACLDRYARLFAWLGLWERRSDLAVIPADGEFTDIGIGGFAAAAVDELVATAREGDTESAIDAQAALALLLRLADRGVA

SEQ ID NO: 63805 - protein, 873 aa, Mycobacterium leprae
MKLHRLALTNYRGTARREIEFPDRGVILVCGANEIGKSSMIEALDLLLEFRDRSTKKEVKQVKPANADIGSEVCAEISSGTYRFVYRKRFNKKCETALTVLAPHREQLTGDEAHERVRAMLAETVDNDLWHAQRVLQAASTAAVDLSGCDALSRALDLAAGDHAELSGTEPLLIERIEAEYRRYFTSTGRPTGEWAVAISRLSDAETAVGECAAAVAEVDDRVRRHAVLTERVAGLAQQRFAAGPRLAVAQAAADKVAVLTRQAREAELVAAAATATNAAAVAAHTSRLRLLAEIDTRAVVLAATQDEAQEAVDAVSTMRADAEASDAAVEESTEALMAAQQRADIARSTVDQLVDRQEADRLSTRLAKIDAIQGERDLICAELSAVTLTEQLLQRIENAAAIVDRTGEQLKLISAAVEFTATADIEISVGQQRVSLEAGQSWSTTATGPTEVEVLGVLTACVIPGATALDAQSKYVAAQEELSVALADGGVVDLAAARCANQRRRELQSSLDQLSAALAGVCGDDQIDQLRARLEQLRDGYPGEPDLLAVDIGSARAELEAAETVRAAVDFEREVCRRTAAAANCRLVETSARANFLLKKAETQRAELDQDIDQLAQQRASVSDEDLASAAEAGLRAVQIAEQRVAKLTEELVAAEPEAVTAELVAATAAAESLRDQHEDAAGALREISIELSVFGTEGRQGKLDTAEAEREHAISQHTQIGRRARAAQLLRSVMARHRDTTRLRYVEPYRTELQRLGRPVFGPTFEVDIDSDLRIRSRTLDGITVPFESLSGGAKEQLGILARFAGATLVAKEDNVPVVVDDALGFTDPDRLAKMGEMFDTVGAHGQVIVLTCSPDRYDGFTGAHRIDLNV

SEQ ID NO: 63806 - protein, 557 aa, Mycobacterium leprae
MIMLSRIVAALLVVGLILTGCSASNRLVPSAASNAALGKTSDINPQDPATLKDGGNLRLALTDFPANFNILHIDGNNAEVTSMMKATMPRAFIIGTDGSTTVDTNYFTSIKLTSTSPQVVTYTINPKAVWSDGTPITWRDIDRQIHANSGKNKAFEIAGTNGCERVASIRPGANDRQAIVTFAQPYAEWRGMFAGNGMLLPATMTATPEAFNKGQLDRPGPSAGPFIVSSLDRTTQRIVLTHNPKWWGTPPRLDSITYLVLDDAARLPALQNNTIDATGVGTLDQLTTAQRTNGISIRRTPAPRWSHFTFNGAVGSILADQGLRLAVSKGIDRRTIAKVVQYGLANNPEPLNNHVYVDGQEGYQDNSGVVGYDPEQAQHELDALGWKLNGQFREKDGRQLVIRYLFYDAQGSREFAQLAQHSLAQIGVKLELQAKAGSGFFTNYVNVGAFDIVQFGWVGDAFPLSALTQIYQSDGESNFGKISSPAVDAAIERTLAELDPAKARALANEVDKLLWAEGFSLPLTQSPGDVAVRSTLANFGAAGFGDLNYTAIGFMQN

SEQ ID NO: 63807 - protein, 609 aa, Mycobacterium leprae
MSPLLEVTDLAVTFETNGEPVTAVRGISYRINAGEVVAMVGESGSGKSAAAMAVVGLLPEYAQVRGSVRLHNTELVGLADKTMSRFRGKAIGTVFQDPMSALTPVYTVGDQITEAIKVHQPRVGKKAAHRRAVELLELVGITQPDRRARAFPHELSGGERQRVVIATAIANDPDLLICDEPTTALDVTVQAQILEVLKTARDVTGAGVLIITHDLGVVTEFADQALVMYAGRVVESAQVSTLYRERQMPYTVGLLGSVPRLDATQGTRLVPIPGAPPSLAGLQQECPFAPRCPLVVDECRLREPELVEVRAGHRTACIRTDQVSGRSAADIYGINTDTRTSATSDSSVVVRVRDLVKTYRLTKGVGLRRAIGEIRAVNGVSFELQQGRTLGIVGESGSGKSTTLHEILRLAVPQSGSIEVLGIDVATLNRASRRSMRRNIQVVFQDPVASLDPRLPVFELIAEPLHANGFSKNYTQMRVAELLDIVGLRRDDATRYPTEFSGGQKQRIGIARALALQPKILAFDEPVSALDVSIQAGIINLLLDLQDRLGLSYLFVSHDLSVIKHLAHQVAVMLAGTIVEQGDSHDVFRNPQHDYTRRLLGAIPRPEVG

SEQ ID NO: 63808 - protein, 550 aa, Mycobacterium leprae
MTPADLAELLKTTAIVVLAERGLDAAALPQTVTVERPRNPEHGDYSSNLAMQLGKKVGANPLELAGWLAEVLAQAGGIADVEVAGPGFINMRLDASAQAMIVNTVINADKNFGHSDDLAGYQINLEFVSANPTGPIHIGGTRWAAVGDALGRLLSTQGAAVVREYYFNDHGAQIDRFTNSLIAAAKGELTPADGYAGTYVTDIAAQVMQQAPYALSLPESEMHETVREIGVDLMFTHIKKSLHEFGTDFDVYTHEDSMHASGRVDEAIARLRDTGNVYEKDGALWLRTSAFGDDKDRVVIKSDGKPAYIAGDLAYYLDKRQRGFDLCIYMLGADHHGYIARLKAAAAAFGDDPAIVEVLIGQMVNLVCDGQLVRMSKRSGNVITLDDLVEAIGVDAARYSLIRSSVDTPIDIDLALWSSSSNENPVYYVQYAHARLSALARNAAEFGLIPDTGHLELLSHDKEGALLRTVGEFPQVLKTAAALREPHRVCRYLEDLAGDYHRFYDSCRVLPQGDEKPTDLHTARLALCQANRQVIANGLAILGVSAPERM

SEQ ID NO: 63809 - protein, 315 aa, Mycobacterium leprae
MVTWMLPAGLVASAVVAASSANLGPGFDSIGLALSLCDEIVVETTDSGLVVVVDGEGADQVPMGPEHLVVRAVRRGLQAVGVSAAGLVVRCRNAIPHSRGLGSSAAAVVGGLAVVNGFVAQIDSTPLSNAQLIQLASEFEGHPDNAAAAVLGGAVVSWVDRSYDQPDYCAVPLRLHPDIHLFAAIPEERSSTAESRVLLPARVSHDDARFNVSRAALLVVALTERPDLLMAATEDVLHQPHRASAMSASAEYLRLLRRHNVAATLSGAGPSLIALSTQSELPREAAEYGAANGFIIIKMTAGDEVCWRPEVTVPG

SEQ ID NO: 63810 - protein, 610 aa, Mycobacterium leprae
MTETDLITVGENTDDTELTNAVTTDTPDVKATAATVSLGSLSTMVLPELRALANQAGVKGTSGMRKSELIAAIEECRGQANGTSVNDGPSRDHGGSATAISTEALAAQEEQNYAIVEVSRRERRGASREADVTAGTSTAEATESDCQGTADDDTRTLQGGQSDTKTEERGPDVGNDQGVEQQSSSLQPRGDDDGEGRQGRRGRRFRDRDRRRRGERSGDGAEAELRQDDVVQPVAGILDVLDNYAFVRTSGYLAGPHDVYVSMSMVRKNGLRRGDAVTGAVRVPREGEQGHQRQKFNPLVRLDSINGGSVEDAKKRPEFGKLTPLYPNQRLRLETTPDRLTTRVIDLIMPIGKGQRALIVSPPKAGKTTILQDIANAITRNNLECHLMVVLVDERPEEVTDMQRSVKGEVIASTFDRPPSDHTSVAELAIERAKRLVEQGKDVVVLLDSITRLGRAYNNASPASGRILSGGVDSTALYPPKRFLGAARNIEEGGSLTIIATAMVETGSTGDMVIFEEFKGTGNAELKLDRKIAERRVFPAVDVNPSGTRKDELLLSPDEFGIVHKLRRVLSGLDSHQAIDLLMSQLRKTKTNYEFLVQVSKTTPGSMDDD

SEQ ID NO: 63811 - protein, 84 aa, Mycobacterium leprae
MKANIHPAYAETTVVCGCGNTFQTRSTKPGGRIVVEVCSQCHPFYTGKQKILDSGGRVARFEKRYGKRKVGVDQVAAYPEQNNK

SEQ ID NO: 63812 - protein, 361 aa, Mycobacterium leprae
MAQPVQSIDVLLIEHAELELALADPELHSNPAEARKAGRRFARLAPIVATHRKLISARDDLQTARELAAGDESFADEIAELESRIAELTTQLTDMLAPHDPHGPDDIVLEVKSGEGGEESALFAADLARMYIRYAERHGWTVTVLDETTSDLGGYKDATLAISHKGASDGDAVDGVWSRMKFEGGVHRVQRVPVTESQGRVHTSAAGVLVYPEPEEIGEVHIDESDLRIDVYRSSGKGGQGVNTTDSAVRITHLPTGVVVTCQNERSQLQNKTRALQVLAARLQAMAEEQALANASADRASQIRTVDRSERIRTYNFPENRITDHRIGYKAHNLDQVLDGDLDALFDALSAADKQSRLQQV

SEQ ID NO: 63813 - protein, 288 aa, Mycobacterium leprae
MMIRLRRAIDSAVTQLEEAGIGSARCDAEQLAAHLAGTDRGRLALLDTPGEEFFRRYSDAVAARSRRVPLQHLIGTVSFGPVVLHVGPDVFIPRPETEAILAWVMAQRLPERPVIVDACTGSGALAVALAHHRPAARVIGIDDSDSALDYARRNAEGTAVECVRADVTTPALLPELDGCVDLFVANPPYVPDDPVVQSILEPEVTQYDPRHAVFGGPDGMALTADIVGLAGRWLRPGGLFAVEHDDSTSVPTLDLVYRTDLFDDVLTHRDLAGRPRFVTARRRESWSA

SEQ ID NO: 63814 - protein, 399 aa, Mycobacterium leprae
MVQYVREMSSDLATFASGLLALFERSAGVPLRELALVGLTAAIITYFATGLVGVLANRLEAVAYPRERDVHVTPTPRMGGLAMYLGVLAAVFLASQLPALTRGFVYSSGMPAVLVAGAVITGIGLIDDRWGLDALTKFAGQITAASVLVTMGVAWSVLYIPLGGVGTIVLDQTSSILLTLALTVSIVNAINFVDGLDGLAAGLGLITAMAICIFSVGLLRDHDGDVLFYPPAVISVVLAGSCLGFLPHNFHRAKIFMGDSGSMLVGLMLAAASTTAAGPISQNAYGTRDVFALLSPFLLVVAVMFVPMLDLLLAIVRRIRAGRSAFSPDKMHLHHRLLQIGHSHRRVVLLIYLWVGIVAFGAASTIFFNPRNTGAVMLGAIVITGMATVIPLLRRRDNY

SEQ ID NO: 63815 - protein, 251 aa, Mycobacterium leprae
MTETILSGGQIEVGEHHTTTWFGMTVNTDTVLSTAIAAAIVIALAFFLRTKVNSTGVPCGMQLFWEAITVQMRTQIESAIGMRIAPFVLPLAVTIFVFILISNWLSVLPLQYTNADGHTTEVLSSAAADINYVLALAFFVFVCYHLAGIWRRGIVGHPVAVLKGHVAFLAPINLVEEITKPISLSLRLFGNIFAGGILVTLIALFPPYIMWAPNAIWKSFDLFVGAIQAFIFSILTILYFSQAMEVEDHHD

SEQ ID NO: 63816 - protein, 81 aa, Mycobacterium leprae
MDPMIAQGALIGGGLIMAGGAIGAGIGDGMAGNALVSGIARQPEAQSRLFTPFFITVGLVEAAYFINLAFMALFVFATPVK

SEQ ID NO: 63817 - protein, 446 aa, Mycobacterium leprae
MSTFIGQLVGFAAIVYLVWWYVVPPVCRLMRARRDAVRQQLTEAAEAADRLVEASQAHTKATEDAKVEAQRVVKEAVEDAKRIVEQLQAQADVEAERIKLQGARQVELLRAQLTRQLRLKFGHESVRQAAELVRNHVADAVQQSATVDRFLDDLDAMTPKGADVEYPLLAKMRSASRRALVDLADRFGAIAKSLDNQALYTLAGELVSVAKMLDREIVVTRYLTVPVEDEAPRVKLIDRLVSAHVGDPTMEILRAAVSERWSANTDLVDALEHISRQALLEVAEREDQIDEVEDQVFRFSRILDVAPRLAILLDDYAVPADSRVRLLCNVLQSASSVVNPIAVALLSQTVELLRGQPAKEAILFLAEVAVARRGEVVAQVSAAAEISDAQRTRLTEVLSRIYGHPVTVQMQIDAALLGGLSIVVGDEVIDGTLSSCLVAAEAALPD

SEQ ID NO: 63818 - protein, 558 aa, Mycobacterium leprae
MAELTISADDIQNAIEEYVSSFTADTFREEVGTVVDVGDSIAHVEGLPSVMTQELLEFPGGILGVALNLDEHNVGAVILGDFENIKEGQKVKRTGDVLSVPVGEAFMGRVVNPLGQPIDGRGDIEAEARRALELQAPSVVQRQSVKEPLQTGIKAIDAMTPIGRGQRQLVIGDRKTGKTAVCVDTILNQRQNWESGDPKRQVRCVYVAIGQKGTTIASVRRALEEGGAMDYTTIVAALASDSAGFKWLAPYTGSAIAQHWMYDGKHVLIVFDDLTKQAEAYRAISLLLRRPPGREAYPGDVFYLHSRLLERCAKLADHLGGGSLTGLPIIETKANDISAYIPTNVISITDGQCFLETDLFNQGVRPAINVGVSVSRVGGAAQIKAMKEVAGSLRLDLSQYRELEAFAAFASDLDATSKAQLERGARLVELLKQPQYQPMPVEEQVISLFLGTGGHLDSVPVGDVRRFETELLDHIRVAQEEILTEIRESQKLTDEAADSLTEVIKSFKKGFAATGGASVVPNEHVAALDEEKLDKESVKVHQAIPAKTSEKSKNSTPR

SEQ ID NO: 63819 - protein, 418 aa, Mycobacterium leprae
MAERFVVTGGNRLSGEVTVGGAKNSVLKLMAATLLAEGTSTITNCPDILDVPLMAEVLRGLGATVELYGDVARITSPDEPKYDADFAAVRQFRASVCVLGPLVGRCKQARVALPGGDAIGSRPLDMHQAGLRQLGARCNIEHGCVVASAETLRGAEIQLEFPSVGATENILMAAVVAEGVTTIHNAAREPDVVDLCTMLNQMGAQVEGVGSPTMTITGVPRLYPTEHRVIGDRIVAATWGIAAAMTRGDIAVTGVDPAHLQLVLHKLHDAGATVTQTDDSFRVAQYERPKAVNVATLPFPGFPTDLQPMAIALTSIADGTSMITENVFEARFRFVEEMIRLGADARTDGHHAVVRGLPQLSSAPVWCSDIRAGAGLVLAGLVADGDTEVYDVFHIDRGYPLFVENLANLGAEIERVCL

SEQ ID NO: 63820 - protein, 165 aa, Mycobacterium leprae
MIHCRSMDSPIGPLILAGHGSVLTNLQMVDQTYEPSRVGWLPENGAFAEAVSQLDAYFAGELTEFAIELDLCGTEFQQRVWQALLTIPYGETRSYGEIAEQVGAPGAARAVGLANSRNPIAIIVPCHRVIGASGQLIGYGGGLNRKLTLLELEKHQVLTSLTLFD

SEQ ID NO: 63821 - protein, 393 aa, Mycobacterium leprae
MTTSVIVTGARTPIGKLMGSLKDFSASDLGAITIAAALKKANVAPSIVQYVIIGQVLTAGAGQMPARQAAVAAGIGWDVPALTINKMCLSGLDAIALADQLIRAGEFDVVVAGGQESMTKAPHLLMDSRSGYKYGDVTIVDHLAYDGLHDVFTNQPMGALTEQRNDVEKFTRQEQDEFAARSHQKAAAAWKDGVFADEVVPVSIPQSKGDSLQFTEDEGIRANTSAESLAGLKPAFRCGGTITPGSASQISDGAATVVVMNKEKAQQLGLTWLVEIGAHGVVAGPDSTLQSQPANAIKKAVDREGISVEQLDVVEINEAFAAVALASARELGIAPELVNVNGGAIAVGHPLGMSGARITLHVALELARRGSGYGVAALCGAGGQGDALILRAV

SEQ ID NO: 63822 - protein, 272 aa, Mycobacterium leprae
MSSPLLPVGVFDSGVGGLTVARAIIDQLPDEDIVYVGDTGNGPYGPLSIPEIRAHALAICDDLVGRGVKILVIACNTASAACLRDARERYDVPVVEVILPAVRRAVAATRNGRIGVIGTRATIASHAYQDAFAAARDTEITAVACPRFVDFVECGVTSGRQVLGLAEGYLEPLQRSGVDTLVLGCTHYPLLAGLIQLAMGENVTLVSSAEETAKEVLRVLTERDLLRRHDAPPVNRVFEATGDPEAFIQLAARFLGPAVSGVQPARLHSRVR

SEQ ID NO: 63823 - protein, 220 aa, Mycobacterium leprae
MGVSPSREAARGVALVTKLLVASRNWKKLAELRRVLDNAGLSGLTLVSLNDVVPFDEAPEAGATFEDNALAKARDAFAATGLASVADDSGLEAAALGGMPGVLSARWSGSYGDDAGNTALLLAQLCDVPDERRSAAFVSACALVSESDEVVVRGVWPGTIAREPRGYGGFGYDSIFIPDGPGLGGRTVAQLRPAEKDAFSHRFRALTLLMPALRVLAMRT

SEQ ID NO: 63824 - protein, 126 aa, Mycobacterium leprae
MSTTRRRRPALVALVTIAACGCLALGWWQWTRFQSASGTFQNLGYALQWPLFAGFCLYTYHNFVRYEESPPQPRHMNCIAEIPPELLPARPKPEQQPPDDPALRKYNTYLAELAKQDAENHNRTTT

SEQ ID NO: 63825 - protein, 130 aa, Mycobacterium leprae
MGIVGVGIDLVSIPDFAEQVSQPGTVFMTIFTPGERRDASVKSSSAVCHLAARWAVKEAVIKAWSGSRFAQRPMLPENIHRDIEVVNDMWGRPRVRLTGAIAKHLTDVTIHVSLTHEGDIAAAVVILEVL

SEQ ID NO: 63826 - protein, 1059 aa, Mycobacterium leprae
MTNSAYPRTDLGADQRGGSPNFPALEAQVLDYWSNDDTFRASIARCDDAPEYVFYDGPPFANGLPHYGHLLTGYVKDIVPRYRTMCGYKVERRFGWDTHGLPAELEVERQLGITDKSQIDAMGIAAFNEACRKSVLRYTEEWQAYVTRQARWVDFDNDYKTLDLSYMESVIWAFKQLWDKGLAYESYRVLPYCWRDETPLSNHELRMDDDVYQSRQDPAVTLGFKVLGGDDEDLVGAYLLVWTTTPWTLPSNLAVAVHPDVTYVDVRAGDRRFVLAQARLTAYARELGDEPEVLATYRGADLLGRHYLPPFQYFYESARNAFQVLPGDFVTTDDGTGIVHIAPAYGEDDMATADKVGIVPVTPVDSNGCFDATVPDYQGQHVFEANAQIIRDLKNQSGSAAVNGAVLLRHETYEHPYPHCWRCRNPLIYRAVSSWFVAVTEFRDRMVELNQQITWYPEHVKDGQFGKWLQGARDWSISRNRYWGTPIPVWKSDDPDYPRIDVYGSLDELERDFGVRPTNLHRPYIDELTRPNPDDPTGLSTMRRIPDVFDVWFDSGSMPYAQVHYPFENDDWFDGFDSADSDKQVDAHYPGDFIVEYIGQARGWFYTLHVLATALFDRPAFKTCIAHGVVLGSNGQKMSKSLRNYPDVTEIFDRDGSDAMRWFLMASPILRGGNLIITEPGIREGMRQVLLPLWNAYSFLALYAPKIGTWHTDVSHVLDRYILAKLAVLRDDLSQAMEVCDISGACEQLRQFTEPLTNWYLRRSRARFWDEDVDAIDTLHTVLEVTARLAAPLLPLITEIIWRSVTGGRSVHLTDWPQANQLPADPDLVAVMDQVRQVCSAASSLRKAKKLRVRLPLPKLVVAVYNSQRLKPYIDLIGDELNVKQIELTDAIDTYGRFEFTVNARVAGPRLGRDVQAAIKVVKAGEGVANPDGTLTAGPVVLQPDEYSSRLVAANPEFTAELPDGSGLVVLDDTVTPELEAEGWAKDRIRELQELRKLIGLDVSDRIRVLMSVPAERADWARVHRDFIAREILATSFEFGEPADSVAIGDGVRVSLLKV

SEQ ID NO: 63827 - protein, 1177 aa, Mycobacterium leprae
MNQSSFVHLHNHTEYSMLDGAAKITPMFAEVERLQMPAVGMTDHGNMFGASEFYNTAIKAGIKPIIGVEAYIAPGSRFDTRRITWGDPSQKADDVSAGGAYTHLTMVAENAAGLRNLFKLSSLASFEGQLSKWSRMDAELIGEYAEGIIVTTGCPSGEVQTRLRLGHDREALESAAKWREIVGPDNYFLELMDHGLSIEQRVREGLLNIGRKLNIPPLATNDCHYVTRDAVHNHEALLCVQTGKTLSDPNRFKFHGDGYYLKSAAEMRQLWDDEVPGACDSTLLIAERVQSYADVWEPRNRMPVFPVPVGHDQASWLRHEVDAGLKRRFPDGPPNGYVERAAYEIDVICDKGFPAYFLIVADLVNHARSVGIRVGPGRGSAAGSLAAYALGITDIDPIPHGLLFERFLNPERTSMPDIDIDFDDRRRGEMVRYAADKWGHDRVAQVITFGTIKTKAALKDSARIHYGQPGFAMADRITKALPPAIMAKDIPLSGITDPAHERFKEAAEVRSLIETDSDVRIIYQTARGLEGLIRNAGVHACAVILSSEPLTEAIPLWKRPQDGAIITGWDYPACEAIGLLKMDFLGLRNLTIIGDAIENIKTNRGIDLDLESVPLDDQATYELLGRGDTLGVFQLDGGPMRDLLRRMQPTGFEDIVAVLALYRPGPMGMNAHNDYADRKNNRQVIKPIHPELEEPLREILAETYGLIVYQEQIMRIAQKVAGYSLARADILRKAMGKKKREVLEKEFEGFSEGMQANGFSVHAIKALWDIILPFADYAFNKSHAAGYGLISYWTAYLKANFAGEYMAGLLTSVGDDKDKAAVYLADCRKFGITVLPPDVNESVLDFASVGADIRYGLGAVRNVGANVVGSLIKTRNAKGKFADFSDYLNKIDITSCNKKVTESLIKAGAFDSLGHSRKGLFLVHADAVDSVLGTKKAEAIGQFDLFGGTDGGTDAVFTIKVPDDEWEDKHKLALEREMLGLYVSGHPLNGVAHLLAAQVDTAIPTILDGGVSNDTQVRVGGILAAVNRRVNKNGIPWASAQLDDLTGGIEVMFFPHTYSSYGADIIDDAVVLVNAKVVVRDDRIALIANQLVVPDFSNVQEDRPLAVSLLTRQCTFDKVNALKQVLARHPGTSQVHLRLISGDRITTLELDQSLRVTSSPALMGDLKALLGPGCLGD

SEQ ID NO: 63828 - protein, 436 aa, Mycobacterium leprae
MSGATSGLTPEQIGAIDAAHLWHPYSTIGAATGVIPPVVAVAAHGAWLTLIRDGKPIEALDAMSSWWTAIHGHGHSVLDAALTTQLGAMNHVMFGGLTHEPAARLAQLLVDITPAGLETVFFSDSGSVSVQVAVKMALQYWRSRGQPAKRRLMTWRGGYHGDTLTPMSICDPDGGMHSLWTDILARQVFAPQVPRDYDPAYSKAFETQLAQHTPELAAVVVEPVVQGAGGMRFHDPRYLCDVRDICRRHDVLLIFDEIATGFGRTGELFAADHCGVSPDIMCVGKALTGGYLSLAATLCTTDIAHAISVGAAGALMHGPTFMANPLACAVSVASVEVLLGQDWRSRVAEISAGLTAGLEAAQGLPGVIDVRVCGAIGVIECDRSVDLAVATPAALDRRVWLRPFRNLVYAMPPYICPPAEIAQITSAMVEVAGLVG

SEQ ID NO: 63829 - protein, 385 aa, Mycobacterium leprae
MKVPIETSPLAWLEAVEQQRRGAGLRRSLRPRSAVATELDLASNDYLGLSQHPDVIDGGVAALRVWGAGATGSRLVTGDTILHHELECELAEFVGACVGLLFSSGYAANLGAVVGLSGPGSLIVSDAYSHASLVDACRLSRARVVVTPHCDVDAVDTALRSCHEERAVVVTESVFSADGVLAPVSELHDVCRRHGALLLVDEAHGLGVRGGGRGLVYEVGLAGAPDVVITTTMSKALGSQGGAVLGSSAVRAHLINTARPFIFDTGLAPAAVGAARAALQILKAETWRPEAVLQHARTLAKICDLSELPQSAVVSVVLGDPEVALAAAIACLDAGVRVGCFRPPTVPAGTSRLRLTAHASLDSAKLEVARRVLTDVLGGCCVARR

SEQ ID NO: 63830 - protein, 345 aa, Mycobacterium leprae
MTQAGTRSTNGDTENTDILAQARQQVLERGEGLSRDQVLQMLWLPDDRLEELLALAHDVRMRWCGPEVEIEGIISLKTGGCPEDCHFCSQSGLFMSPVRSAWLDIRSLVEAAKQTAKSGATEFCIVAAVRGPDERLMSQVAAGIEAIRNEVEINIACSLGMLTVEQVEQLSGIGVHRYNHNLETARSFFTNVVTTHTWEERWQTLSMVRDAGMEVCCGGILGMGETVEQRAEFALELAELGPDEVPLNFLNPRPGTPFGALEVMPPSEALKSVAAFRLALPRTILRFAGGREITLGDLGAKQGMLGGINAVIVGNYLTTLGRPAEADLRLLDDLQMPIKALNASL

SEQ ID NO: 63831 - protein, 239 aa, Mycobacterium leprae
MAYASTAHEVLAVVFQVRRVAEQVKGTPQKAKPQLSVLLWERSQDPQRGAWSLPGGRLRNDEDMTYSVRRQLAEKVDLRELAHLEQLAVFSEPARLPGTRMIASTFLGLVPSPATPELPPDTRWHPLNTLPSMAFDHGPMVTHARARLVAKMSYTNIGFALAPKEFALSTLRDIYGATLGYQVDATNLQRVLARRSVIIQTGTVAQSGRSGGRPAALYRFTDSQLRVTDEFAALRPPGN

SEQ ID NO: 63832 - protein, 556 aa, Mycobacterium leprae
MAEFIYTMKKVRKAHGDKVILDDVTLNFFPGAKIGVVGPNGAGKSSVLRIMAGMDKPNNGDAFLATGASVGILQQEPPLNEEKTVRGNVEEGLGDIKIKLDRFSEVAELMATDSSSELMEEMGRLQEELDHADAWDLDSQLEQAMDVLRCPPPDEPVTNLSGGERRRVALCKLLLSKPDLLLLDEPTNHLDAESVQWLEQHLAGYAGAVLAVTHDRYFLDNVAEWILELDRGRAYPYEGNYSTYLEKKAERLTTQGRKDAKLQKRLTDELAWVRSGAKARQAKSKARLQRYEEMAAEAEKNRKFDFEEIQIPVGPRLGNMVVEVEHLDKGYGGRTLIKDLSFTLPRNGIVGIIGPNGVGKTTLFKTIVGLEQPDGGAVKIGETVKLSYVDQTRAGIDPKKIVWEVVSDGLDHIQVGQTEVSSRAYVSAFGFKGPDQQKLAGVLSGGERNRLNLALTLKQGGNLILLDEPTNDLDVETLGSLENALVNFPGCAVVISHDRWFLDRTCTHILAWEGDDEGKWFWFEGNFGAYEENKVERLGAEAARPHRVTHRKLTRD

SEQ ID NO: 63833 - protein, 1622 aa, Mycobacterium leprae
MTIDPGATHVAELCTTFTQGADVPDWISKAYIDSYRGSHGDVREAPETSRVNPNALVTPAMLSAHYRLGQCRPNGRNCVRVYPADDPAGFGPALQIVTDHGGMVMDSITVLLHRLGVTYTAMMTPVFMVLRSPTGELLGVEPRASSTSHSIEGTWVGEVWIYIQLLPAVDSKSLAEVEQLLPRTLVDVQRVAADAAALNATLSGLAADVKTNKEGHFSASDRDDVAALLHWLGNGNFLLLGYQRCRVHYGLVSCDRSTGLGVLRARTGSRPRLTDDNELLVLAQAAVGNYLRYGAYPYAIAVREYDDGGDGGIIEHRFVGLFTVAAMNADVLEIPSISHRVRAALAMANSDPIYPGQLLLDVIQTVPRSELFTLSAERLFTMAKEVVDLGSGRRALLFLRADRLQYFVSCLVYVPRDRYTTGVRLQIEDILVREFGGTQVEFTARVSESPWALMHFMVRLSEGAATGSVDVSEGNRIRIQAMLSEAARTWSDRLIAAAASFSEGSVSYAEAEHYAATFSETYKQAVTPADAIDHIAIIKELADDSVKLVFFERKADGFAQLTWFLGGRSASLSQLLPMLQSMGVVVLEERPFTVARTDGLPVWIYQFKISPHPTIPLASTANERELTAKRFSDAVTAIWQGRVEIDRFNELVMRARLTWQQVVLLRAYAKYLRQAGFNYSQSYIESVLNEHPSTARSLVALFEALFDPSPLSSSTNCDAQAAAAAVAADIDALVSLDTDRILRAFASLVQATLRTNYFVTQKFSARSKGVLVLKLDAQLINELPLPRPKFEIFVYSPRVEGVHLRFGAVARGGLRWSDRLDDFRTEILGLVKAQAVKNAVIVPVGAKGGFVLKRPPLPTGDAAADRDAMRAEGIACYQLFISGLLDITDNVDHATGKVNAPPQVVRRDSDDAYLVVAADKGTATFSDIANDVAKSYGFWLGDAFASGGSVGYDHKAMGITAKGAWEAVKRHFREMGVDTQNEDFTVVGIGDMSGDVFGNGMLLSKHIRLIAAFDHRHVFLDPDPDAAVSWAERQRMFDLPRSSWDDYNKSLISEGGGVYSREQKAIPTSPQVRTALGIDGEVTEMAPPNLIRAILQAPVDLLFNGGIGTYIKAETESVADVGDRANDPVRVNANQVRAKVIGEGGNLGVTALGRVEFDLSGGRINTDAMDNSAGVDCSDHEVNIKILIDSLVTAGKVKVEERKHLLESMTDEVARLVLTDNEDQNDLIGTSRANAANMLSVHAMQIKYLVDERGVNRELEALPSEKEIQRRSEAGIGLTSPELSTLMAHVKLALKEQMLATELPDQDVFVSRLPRYFPKPLRERFTPEIRSHQLRREIVTTMLINDLVDTAGISYAFRIAEDIGVGPIDAIRTYVATDAIFGVGDVLRRIRAANLSVVLSDRMTLDTRRLIDRAGRWLLNYRPQPLAVGAEINRFAAKVKALTPRMSEWLRGDDQAIVEQQATEFVSQGAPEDLAYRVAVGLYRYSLLDIIDIADITELDPAEVADTYFSLMDRLGTDGLLTAVSKLPQNDRWHSLARLAIRDDIYASLRSLCFDVLAVGEPDESGEEKIAEWEHISASRVERARLMLAEIHASGEKDLATLSVAARQIRRMTRTSGRGSSG

SEQ ID NO: 63834 - protein, 128 aa, Mycobacterium leprae
MQQSFYDAIGGAETFKAIVSRFYAQVPEDEILRELYPADDLAGAEERLRMFLEQYWGGPRTYSSQRGHPRLRMRHAPFRITAIERDAWLRCMHTAVASIDSHTLDNEHRRELLDYLEMAAHSLVNSAS

SEQ ID NO: 63835 - protein, 272 aa, Mycobacterium leprae
MCPATVLDSILKGVRADVAAREACISLSEIKAAAAAAPAPLDAMAALREPGIGVIAEVKRASPSVGSLATIADPAKLAQAYEDGGARIISVLTEERRFNGSLDDLDAVRAAVSVPVLRKDFVVQPYQIHEARAHGADMLLLIVAALDQSALMSMLDRTESLGMIALVEVRTEQEADRALKAGAKVIGVNARDLMTLEVDRDCFSRIAPGLPSNVIRIAESGVRGPADLLAYAGAGADAVLVGEGLVKSGDPRAAVADLVTAGTHPSCPKPAR

SEQ ID NO: 63836 - protein, 417 aa, Mycobacterium leprae
MMPNLSCFSVAISEPTCHDPDSGGHFGGPDGYGGRYVPEALMAVIEEVTAAYEKERVNQDFLDLLDKLQANYAGRPSPLYEATRLSEYAGSVRIFLKREDLNHTGSHKINNVLGQTLLAQRMGKTRVIAETGAGQHGVATATACALFGLDCVIYMGALDTARQALNVARMRLLGAEVVSVETGSRTLKDAINDAFRDWVTNADNTYYCFGTASGPHPFPTMVRDLQRVIGLETRRQIQYQAGRLPDAVTACIGGGSNAIGIFHAFLDDPGVRLVGFEAAGDGVETGRHAATLTGGLPGAFQGTFSYLLQDEDGQTIESHSIAAGLDYPGVGPEHAWLRETGRAEYQPITDSEAIEAFRLLCRTEGILPALESAHAVAGALKLASEIGKGAVIVVNLSGRGDKDIEAAAKWFGLLGTR

SEQ ID NO: 63837 - protein, 472 aa, Mycobacterium leprae
MTRRGKIVCTLGPATQSDELIRALVEAGMDVARMNFSHGDYSDHKAVYDRVRVASDATGRAVGVLADLQGPKIRLGRFATGSTYWADGETVRITVADCHGSHDRVSTTYKNLARDAVVGDRVLVDDGKVGLVVSAIDGDDVVCTVTEGGPVSNNKGMSLPGMHVSAPALSDKDIEDLTFALNLGADLVALSFVRSPSDVELVHKAMDRVGRRVPVIAKLEKPEAVDNLEAIVLAFDAIMVARGDLGVELPLEEVPLVQKRAIQMARENAKPVIVATQMLDSMIENSRPTRAEASDVANAVLDGADALMLSEETSVGKYPLAAVKTMSRIVCAVEENSTAAPPLTHVPRTKRGVISYAARDIGERLDAKALVAFTQSGDTVRRLARLHTPLPLLAFTAWPEVRSQLAMTWGTETFLVPKMLSTDGMIRQVDKSLLELGRYKRGDLVVIVAGTPPGTVGSTNLIHVHRIGEDDV

SEQ ID NO: 63838 - protein, 1206 aa, Mycobacterium leprae
MRVTAANQHQYDTDLLETLAQRVMVGDGAMGTQLQDAELTLDDFRGLEGCNEILNETRPDVLETIHRRYFEAGADLVETNTFGCNLSNLGDYDIADKIRDLSQRGTVIARRVADELTTPDHKRYVLGSMGPGTKLPTLGHTEYRVVRDAYTESALGMLDGGADAVLVETCQDLLQLKAAVLGSRRAMTQAGRHIPVFVHVTVETTGTMLLGSEIGAALAAVEPLGVDMIGLNCATGPAEMSEHLRHLSKHARIPVSVMPNAGLPVLGAKGAEYPLQPDELAEALAGFIAEFGLSLVGGCCGTTPDHIREVAAAVARCNDGTVPRGERHVTYEPSVSSLYTAIPFAQKPSVLMIGERTNANGSKVFREAMIAEDYQKCLDIAKDQTRGGAHLLDLCVDYVGRNGVADMKALAGRLATVSTLPIMLDSTEIPVLQAGLEHLGGRCVINSVNYEDGDGPESRFVKTMELVAEHGAAVVALTIDEQGQARTVEKKVEVAERLINDITSNWGVDKSAILIDCLTFTIATGQEESRKDGIETIDAIRELKKRHPAVQTTLGLSNISFGLNPSARQVLNSVFLHECQEAGLDSAIVHASKILPINRIPEEQRQAALDLVYDRRREGYDPLQKLMWLFKGVSSPSSKETREAELAKLPLFDRLAQRIVDGERNGLDVDLDEAMTQKPPLAIINENLLDGMKTVGELFGSGQMQLPFVLQSAEVMKAAVAYLEPHMEKSDCDFGKGLAKGRIVLATVKGDVHDIGKNLVDIILSNNGYEVVNLGIKQPITNILEVAEDKSADVVGMSGLLVKSTVIMKENLEEMNTRGVAEKFPVLLGGAALTRSYVENDLAEVYEGEVHYARDAFEGLKLMDTIMSAKRGEALAPGSPESLAAEADRNKETERKARHERSKRIAVQRKAAEEPVEVPERSDVPSDVEVPAPPFWGSRIIKGLAVADYTGFLDERALFLGQWGLRGVRGGAGPSYEDLVQTEGRPRLRYWLDRLSTYGVLAYAAVVYGYFPAVSEDNDIVVLAEPRPDAEQRYRFTFPRQQRGRFLCIADFIRSRDLATERSEVDVLPFQLVTMGQPIADFVGELFVSNSYRDYLEVHGIGVQLTEALAEYWHRRIREELKFSGNRTMSADDPEAVEDYFKLGYRGARFAFGYGACPDLEDRIKMMELLQPERIGVTISEELQLHPEQSTDAFVLHHPAAKYFNV

SEQ ID NO: 63839 - protein, 289 aa, Mycobacterium leprae
MSMLRVAVPNKGALSEPATEILAEAGYRRRTDPKDLTVVDPVNRVEFFFLRPKDIAIYVGSGDLDFGITGRDLVHDSDASVCERLALGFGSSSFRYAGPAGRDWTTSDLAGKRIATAYSNLVRKDLVAKGIEATVIRLDGAVEISVQLGVADVIADVVGSGRTLSLHDLVAFGEPLCDSEAVLIERGDRGSLDHHETVAARDQLVARVQGVVFGQQYLMLDYDCPRSVLDKATLITSGLESPTIAPLAEPGWVAIRALVPRRDINGIMDELAAIGAKAILASDIRFCRF

SEQ ID NO: 63840 - protein, 291 aa, Mycobacterium leprae
MTRSFPDRLPTNLAFPGISVINQSSFVDLLRRQAPELLPVSLGGGQSGGGQQLSHGTTIVVLKYPGGVVIAGDRRSTQGNMIAGRDVRKVYITDDYTATGIAGIAAVAVEFARLYAVELEHYEKLEGVPLTFAGKVNRLAIMVRSNLTAAMQGLLALPLLAGYDIHAPDPQSAGRIVSFDAAGGWNIEEEGYQSVGSGSIFAKSSIKKLYSQVSDADSALRVAIEALYDAADDDSATGGPDLVRGIYPTAVTIGAEGAAEVTESRIAELAREIIESRSRAYTLGSFGGSEK

SEQ ID NO: 63841 - protein, 920 aa, Mycobacterium leprae
MTDLAELARFTAELPFSLDDFQQRACAALERGHGVLVCAPTGAGKTVVGEFAVHLALAAGGKCFYTTPLKALSNQKYTDLTARYGRNRIGLLTGDQSVNGDSPVVVMTTEVLRNMLYADSFALQGLSHVVMDEVHFIADRMRGPVWEEVILHLPDDVRMVSLSATVSNAEEFGGWVQTVRGDTTVVVDEHRPVPLWQHVLVGKRLFDLFDYDSNVDQSPVNPNLLRHIAHCREADRMSDWRNPRRRAGRGSGVRPRFYRSLARPEVIAILDAEGLLPAITFVFSRFGCDAAVQQCLRSPLRLTSEEERAQIAEVIDHRCGDLADADLAVLGYYEWREGLLRGLAAHHAGMLPAFRHAVEELFTAGLVKAVFATETLALGINMPARTVVLERLVKFNGKQHVPLTPGEYTQLTGRAGRRGIDVEGHAVVIWHPSEDTSGPSAVAGLASARTFPLRSSFVPSYNMTINLVHWMSPERAHALLEQSFAQYQADRSVVGLVRGIERCTQVLGDISSELGGPDAPILEYARLRARIAEMERAQSFVFRLQRKQAANDVLAALRRGDIITITHGRHGGLAVVLESARDSSNPRPLVLTEHRWAGRISSADYMGAAAPVGSMTLPKRVEHRQQRVRRDLASALRSAATRLSVPDIGDGVDGDKIGFNDGVLHDPELASLRAQLRRHRSNNAPGLDTQLQQAERYLRIERYNAQLQRKVAAATNSLARTFDRIVGLLIERDFIRGPADDPQVTDDGRLLARIYSESDLLVAECLRTGAWAGLRPAELAAVVSAVLYETRGDDGPGGPVDAEAPTPRLRQALQHTSRLSATLRADEQRHRIALSREPDDGFVGVIYCWARTGDLAAVLAAADASGNGAPLSAGDFVRWCRQVLDLLDQLRNAAPEPDLRATAKRAINDVRRGVVAVDAG

SEQ ID NO: 63842 - protein, 426 aa, Mycobacterium leprae
MSSSILNELGWRGLVAQSTDLDALADELRRGPMTVYAGFDPTAPSLHVGHLVPLLVLRRFQRAGHRPIVLAGGATGMIGDPRDIGERTLNEAYTVAEWAERIRGQLERFVEFDDVAKSRNGAIVVNNLEWTSPMSAIEFLRDVGKHFSINLMLDRDTIRRRLNGQGISYTEFSYMLLQANDYAELHQRHGCALQIGGSDQWGNIIAGVRLVRQKLGATVHALTVPLVTAADGAKLGKSTGGGSLWLDPEMTSPYAWYQYFINTSDADVIRYLRWFTFLLPEELVELEQTTVSRPQERAAQRRLATELTVLVHGAAATQAVEHASRALFGQGELARLDEATLATALRETVVAELKPGNPDGIVDLLVASGLSPSRGAARRTIDEGGVLVNNIRIQSEEWTPRTSDFLHGRWLVLRRGKRNIAGIERV

SEQ ID NO: 63843 - protein, 311 aa, Mycobacterium leprae
MTPRKAAQRTVLLVVHTGRDEATETARRVKKIVGDNGIALRVLSAEAVDRGSLHLALDNMRAMGVDIEVVDADPHVAQGCELVLVLGGDGTFLRAAELARTARIPVLGVNLGRIGFLAEAEAEAIDVVLEHVIARSYRVEERLTLDIVVRQGGNIIDQGWALNEASLEKGPRLGVLGVVVEIEGRPVSTFGCDGVLVSTPTGSTAYAFSAGGPVLWPDLEAILVVPNNAHALFGRPMVTSPDATVAIELEANGNDALVFCDGRREMIIPAGGRLEVTRCATPVKWARLDSAPFTDRLVSKFRLPVTGWRGK

SEQ ID NO: 63844 - protein, 590 aa, Mycobacterium leprae
MRKHPQSATKHLFVSGGVASSLGKGLTASSLGQLLTARGLHVTMQKLDPYLNVDPGTMNPFQHGEVFVTEDGAETDLDVGHYERFLDRDLSGSANVTTGQVYSTVIAKERRGEYLGDTVQVIPHITDEIKQRIMAMAQPDGGDNRPDVVITEIGGTVGDIESQPFLEAARQVRHDLGRENVFFLHVSLVPHLAPSGELKTKPTQHSVAALRSIGITPDALILRCDRDVPESLKNKIALMCDVDIDGVISTPDAPSIYDIPKVLHREELDAFVVRRLNLPFRDVDWTEWDDLLRRVHEPHGTVRIALVGKYVDFSDAYLSVSEALHAGGFKHYAKVEVVWVASDDCETATGAAAVLADVHGVLIPGGFGIRGIEGKIGAIRYARARGLPVLGLCLGLQCIVIEATRSVGLVQANSAEFEPATPDPVISTMADQKEIVAGEADFGGTMRLGAYPAVLQPASIVAQAYGTTQVSERHRHRYEVNNAYRDWIAESGLRISGTSPDGYLVEFVEYPANMHPFVVGTQAHPELKSRPTRPHPLFVAFVGAAIDYKSAELLPVEIPAVPEISEHLPNSSNQHRDGVERSFPAPAARG

SEQ ID NO: 63845 - protein, 316 aa, Mycobacterium leprae
MTTAALQTQLQGYLDYLIIERSIAANTLSSYRRDLIRYSKHLSDRGIEDLAKVGEHDVSEFLVALRRGDPDSGVAALSAVSAARALIAVRGLHRFAVAEGLVDLDVARAVRPPTPGRRLPKSLTVDEVLALLESVGGESRADGPLVLRNRALLELLYSTGSRISEAVGLDVDDVDTQARTVLLQGKGGKQRLVPVGRPAVQALDAYLVRGRSDLARRGPGMLATPAIFLNARGGRLSRQSAWQVLQDAAEHAGITSGVSPHMLRHSFATHLLEGGADIRVVQELMGHASVTTTQIYTLVTVQALREVWAGAHPRAK

SEQ ID NO: 63846 - protein, 257 aa, Mycobacterium leprae
MMVEIHDSRMDRGAGAVRLQKILSRAGIASRRAAEKLIIEGRVEVDGQLVRELGTRVDPDVSVVRVDGVKVVVDDSLVYLALNKPRGMYSTMSDDRGRPCVGDLIERRVRGNKKLFHVGRLDADTEGLILLTNDGELAHRLMHPSHEVSKTYLATVKGAVPRGLGKKLSVGLELDDGPAHVDDFAVVDAIPGKTLVRLTLHEGRKRIVRRLLTAAGFPVEMLVRTDIGAVSLGDQRPGCLRALLRDEIRQLYKEVGL

SEQ ID NO: 63847 - protein, 223 aa, Mycobacterium leprae
MTDIVVAIDGPAGTGKSSVSRGLARELGARYLDTGAMYRMMTLAVLRAGIDPADAAAIGESVWKVQMLSDHDRYFLGGEDVSSEIRTEEVTQAVSAVSAIPAVRVRLVDLQRQMAEGRGSVVVEGRDIGTVVLPDAPVKIFLTASPETRARRRNDQNVASGSADDYDRVLAEVRRRDHLDSTRAVSPLYVAQDAMIVDTSKMAEAEVIAHLMDLVKQRSGAVW

SEQ ID NO: 63848 - protein, 462 aa, Mycobacterium leprae
MVSQDGTWSDESDWELDDSDLAEFGPVVAVVGRPNVGKSTLVNRILGRREAVVQDVPGVTRDRVSYDAMWTGRRFVVQDTGGWEPDAKGLKRLVAEQASVAMRTADAVILVVDVGVGATDADEAAARILLRSGKLVFLAANKVDGEKGESDASALWSLGLGEPHAISAMHGRGVADLLDKVLAALPNVAESTSLDGGLRRVALVGKPNVGKSSLLNKLAGDQRSVVHEAAGTTVDPVDSLIEMGGRVWRFVDTAGLRRKVGQASGHEFYASVRTHGAIDSAEVVIMLIDASEPLTGQDQRVLSMVIDAGRALVLAFNKWDLVDEDRCDLLEREIDRELVQVRWAQRVNISAKTGRAVQKLVPAMENSLASWDTRIATGPLNIWIKAVVAATPPPVRGGKQPRILFATQATARPPTFVLFTTGFLEACYRRFLERRLRETFGFEGSPIRINVRVREKRGLKRR

SEQ ID NO: 63849 - protein, 911 aa, Mycobacterium leprae
MSAAMTAEVCEDHTKPMLMLLDGNSLAFRAFYALPTENFKTRGGLTTNAVYGFTAMLINLLREEAPTHIAAAFDVSRKTFRSECYAGYKANRSSIPAEFHGQIDITKEVLGALGITVFAEAGFEADDLIATLATQAENEGYRVLVVTGDRDALQLVSNDVTVLYPRKGVSELTRFTPEAVIEKYGVTPAQYPDLAALRGDPSDNLPGIPGVGEKTAAKWIVDYGSLQGLVDNVESVRGKVGEALRTHLASVVRNRELTELVKDVPLVQTSDTLRLQPWDRDRIHRLFDNLEFRVLRDRLFEALAAAGERVPEVDEGFDVRGGLLESGTVGRWLAKHADDGRRSGLAIVGTHLPHGGDATALAVAAADGNGGYIDTAMLTPDDDDALAAWLADPDNPKALHEAKLAMHDLAGRGWTLGGITSDTALAAYLVRPGQRSFTLDDLSLRYLRRELRAETPEQEQFSLLDNVDEVDKQAIQTLILRARAVVDLAAALDAELDLIDSTSLLGEMELPVQQVLADMEKAGIAADLRLLTELQSQFGDQIRDAAEAAYAVIGKQINLSSPKQLQVVLFEELGMPKTKRTKTGYTTDADALQSLFCKTEHPFLQHLLTHRDVTRLKVTVDGLLNAVAADGRIHTTFNQTIATTGRLSSTEPNLQNIPIRTNAGRQIRDAFVVGSENNGYTELMTADYSQIEMRIMAHLSRDEGLIEAFHTGEDLHSFVASRAFGIPIEDITPELRRRVKAMSYGLAYGLSAYGLATQLKISTEEAKLQMEQYFARFGGVRDYLMDVVEQARKDGYTSTVLGRRRYLPELDSSNRQIREAAERAALNAPIQGSAADIIKVAMIAVDKSLKQAKLASRMLLQVHDELLFEVAIGEREQIEAMVREQMGSAYPLDVPLEVSVGFGRSWGAAAH

SEQ ID NO: 63850 - protein, 481 aa, Mycobacterium leprae
MSIPAVPSPQIAVNDVGSSEDFLAAIDKTIKYFNDGDIVEGTIVKVDRDEVLLDIGYKTEGVIPARELSIKHDVDPNEVVSVGDEVEALVLTKEDKEGRLILSKKRAQYERAWGTIEALKEKDEAVKGIVIEVVKGGLILDIGLRGFLPASLVEMRRVRDLQPYIGKEIEAKIIELDKNRNNVVLSRRAWLEQTQSEVRSEFLNQLQKGAIRKGVVSSIVNFGAFVDLGGVDGLVHVSELSWKHIDHPSEVVQVGNEVTVEVLDVDMDRERVSLSLKATQEDPWRHFARTHAIGQIVPGKVTKLVPFGAFVRVEEGIEGLVHISELAERHVEVPDQVVAVGDDAMVKVIDIDLERRRISLSLKQANEDYIEEFDPAKYGMADSYDEQGNYIFPEGFDPDSNEWLEGFDTQRAEWEARYAEAERRYKMHTIQMEKFAATEEAGHGSSEQPPASSTPSAKATGGSLASDAQLAALREKLAGSA

SEQ ID NO: 63851 - protein, 147 aa, Mycobacterium leprae
MGAYQTVVVGTDGSDSSLRAVDRAGKIAGSDAKLIIASAYLPQHDNARAFDILKDESYKVTGTAPIYEILHDAKERAHAAGAKNVEERPVVGAPVDALVNLAEKTNADLLVVGNVGLSTIAGRLLGSVPANVSRRAKIDVLIVHTTH

SEQ ID NO: 63852 - protein, 969 aa, Mycobacterium leprae
MADRLIVKGAREHNLRSVDLDLPRDSLIVFTGLSGSGKSSLAFDTIFAEGQRRYVESLSAYARQFLGQMDKPDVDFIEGLSPAVSIDQKSTNRNPRSTVGTITEVYDYLRLLYARAGTPHCPICGEQISRQTPQQIVDQVLVLPEGTRFLVLAPVVRTRKGEFADLFDKLNAQGYSRVRVDDVVYPLSDPPKLKKQEKHDIEVVVDRLTVKIAAKQRLTDSVETALNLADGIVVLEFPDDHDERGHPREQCFSEKLACPNGHPLAVDDLEPRSFSFNSPYGACPECVGLGIRKEIDSDLVVPDPDRTLAEGAVAPWSAGRTAEYFTRMMAGLGEKLGFDVDTPWRKLPAKARKAILEGSDHQVHVQYHNRYGRPRSYYVDFEGVLTFLQRKMEQTESEQMKERYEGFMRNIPCPVCQGTRLKPEILAVTLAAGERGAKSIAEVCELSIADCSAFLNALILGVREQAIAGQVLKEIQSRLGFLLDVGLEYLSLSRAAATLSGGEAQRIRLATQIGSGLVGVLYVLDEPSIGLHQRDNRRLIETLTRLRALGNTLIVVEHDEDTIAHADWVVDIGPGAGEHGGQIVHNGTYRELLANKDSITGAYLSGRESIATPTRRRSVDRKRELTVVGAREHNLRGIDVSFPLGVLTSVTGVSGSGKSTLVNDILAAVLANRLNGARQVPGRHTRVTGLEHLDKLVRVDQSPIGRTPRSNPATYTGVFDKIRILFAATTEAKVRGYQPGRFSFNVKGGRCEACTGDGTIKIEMNFLPDVYVPCEVCQGARYNRETLEVHYKGKAISEVLDMSIEEAAEFFEPIIGINRYLRTLVDVGLGYVRLGQPAPTLSGGEAQRVKLASELQKRSTGRTIYILDEPTTGLHFDDIRKLLNVINGLVDKDNTVIVIEHNLDVIKTSDWIVDMGPEGGAQGGTVVAEGTPEDVAAVPESYTGKFLAEVVGAGCAPARTPRRRRTVTA

SEQ ID NO: 63853 - protein, 185 aa, Mycobacterium leprae
MIGPGGEQVGIVRIEDALRVAADADLDLVEVAPNARPPVCKIMDYGKYKYEVAQKARESRRNQQQTVVKEQKLRPKIDDHDYETKKSHVVRFLEAGSKVKVTIMFRGREQSRPELGYRLLQRLGADVADYGFVETSAKQDGRNMTMVLAPHRGAKTRASARHPEVPGAGSVQDIDATGDTDGSPH

SEQ ID NO: 63854 - protein, 64 aa, Mycobacterium leprae
MPKAKTHSGASKRFRRTGTGKIVRQKANRRHLFEHKPSTRTRRLDGHTRVSANDTQRVNSLLNG

SEQ ID NO: 63855 - protein, 129 aa, Mycobacterium leprae
MARVKRAVNAHKKRRTVLKASKGYRGQRSRLYRKAKEQQLHSLGYAYRDRRARKGEFRKLWISRINAAARANDITYNRLIQGLKAADVDVDRKNLADIAISDPAAFTALVEVARSGLPEDVNVPSGEAA

SEQ ID NO: 63856 - protein, 259 aa, Mycobacterium leprae
MLTERSARVVAAVKLHRQVARRRVRRFLAEGPNLVEAAIVSGLVRDVFVTEVAAQRHATVLATLKCPVHPVSERAAKALSDTVTPTGLIAVCEMPTTRLATVLAGSPQLVVAAVEISEPGNAGTVIRIADAMGAAAVIFGGYTVDPYNGKCLRSSAGSIFSITVVVASDAYAAVTELRAAGLQVLATMVDGETSLDEAKPLLGKPTAWLFGSEPHGLSTEIAEAADYRVRIPMVGGVESLNVAATAAICLYQSSRALRL

SEQ ID NO: 63857 - protein, 350 aa, Mycobacterium leprae
MGDQPVDLSMLSSEALAKAVNTARQAIALAVNLDALALIKAEHLGDRSPLALARQALASLPKIDRAAVGKQVNTARSEVQRDYDERLATLQAERDAAVLVTERIDVTLPSTRQPTGARHPITILAEHIADTFIAMGWELVDGPEVETEQFNFDALNFPADHPARSEQDTFYIAPDGSRQLLRTHTSPVQVRTLLERELPVYVISIGRAFRTDEVDATHTPVFHQVEGLAVDRGLSMAHLRGTLDIFARAEFGPSTRTRIRPHFFPFTEPSAEVDVWFASKKDGADWVEWGGCGMVHPNVLRATGIDPDIYSGFAFGMGLERTLQFRNSIPNMRDMVEGDVRFSLPFGVGA

SEQ ID NO: 63858 - protein, 836 aa, Mycobacterium leprae
MMRVPYSWLCEVVTVGAPDWDVSASDLKQTLVRIGHEIEEMITVGPVDGPLTVGRVTDIEELTGFKKPIRACVVDVGDGQQHEIICGATNFVVGDLVVVAFPGTTLPDGFAIAACETYGRHSAGMICSAAELRLSTDHSGILVLPPGTALPGADGADVLGLDDVVFRLAITPDRGYCMSVRGLAREIACAYDLAFVDPASDQAVPPLPVGGQAWPVTVQPETGVRRCALRPVTGIDFAAVSPWWLQRRLLLSGIRAISPAVDVTNYVMLELGHPLHAHDRNRITGGFTVRFARPGETIVTIDGIERQLDPVDVLIVDNVTTAAIGGVMGAASTEVRSDSTDVLLEAAVWDPARVSHTQRRLHLPSEAARRYERAVDPAISVAALDRCAMLLADIAGGTVSETLTDWRGSPPRADWSLPPIRIAVDLPDRIAGVVYNQGATTKRLTQIGAVVVDTVSSEGHTLTVTPPSWRPDLLQPSDLVEEVLRLEGLEVIRSVRPLAPAGRGLTAVQKRYRAIGKVLAQSGYVEILPTPFLPADVFDLWGLPADDPRRTTTRVLNPLESNRPQLATTLLPALLEALVSNVSRGIIDVALFAIAQVVEPTEWTGGIGSIPVDRRLTDAEIALLDASLPRQPQHVAAVLAGLREPRGPWGPGRLAEASDAFEAVRIIARVSGVDVFFRAVQYLPWHPGRCAEVFVGETPIGHAGQLHPAVIERAGLPKGICAIELDLAAMPIVEGLPAPQVSPFPAVLQDVSLVVSTQVPAQEVQDAIRDGAGELLEDIQLFDVFTGSQIGEDCKSLTFALRFRAPDRTLTEDDASAARDAAVRHAAERVGATLRT

SEQ ID NO: 63859 - protein, 404 aa, Mycobacterium leprae
MTPTQTNTATMQQRWETVMMNNYGTPPIVLASGNGAVVTDVDSNTYLDLLGGIAVNVLGHRHPAVIEAVTHQITTLGHTSNLYATEPSITLAEELVALLGADTQTRVFFCNSGTEANELAFKLSRLTGRTKLVAAQAAFHGRTMGSLALTGQPAKQAAFEPLPGHVTHVPYGQVDALAAAVDNDTAAVFLEPIMGESGVIVPPEGYLAAARDITTRHGALLVIDEVQTGIGRTGAFFAHQHDSITPDVVTLAKGLGGGLPIGAFLATGPAAELLTLGLHGSTFGGNPVCTAAALAVLRVLATQGLVRRAEVLGDSMRIGIESLSHPLIDQVRGRGLLLGIVLTAPRAKDIEKAARDAGFLVNATAPEVIRLAPPLIITESQIDSFITALPGILDASIAELGKKA

SEQ ID NO: 63860 - protein, 320 aa, Mycobacterium leprae
MGGASRLRGRGAAQLTRHFLRDDDLSPTEQADILALAADLKKAPFSRRPLAGPRGVAVIFDKNSTRTRFSFDIGIAQLGGHAVVVDGLSTQLGRDETLQDTARVLSGYVDAIVWRTFGQHRLDAMAATATVPVVNALSDEFHPCQVLADLQTIAERKGSLNGLRLSYFGDGANNMAHSLMLGAVTAGVHVTVATPVGFTPDPSVLAAAKKRAEATGASVTVTVDADTAAAGADVLVTDTWTSMGQENDGLDRVKPFWPFQVNARLVGLADSEAIVLHCLPAHRGDEITNEVMDGPTSAIWDEAENRLHAQKALLVWLLER

SEQ ID NO: 63861 - protein, 470 aa, Mycobacterium leprae
MSTNQGSLWGGRFAAGPSEALVALSKSTHFDWVLAPYDITASRAHTKMLFRAGLLNEEQRDGLLAGLDNLAEDVADGSFLPLVTDEDVHAALERGLIDRVGPDLGGRLRAGRSRNDQVATLFRMWLRDAVRRVAAGALEVVDALANQAAEHSSTIMPGKTHLQSAQPILLAHHLLAHAHPLLRDVGRIVDFDKRAAVSPYGSGALAGSSLGLDPDAMAQDLGFPAAADNSVDATAARDFAAEAAFVFAMIAVDLSRLAEDIILWSSTEFGYARLHDSWSTGSSIMPQKKNPDIAELARGKSGRLIGNLAGLLATLKAQPLAYNRDLQEDKEPVFDSVAQLELLLPAMAGLVASLTFNVERMAALAPAGYTLATDIAEWLVRQGVPFRSAHEAAGTAVRVAEGRGVGLEELTDDELAAISANLTPQVREVLTVEGSVSSRAARGGTAPSQAAKQLTVVRANANQLRQLLMR

SEQ ID NO: 63862 - protein, 445 aa, Mycobacterium leprae
MHGKLFGRRSLLRGAGALTAAALAPGAVGCSSDDDALTFFFAANPEETNARMRIVGEFQRDHPDIKVRAVLSGPGVMQQLSTFCAGGKCPDVLMAWDLTYAELADRGVLLDLNTLLGQDKAFAAELKSDSIEPLYETFTFNGGQYAFPEQWSGNYLFYNKQLFTNAGVQPPPCTWEQPWSFTEFLDTARALTKRDSSGRVTQWGFVNTWLSYYTAGLFALNNGVPWSNPRMNPTHLNFDDDAFIEAVQFYCDLTNKYQVAPDASEQQWMATADLFSLGKAAIALGGHWRYQTFMRAEGLDFDVTSLPIGPSAGTVPATRSGACSDIGATGLAIAASSSRKEQAWEFVKFATGPAGQALIGESCLFVPVLQSAIYSTGFAKAHNRVANLAVLTGGPVHSAGLPITPAWEKINALMDRNFGPVLRGVRPATSLAGLARAVDEVLNSP

SEQ ID NO: 63863 - protein, 644 aa, Mycobacterium leprae
MVDEIIEIDPVDDDPVNGAFATLAVPSRVVKLRATVCHALAQMGVATVARVPATWAMLVPRLPRLVVAVVAGLLFCASFPSLNWWWAAVVAFALLAWVLTHPTTTPVGGLGYGFLFGLAFYLPLLSWISSLVGATPWWALATAAAFLPGFFGLLAVVVGPLPGWPIWFAVVWAAQEWLKSVVPFGGFPWGSVAFGQADGPLLPLAQLGGAPLLSMAIVLVGCSTTAIALEVVKWWRSSGQSNRSDPPPAVVLPGVCVCLVLLAVVVVWPQVRHAGAGSGGEPVITVAAVQGNVPRLGLDFNAQRRAVLDNHVHETLRLAEDVRAGIVPQPQFVIWPENASDIDPLVNGDAGQEITVAAATIDAPILVGTVLDVQGPVPQAPEYTNTVIVWNPGTGPADRHDKEIVQPFGEYLPMPWLFKRLSKYADRVSHIVPRQSQSSGVVRIAGVPIGVTTCWEVIFDRAARKAVLNGAQLLAAPTNNATFNKTMSEQQLAFAKVRAVEHDRYVVVTGTTGISSVIAPDGSELVRTDFFVPAYLDMQVRLKAKLTPATCWGLTLQWILVGTAGAIVLAAMRHNNGSRSRIVLGLGSSASLKTRVRQANVREALTLRLGDRPLIHLSRLVTTLRSIYKGGQKPRYFGRHKGAK

SEQ ID NO: 63864 - protein, 409 aa, Mycobacterium leprae [sequence omitted]

SEQ ID NO: 63865 - protein, 479 aa, Mycobacterium leprae
MPRFVDRVVIHTWAGSGGNGCASIHRSKFKPLGGPDGGNGGRGGSVVFVVDPHVHTLLDFHFRPHITAPSGKQGMGNNRDGAAGADLEVKVPDGTVVLDEDGRLLADLVGAGTRFQAAAGGRGGLGNAALASRTRKVPGFALLGEQGESRDLTLELKSVADVGLIGFPSAGKSSLVSVISAAKPKIADYPFTTLVPNLGVVSVGEHAFTVADVPGLIPGASAGRGLGLDFLRHIERCAVLVHVVDCTSVEPGRDPILDIAALEAELAAYTPTLQGDTTLGDFAERPRAVVLNKIDVPDARELAEFVCDNIAAERGWPVFSVSTVTRENLQSLIFGLWQMISAYHAARSEPAPGRSLIRPVPVDDSGFTVEPDGQGGFVVTGTRPERWIHQTNFDNAEAVGYLADRLARLGVEDELLRVGAQPGCTVSIGGMTFDWEPQKPAGHPVAMSGRGTDARLESTDPVGTAERKVARHQRHKHGG

SEQ ID NO: 63866 - protein, 88 aa, Mycobacterium leprae
MAHKKGASSSRNGRDSAAQRLGVKRFGGQVVKAGEILVRQRGTKFHPGVNVGRGGDDTLFATSAGAVEFGVKRGRKTVNIVAVGLTAD

SEQ ID NO: 63867 - protein, 103 aa, Mycobacterium leprae
MATYAIVKTGGKQYKVAVGDVVKIEKLDFEPGAKVSLPVTLVVDGATVTTNAKALAKVAVTGKVLEHTKGPKIRIHKFKNKTGYHKRQGHRQQLTVLKVTGIK

SEQ ID NO: 63868 - protein, 924 aa, Mycobacterium leprae
MIDGAPPLEPSKEPTQHMELPDRLRVHSLARTLGTTSRRVLDVLSALDGRIRSAHSSVDRVDAVRVRDLLASQPNSPHELTAVPDNPVALEERDSRLVLETTVERPHYMPLFVAPQPIEVDDDSCADDDVESGDDSDVGDDEEQPDRPANRRRRRGRRGRGRGRGEQGGSDVQSDDVDGAVDSTESEDFDGQDFDESEDTEIGYDESGSSEAGNRRRRRRRRRKSGVGEDEGCAPDDPPNTVVHERTPRAAGRSASFDNGVNGTGSADIKGIDGSTRLEAKRQRRRDGRDAGRRRSSVLSEAEFLARRESVERVMVVRDRIRTEPPHPGARYTQIAVLEDGIVVEHFVTSAASASLVGNIYLGIVQNVLPSMEAAFVDIGRGRNGVLYAGEVNWEAAGLGGADRKIEQALKPGDYIVVQVNKDPVGHKGARLTTQVSLAGRYLVYVPGASSTGISRKLPDTERQRLKEILREVVPPDAGVIIRTASEGVKEEDIRKDVTRLQEHWEQIEAKTIQTKEKAAGAAVALYEEPDVLVKVIRDLFNDDFSGLVVSGDEAWNTINEYVNSVAPELVSKLTKYDPPIGPDGQHGPDVFAVHRIDEQLAKAMDRKVWLPSGGTLVIDRTEAMTVIDVNTGKFTGSGGNLEQTVTKNNLEAAEEIVRQLRLRDIGGIVVIDFIDMVLESNRDLVLRRLTEVLARDRTRHQVSEVTSLGLVQLTRKRLGTGLVEAFSTSCPNCTGRGILLHTDPANSTPMVGRKSESGGRRSKRSKKNRSDETAVVKVPVHAPGEHPMFKAMAAGSSSVVVGGEDESNESGTELTGKIDEPLEEQAVAGLDDVDQEDFDTDEEDDLDDDEELDDEEDLGDDDEELDLDDDLDVDEDESDSEADLDSADVLDRSTLLIRNRSGFARPRRRRAAGRPAGPPIHVD

SEQ ID NO: 63869 - protein, 886 aa, Mycobacterium leprae
MTTSPSSSADLLPKSWDPGAMESVIYQKWLNSGYFAADPASTKPGYSIVLPPPNVTGSLHMGHALEHTMMDALTRRKRMQGYEVLWQPGMDHAGIATQSVVEKQLAINGKIKEDFGRELFVDKVWDWKRESGGAIAGQMRRLGDGVDWSRDRFTMDDGLSRAVRMIFKRLYDAGLIYRAERLVNWSPVLRTALSDIEVIYDEIEGELISFRYGSLDDDEPHIVVATTRVETMLGDTGIAVHPDDKRYQHLVGTTLPHPFIDRELVIVADEHVDPEFGTGAVKVTPAHDPNDFEIGLRHNLPMPNVMDVKAVIVDTGTEFDGMDRFEARIAVREALAVQGRIVEEKRPYRHSVGHSERSGEVIEPRLSLQWWVRVESLAKAAGDAVRNGDTVIHPASMESRWFAWVDDMRDWCISRQLWWGHRIPIWYGPNGEQVCVGPDETPPEGWQQDPDVLDTWFSSALWPFSTLGWPQMTPELEKFYPTSILVTGYDILFFWVARMMMLGTFVGGDDAITLGGCRGPQVPFTDVFLHGLIRDEFGRKMSKSRGNVIDPLAWMDMFGADALRFTLARGSSPGGDLAIGEDHVRASRNFGTKLFNATRYALLNGAALVPLPALTALTDADRWILGRLEQVRAEVDSAFDGYEFSRACEALYHFAWDEFCDWYLELAKAQLADGLTHTTAVLAAALDTLLRLLHPVMPFITETLWQALTQLESLVIATWPEPSGISLDLVAAQRISDMQKLVTEIRRFRSDQGLVDRQKVPARLSGVEDSDLATQVGFVTSLALLTAASNDFRPSALLEVRLGPNKDRAVVVELDTSGTIDVAAERRRMEKDLAAAQKELASTAAKLANADFLAKAPEAVVVKIRDRQRMAKEETDRIIARLAGLQ

SEQ ID NO: 63870 - protein, 426 aa, Mycobacterium leprae
MARIGDSGDLLKCSFCGKSQTQVKKLIAGPGVYICDECIDLCNEIIEEELADADDVQLDELPKPVEIREFLEGYVIGQDTAKRTLAVAVYNHYKRIQAGEKGRDSKREPVELAKSNILMLGPTGCGKTYLAQTLAKMLNVPFAIADATALTEAGYVGEDVENILLKLIQAADYDVKRAETGIIYIDEVDKIARKSENPSITRDVSGEGVQQALLKILEGTQASVPPQGGRKHPHQEFIQIDTTNVLFIVAGAFAGLDKIIYERIGKRGLGFGAEVRSKAEIDTTDHFADVMPEDLIKFGLIPEFIGRLPVIASVINLDMESLVKILSEPKNALVKQYTWLFEMDGVELEFTNDALEAVADQAIHRGTGARGLRAIMEEVLLPVMYDIPSRDDVAKVVVTKETVQDNVLPTIVPRKPSRTERRDKSA

SEQ ID NO: 63871 - protein, 162 aa, Mycobacterium leprae
MSGMRVYLGADHAGYELKRQIIEHLKQSGHQPIDCGAFSYDVDDEYPAFCITAATRTVADPGSLGIVLGGSGNGEQIAANKVVGARCALAWSVETARLAREHNNAQLIGIGGRMHTVAEALTIVDAFVTTPWSEAQRHQRRIDILAEFERTHQAPPVPGAQA

SEQ ID NO: 63872 - protein, 862 aa, Mycobacterium leprae
MALPNLTRDQAVERSALITVDSYQINLDLTDGPDNAPSDRTFRSITTVVFDALAGADTVIDIAADAVRSATLNDHELDVSEYDESTGIPLPGLADRNVVVVDADCRYSNTGEGLHRFVDPVDDEIYLYSQFETADAKRMFACFDQPDLKATFEVEVTACKNWKVISNSVCINITEGTHTFATTPRMSTYLVALIAGPYAAWYASYRDEHGEIPLGIYCRASLAQFMDAERLFTQTKKGFNFYHKHFGLPYAFGKYDQLFVPEFNAGAMENAGAVTFLEDYVFRSKVTRASYERRTETVLHEMAHMWFGNLVTMTWWDDLWLNESFATFASVLCQSEATEFTEAWTTFATVEKSWAYCQDQLPSTHPIVADIPDLAAVEVNFDGITYAKGASVLKQLVAYVGLEQFLAGLRDYFRKHAFANATFDDLLVALENASGRDLSHWSQQWLKTTGINMLRPDFDVDADGKFTRFSVMQSGAEPGAGETRVHRLAVGIYDNCGEADKLVRVHREELDVEGTETEVPALVGISQGKLILVNDDDLTYCSLRLDAQSLQTALQSIADIAEPLPRTLVWSTAWEMTREAELRARDFVALVSGALHAETEVGVAQRLLLQAQTALGSYADPDWARDYGWPQFADRILELARAAVSGSDHQLAFINTLCSSVLSPRHVQTLAALLNDDPTELGLPGVQVDTDLRWRIVTALATAGTLDANGPQTPWIDAEMQRDPTAAGKRHGAQAAAARPQSDIKDKAFTTVVEDDTLTNAAGRAIIAGIVAPGQGELLKPFTARYFAAIPGVWTRRSSEVAQTVVIGLYPHWDISDVGIAAAEEFLTAPESKVPPALRRLVLEGQAAVKRALRARMFDSAD

SEQ ID NO: 63873 - protein, 367 aa, Mycobacterium leprae
MSPFGRVSATLPVFPWDTLADAKAVAESHPDGIVDLSVGTPVDPVAPLIQEALAAASSVAGYPTTAGTARLREAAVAALDRRYGITGLTEAAVLPVIGTKELIAWLPTLLGLRAGDVVVVPELAYPTYNVGARLAGARVLRADSLTQLGLQSPALFYLNSPSNPTGQVLAVNHLRKMVGWARNRGVVVVSDECYLGLGWDAEPFSVLHPLVCDGNHTGLLAVHSLSKSSSLAGYRAGFVAGDPDLVAELLAVRKHAGMMVPTPVQAAMVAALGDDAHEREQRDRYARRRDVLLPAVVSAGFTVDHSEAGLYLWASRGEPCRDSVEWFAQRGILVALGEFYGPGGCQHVRVALTASDERIAAVVARLS

SEQ ID NO: 63874 - protein, 628 aa, Mycobacterium leprae
MPFRNVAIVAHVDHGKTTLVDAMLRQSGALHERGQVQERVMDTGDLEREKGITILAKNTAVHCHNSDGTVTVINVIDTPGHADFGGEVERGLSMVDGVLLLVDASEGPLPQTRFVLRKTLAAHLPVILVVNKTDRPDARIAEVVEASHDLLLDVASDLDEEAAAAAERALGLPTLYASGRAGIASTEQPADGAVPTGDNLDPLFDVLMEHIPSPKGDPEAPLQALVTNLDASAFLGRLALVRIYNGKLRKGQQVAWMREVDGLPVTTDAKITELLVTKGVERSTTEEATAGDIVAVAGLPEIMIGDTLADPEHAHALPRITVDEPAISVTIGTNTSPLAGKVSGHKLTARMVRGRLDAELVGNISIRVVDIGRPDAWEVQGRGELALAVLVETMRREGFELTVGKPQVVTRTIDGKLHEPFEVMTIDCPEEFVGAITQLMAGRKGRMEEMANHAVGWVRMDFIVPSRGLIGFRTDFLTLTRGTGIANAVFDSYRPWAGEIRARDTGSLVSDRPGTITPFALLQLADRGQFFVSPGQDTYQGMVVGINPRPEDLDINVTREKKLTNMRSSTANVIETLTKPLELDLERAMEFCSFDECVEVTPEIVRVRKIELESNARARGRARAKVRG

SEQ ID NO: 63875 - protein, 558 aa, Mycobacterium leprae
MDVALAPPGPLASGGLRVTALGGISEIGRNMTIFEHLGRLLIIDCGVLFPGHDEPGVDLILPDLRHIEDRLDDIEALVLTHAHEDHIGAIPFLLKLRSDIPVVGSKFTLALVAAKCREHRIKPVFVEVVGGQSSRHGVFECEYFAVNHSIPDALTIAVYTGAGTVLHTGDIKLDQLPLDGRPTDLPGMSRLGDAGVDLFLCDSTNAEIPGVGPSESEVGPTLHRLIQGADGRVIVACFASNVDRVQQVIDAAVALGRRVSFVGRSMVRNMSIARDLGFLRVDDSHMIDIAAAEMMAPEQVVLITTGTQGEPMSALSRMSRGEHQSITLTSGDLVVLSSSLIPGNEEAVYGVIDALAKIGARVVTNAQARVHVSGHAYAGELLFLYNGVRPRQVMPVHGTWRMLRANAKLAASTGVPEDSILIAENGVSVDLVAGKASVSGAVPVGKMFVDGLITGDVGDVILGERLILSSGFVAVTVVVKRSTGRPVTVPQLYSRGFSEDPKALEPAVRKVEAELESLLAENVTDPSKIAQAVRRAIGKWVGETYRRQPMIVPTVIEV

SEQ ID NO: 63876 - protein, 165 aa, Mycobacterium leprae
MTVVGLIWAQSTTGVIGRDGGMPWRVPEDLTRFKQLTMGHPVVMGRRTWDSLPVGVRPLPGRRNIVLSRQIDFMAEGAEVFGSLEETISNLETEPEMWVIGGEQIYRLALPLATRCGVTEVDTYLLHEDDDVLAPVLDDTWVGVTGEWLVSCSGLRYRLHSYHRS

SEQ ID NO: 63877 - protein, 266 aa, Mycobacterium leprae
MLIATPYEDLLRLVLDCGVAKMDRTGTGTRSLFGQQLRYDLSVGFPLVTTKKVHFKSVVYELLWFLRGDSNVAWLHEHGVNIWDEWASSTGDLGPIYGVQWRSWPTSSGDYIDQISTALDLLRTEPDSRRIIVSAWNVGEIPQMALPPCHAFFQFYVAQGRLSCQLYQRSADMFLGVPFNIASYALLTHMMAAQSGLLVGEFVWTGGDCHIYDNHVEQVQLQLSREPRAYPELFLAQRDSIFDYVYEDVVVTNYDPHPAIKAPVAI

SEQ ID NO: 63878 - protein, 320 aa, Mycobacterium leprae
MSESSTGAGLGPGIVVIDKPSGMTSHDVVARCRRIFCTRRVGHAGTLDPMATGVLVLGVDRATKILGLLAGASKEYVATIRLGQTTSTEDAEGELLQCVSARHVTDEAIATAIGRLRGDIKQVPSAVSAIKVDGRRAYRLVREGHVVELQARPVRIDRFEVLAVRPGPEVGLADVIDLDVEVECSSGTYIRALARDLGDAFGVGGHLTSLRRTRVGRFELDQAWSLEDLAELPRLSRTLDETCLLMFPRRDLTVSEVEATSNGRPISSAGIDGIYAASDADGRVIALLRDEGPRTKSVVVLHPVFVRVSIGRGIVGVIEA

SEQ ID NO: 63879 - protein, 480 aa, Mycobacterium leprae
MGCNKRGVTRQEDDFSAWYNEVVAKAGLIDRGPAKGTMVIRPYGYRIWELLQDELDSKIKELGHENAYFPMLIPENYFNREAEHVEGFHPELAVVTHAGGKELSEPLVIRPTSETVIGDMMAKWITSHRDLPLRLNQWSNVVRWELRPRMLLRTIEFLWQEGHSAHIEKSDALRETLFALDIYTTLARDMAAIPIVSGEKTAGERFAGALNTYTIEAMMRDGKALQSATTHYLGDNFARAFNIRYTTAEEQQAFVHTTSFGLSTRMIGAIVMVHGDDKGLVLPPQVAPYQVVIVPITTGNKASEVGHAAADLARRLQAAGVRTHVDARPQLTPGWKYNEWELRGVPIRLELGPRDLEAGTTVMVRRIGEKAKQPIAIAAAPTELPGILEEFQRTLLERATQFRDDHTTLVDNWDAFATTVATGWALAIHCGNPECEEDIKAETAATPRCVPRQGAPATGRCIRCDAPSAYDKRVIFARAY

SEQ ID NO: 63880 - protein, 924 aa, Mycobacterium leprae
MAGKARVHELAKELGVTSKEVLARLNEQGEFVKSASSTVEAPVARRLRESFGGIKPAADKGAEQVATKAQAKRLGESLDQTLDRALDKAVAGNGATTAAPVQVDHSAAVVPIVAGEGPSTAHREELAPPAGQPSEQPGVPLPGQQGTPAAPHPGHPGMPTGPHPGPAPKPGGRPPRVGNNPFSSAQSVARPIPRPPAPRPSASPSSMSPRPGGAVGGGGPRPPRTGVPRPGGGRPGAPVGGRSDAGGGNYRGGGVGALPGGGSGGFRGRPGGGGHGGGGRPGQRGGAAGAFGRPGGAPRRGRKSKRQKRQEYDSMQAPVVGGVRLPHGNGETIRLARGASLSDFAEKIDANPAALVQALFNLGEMVTATQSVGDETLELLGSEMNYNVQVVSPEDEDRELLEPFDLTYGEDQGDEDELQVRPPVVTVMGHVDHGKTRLLDTIRKANVREAEAGGITQHIGAYQVGVDLDGSERLITFIDTPGHEAFTAMRARGAKATDIAILVVAADDGVMPQTVEAINHAQAADVPIVVAVNKIDKEGADPAKIRGQLTEYGLVAEDFGGDTMFIDISAKVGTNIEALLEAVLLTADAALDLRANSGMEAQGVAIEAHLDRGRGPVATVLVQRGTLRIGDSVVAGDAYGRVRRMVDEHGVDIEAALPSSPVQVIGFTSVPGAGDNFLVVDEDRIARQIADRRSARKRNALAARSRKRISLEDLDSALKETSQLNLILKGDNAGTVEALEEALMGIQVDDEVALRVIDRGVGGITETNVNLASASDAIIIGFNVRAEGKATELASREGVEIRYYLVIYQAIDDIEKALRGMLKPIYEENQLGRAEIRALFRSSKVGIIAGCIISSGVVRRNAKVRLLRDNIVVTDNLTVTSLRREKDDVTEVREGFECGMTLGYSDIKEGDVIESYELVEKQRA

SEQ ID NO: 63881 - protein, 347 aa, Mycobacterium leprae
MNIDMAALHAIEMDRGISVNELLDTIRSALLTAYRHTQGHQIDARIDIDRKTGVVKVIAREVDDDGNVISEWDDTPEGFGRIAATTARQVMLQRFRDAENERTYGEFSTREGEIVAGVIQRDSRANARGLVVVRMGSETKASEGVIPAAEQVLGESYEHGNRLRCYVVGVTRGAREPLITLSRTHPNLVRKLFSLEVPEIADGSVEIVSVAREAGHRSKIAVASRVPGLNAKGACIGPMGQRVRNVMSELSGEKIDIIDYDEDPARFVANALSPAKVVSVSVIDQTARAARVVVPDFQLSLAIGKEGQNARLAARLTGWRIDIRGDSPPCSAGQSEQNASHGMAHER

SEQ ID NO: 63882 - protein, 534 aa, Mycobacterium leprae
MVTLYDHERAVHNWTAARSDRPAPSRLTQQVEPASERTSKYPTLLPSGRFPSGRFIAAVIVIGGMQLLATMDSTVAIVALPKIQNELSLSDAGRSWGITAYVLTFGGLMLLGGRLGDTIGRKRTFIVGVALFTISSVLCAVAWDEVTLVIARLLQGIGSAIASPTGLALVATTFSKGSARNTATAVFAAMTAIGSVMGLVVGGALTEVSWRLAFLVNVPIGLVMIYLARTALHETHKERMKLDAAGAILATLACTAAVFAFSMGPEKGWISLTTIGSGLVALVAAIAFAVVERTAENPVVPFDLFRDRNRLVTFIAIFLAGGVIFSLTVSIGLYIQDILGYSALRAGIGFIPFVIAMGIGLGVSSQLVSRFSPRVLTIGGGWLLMVAMLYGWAFMNRGVPYFPNLLAPIVVGGIGIGMAVVPLTLSAIAGVGFDRIGPVSAIALMLQSLGGPLVLAVIQAVITSRTLYLGGTTGPVKFMNDAQLRALDHGYTYGLLWVAGAVVIVGVAALFIGYTPEQVAYAQEVKEAVDAGEL

SEQ ID NO: 63883 - protein, 392 aa, Mycobacterium leprae
MNMRLGMPEAPAPGLAPRRITRQLMVGNVGVGSDHQISVQSMCITKTHDVNATLQQIAELTTAGCDIVRVACPRQEDADALAEIARHSKIPVIVDIHFQPKYIFAAIDAGCAAVRVNPGNIKEFDGRVGEVAKAAAAAGIPIRIGVNAGSLDKRFMDKYGKATSEALVESALWEASLFEEHGFGNIKISVKHHDPVVMVAAYEQLAAQCDYPLHLGVTEAGPVFQGTVKSAVAFGALLSKGIGDTIRVSLSAPPVEEIKVGNQILESLNLRPRSHEIVSCPSCGRAQVDVYKLANEVSAGLDGLEVPLRIAVMGCVVNGPGEARDADLGVASGNGKGQIFVKGEVIKTVPEAQIVETLIEEAMRLVSEMGTEKGSDHCSETTRSGSPVVTVN

SEQ ID NO: 63884 - protein, 312 aa, Mycobacterium leprae
MASTDPGTGTPLDESVPGIKRAMRQSTKNTPRAGRNLPAAIAVGLSIGGVLVATLVFAPRIWVVLCAGAIFVASHEVVRRLREAGYVIPAIPLLIGGQFTVWLTWPYRTVGALAGFGATVVVCMIWRLVMHDNSKQHESREALAGPPVSNYLRDASATVFLAAWVPLFASFAALLVYPKDGAGRVFCLMIAVVASDVGGYTVGVLFGKHPLVPRISPNKSWEGFAGSLVCGTTATILTATFLAGKTPWVGALLSFVLVLTCTLGDLVESQVKRDLGIKDMGRLLPGHGGLMDRLDGVLPSAVVAWTMLTLLP

SEQ ID NO: 63885 - protein, 185 aa, Mycobacterium leprae
MIDEALFDAEEKMEKAVSVAREDLSMIRTGRANPGMFSRLVIDYYGSATPITQLASINVPEARLVVIKPYDAIQLHAIETAIRNSDLGVNPSNDGTLIRVAVPQLTEERRRELVKQAKCKGEDAKVSVRNIRRKVMEELHRIRKDGEAGEDEVSRAEKDLDKTTHQYVIQIDELVKHKEGELLEV

SEQ ID NO: 63886 - protein, 279 aa, Mycobacterium leprae
MTESWESQVAGSAVPKPQLMSANGVSAAAAGRGERLNHAGNPGHRSKYSRVLLKLGGEMFGGGQVGLDLDVVAQVARQIAEVVRGGVQVAVVIGGGNFFRGAQLQQRGMERTRSDYMGMLGTVMNSLALQDFLEKEGIATRVQTAITMGQVAEPYLPLRAVRHLEKGRVVIFGAGMGLPYFSTDTTAAQRALEIGADVVLMAKAVDGVFVEDPRVNPEAELLTAISHREVIDRGLRVADATAFSLCMDNGMPILVFNLLTNGNIARAVAGEKIGTLVTT

SEQ ID NO: 63887 - protein, 276 aa, Mycobacterium leprae
MANFTVADVKRLRALTGAGMLDCKSVLVETDGNFDKAVESLRIKGAKDVGKRAERATAEGLVAAKDGALIELNCETDFVAKNAEFQKLANQIVGVVAAAKIVDVDALKGASVGDKTVEQAIAELAAKIGEKLKLRRAAIFNGTVATYLHKRAADLPPAVGVLVEYGAGTDAANSTAAAHAAALQIAALKARFLSRDDVPEDVLASERRIAEETAKAAGKPEQSLPKIVEGRLNGFFKDSVLLEQPSVFDNKKTVKVLLDEAGVTVTRFVRFEVGQA

SEQ ID NO: 63888 - protein, 277 aa, Mycobacterium leprae
MAVVTMKQLLDSGTHFGHQTRRWNPKMKRFIFTDRNGIYIIDLQQTLTFIDKAYEFVKETVARGGLVLFVGTKKQAQESVAAEATRVGMPYVNQRWLGGMLTNFSTVHKRLQRLKELEAMEQTGGFEGRTKKEILGLTREKNKLERSLGGIRDMAKVPSAIWVVDTNKEHIAVGEARKLGVPVIAILDTNCDPDEVDYPIPGNDDAIRSAELLTTVIASAVAEGLQVRAGLRCGDGKPETEAVEPLPEWEQELLAGAGSSALNDSGADLSEANPTEA

SEQ ID NO: 63889 - protein, 240 aa, Mycobacterium leprae
MATTWPPCRIIRKSGGLRGMWTLEYELQRSGLGPVAGVDEVGRGACAGPLVVAACVLGPGRLEESLDDSKKLSAKGREMLFPLICRYALAYHVVFIPSVEVDRHGVQVANIEGMRRAVAGLSVRPGYVLSDGFRVPGLSVPSLPVVGGDAVVACIAAASVLAKVSRDRLMVAMDADYPGYGFAAHKGYCTRAHSLALTQLGPCPEHRYSFINVRRIVTRSNTRAVAGFTPAPPAEHGECR

SEQ ID NO: 63890 - protein, 289 aa, Mycobacterium leprae
MTETTDSVPEPPSDADQLQPKVSICGLDMPAEVSETAAEAAIGVSEPKKRSALWEFAILAVIAIGLYYVMLTFVARPYLIPSESMEPTLHGCSGCVGDRIMVDKITYRFSSPQPGDVIVFKGPPSWNTMYKSIRSNNIVLRSVQNALSFVGFVPPDENDLVKRVIAVGGQTVQCRSDTGLTVNGKPLKEPYLRPVTMNADLSFSPCLGSEFGPVTVPQGRLWVMGDNRIHSADSRYHCNSTDVVNGLSCTGDPNSGTVPVSNVIGKARVVVWPPSRWGGVGSVNSQQGQ

SEQ ID NO: 63891 - protein, 113 aa, Mycobacterium leprae
MNRLDFVDQASLRDDIPAFSPGDTINVHVKVIEGVKERIQVFKGVVIRRQGGGIRETFTVRKESYGVGVERTFPVHSPNIDHIEMVIRGDVRRAKLYYLRELRGKKAKIKEKR

SEQ ID NO: 63892 - protein, 238 aa, Mycobacterium leprae
MKIDIVTIFPAYLDPLRQSLPGKAIESGLVDVQVHDLRRWTHDVHHSVDDVPYGGGPGMVMKAPVWGEALDEICFDETLLVIPTPAGALFTQATAQCWSTERHLVFACGRYEGIDQRVVDDAVRRMRVEEVSIGDYVLPGGESAAVVMIEAVLRLVAGVLGNPASHRDDSHSPDLGRLLEGPSYTRPPTWRGLDVPPVLLSGDHARIAAWRREASLRRTRKRRPDLSGARFVWGLGLS

SEQ ID NO: 63893 - protein, 179 aa, Mycobacterium leprae
MHAHGALLELTIGRVVKAHGIGGEVVVEIRTDDPASRFCPGNILRAKDFPRGGPERRYTVVYAREHGARLLVRLAGVSDRDAADALRGSLFVIDSLDLPPIDEPDTYYDHQLEGLQVRTMMGRDVGVVAEVLHTAAGELLAVRCDSGEVLVPFVGAIVKLVSLDDGIVEIDPPKGLLDL

SEQ ID NO: 63894 - protein, 80 aa, Mycobacterium leprae
MSTVVVDAVEHVVRGIVDNPDDVRVDLVISRRGRTVEVHVHPDDLGKVIGRGGRTATALRKLVAGIGGRGIRVDVVDTDQ

SEQ ID NO: 63895 - protein, 160 aa, Mycobacterium leprae
MAVKIKLTRLGKIRNPQYRVIVADARTRRDGRSIEVIGRYHPKEEPSLIDINSERTQYWLSVGAKPTEPVLKLLKITGDWQKFKGLPGAEGRLKVAPPKPSKLELFNAALAVADGGPTTEATRPKKKVSAKKAAKAVESDAEGAKATKAYALAEGDEQSE

SEQ ID NO: 63896 - protein, 521 aa, Mycobacterium leprae
MFESLSNRLTGVIQGLRGKGRLTDADIEATTREIRLALFEADVSLPVVRAFVHRIKERARGTEVSAALNPAQQIVKIVNEELIGILGGETRQLAFAKTPPTVVMLAGLQGSGKTTLAGKLAVRLRRQGHTPLLVACDLQRPAAVNQLQVVGERAGVPVFAPHPGASPDSGPGDPVAVASAGLVEARAKHFDVVIVDTAGRLGIDDELMAQAGAIREAINPDEVLFVLDAMIGQDAVTTAAAFGAGVGFTGVVLTKLDGDARGGAALSVREVTGVPILFATTGEKLDDFDVFHPDRMASRILGMGDVLSLIEQAEQVFDAEQAEAAAAKIVAGELTLEDFLEQMLAVRKMGLIGNLLGMLPGAGQVKEVLEQVDDKQLDRLQAIIRGMTPQERADPKIINASRRLRIANGSGVTVSEVNQLVDRFFEARKMMSSVLGGMGIPGMGRKSATRKSKGGKGKKRARGPTSPKVRSPFGPARPGMPDMMNMPPSFPDLSQMPDGLNELPPGLAAFDLSKLKFPGKT

SEQ ID NO: 63897 - protein, 656 aa, Mycobacterium leprae
MSAQVEQLEFQAEARQLLDLMVHSVYSNKDAFLRELISNASDALDKLRLEAFRNKDLDPRTVDTSDLHIEIEVDKNTRILTVRDNGIGMTRAEVVDLIGTLAKSGTAKLRQKLHAAKNLKDTAASEGLIGQFGIGFYSSFMVANKVELLTRKAGETAATRWSSDGEATYTIESVDEAPQGTSVTLHLKPEDFEDELHDYTSEWKIRELVKKYSDFIAWPIRMEVERRAPATSDGEGADGEEQVTIETQTINSMKALWTKSKDEVSEDEYKEFYKHIAHAWDDPLEVIAMKAEGTFEYQALLFIPSHAPFDLFNSDAKIGMQLYVKRVFIMSDCDQLMPMYLRFVKGVVDAEDMSLNVSREILQQNRQINAIRRRLTKKVLSAIKDLQAERPQDYRTFWTQFGKVLKEGLMSDSDNRDTLLHISSFASTHSDEEPTTLAQYVERMKDGQDQIFYATGESRQQVMNSPHLEAFKAKGYEVLLLTDPVDEVWVGMAPEFDGKPLKSVARGEVDLESEEEKTAHEAERKEQEQNFAGLVNWLKETLSDHVKEVRLSTRLTESPACLITDAFGITPALARIYRASGQDVPFGKRILELNPNHPLITGLQQAHENGGDDTHLRQLSETAELLYGTALLAEGGALENPAKFAGLLADLLSRSM

SEQ ID NO: 63898 - protein, 430 aa, Mycobacterium leprae
MSEGLWIATAVAAVLVVIAALILGSVRYRRRRISLIFSSLSSGPSASDRSGSYTASSGITFSQTALPVQPADRIDTGELPAVGDDATVPRDSPRHTISDVLLPESELITSPDEPEAAVPHIDAIVPPEGRLDRLRGRLARTQNAFGRSILGLIVGGDLDEDSWQELEDTLLVADLGPVATESVMSALRSRLLNSNVHTESDARTMLRDVLISELQPDMDRSIRALPHADHPAVLLIVGVNGTGKTTTVGKLARVLVADGRRVVLGAADTFRAAAADQLQTWASRVGAELVRGVEGADPASVAFDAVDKGIGAGADVVVIDTAGRLHTKVGLMDELDKIKRVVTRRAAVDEVLLVLDATIGQNGLTQVRVFAEVVDITGAVLTKLDGTAKGGIVFRIQRELGVPVKLVGLGEGPDDLAPFEPAVFVDALLE

SEQ ID NO: 63899 - protein, 1203 aa, Mycobacterium leprae
MYLKSLTLKGFKSFASPTTLRFEPGITAVVGPNGSGKSNVVDALAWVMGEQGAKTLRGSKMEDVIFAGTLSRAPLGRAEVTLIIDNSDNVLPIEYSEVSITRRMFRDGASEYEINGSSCRLMDVQELLSDSGIGREMHVIVGQGKLDQILQSRPEDRRTFIEEAAGILKYRRRKEKALRKLDAMSANLARLTDLTTELRRQLKPLSRQAEVARRAATIQADLRDARLRLAADDLVSRQGQRDAIVEAETMMRRDHDEAAARLAVASEELAAHEAALTELSGRAESVQQIWFGLSTLVERVSATIRIAGERAYHLDVDPATPSDTDPDVLEAEAQQMEVAEQQLLAELAVARTQLEAARAELADRERHAVEADKAHLEAVRAEADRREGLALLAGQVETMRARIESIDDSVARLSERIEEVTARTQQILAEFETVQGRVGELDQSEVHLDEQHERAVAALRFANERVAELQSAERDAERQVVSLRARIDALTMGLERKDGAAWLARNYSDTGLLGSIAKLVKVRPGYEAALAAVLGPAADALAVDSLGAARSALTALKEADAGRATLVLADWLADAGPACVTGLPDGAQRALDLIEAPPWLQGALIAMLYGVVVVNYLAEALGVVDICPQLRVVTVDGDLVGAGWVSGGSGRRLSTLEVTSEIDKAGAELAAAEAHMAQLNAALSGALSEQVAHSDATEQALVALNESDTAILSMYDQLGRLGQEVRAAEAEWESLLAQREELEARRVSILEEVVELETRLHNVEQIQHVHALDENSAAARQLIVAAAEEARGVEVEALLAVRTAEERVNAVCGRANSLRRAAAAEREVRLRDQQAHAARIRAAAVAAAVTDCGQLLASRLTQAVDLAARHRDALATERQQRSVAIAAVRYEVNTLRVRLATLTDSLHRDEVANVQAALRIEQLEQLVLEQFGIAPVDLIAEYGPQVALLPTELEMAEFQQARERGEQVTSPAPMPYDRATQERRAKRAERELAELGRVNPLALEEFAALEERYNFLSTQLEDVKGARKDLLDVVAEVDARILQVFSDAFVDVEREFRGVFTSLFPGGEGRLRLTDPDDMLTTGIEVEARPSGKKVSRLSLLSGGEKSLIAVAMLVAIFKARPSPFYIMDEVEAALDDVNLCRLIGVFEQLRGQSQLIIITHQKPTMEVADTLYGVTMQGDGITAVISQRMRGQQVESLVTSSS

SEQ ID NO: 63900 - protein, 448 aa, Mycobacterium leprae
MDRQKEFVLRTLEERDIRFVRLWFTDVLGYLKSVAIAPAELEGAFEEGIGFDGSSIEGFARVSESDTVAHPDPSTFQILPWATTAGHHHSARMFCDITMPDGSSSWADPRHVLRRQLTKANDLGFSCYVHPEIEFFLLKAGPEDGSMPIPVPVDNAGYFDQAVHDSALNFRRHAIEALEFMGISVEFSHHEGAPGQQEIDLRFADALSMADNVMTFRYVIKEVAIENGARASFMPKPFAQHPGSAMHTHMSLFEGDVNAFHSDDDPLQLSDVGKSFIAGILEHASEISAVTNQWVNSYKRLVVGGEAPTTASWGAANRSALVRVPMYTPHKTSSRRVEVRSPDSACNPYLAFAVLLAAGLRGVEKGYVLGPQAEDNVWDLTPEERLAMGYRELPTSLDSALGAMEVSEFVAEALGEHVFDFFLRNKRAEWANYRSHVSLYELKTYLSL

SEQ ID NO: 63901 - protein, 286 aa, Mycobacterium leprae
MSEQNVNVYGADPSTSSIQSIQRTKIRTKHLQKMKAEGHKWAMLTAYDYSTARVFDEAGIPVLLVGDSAANVVYGYDTTVPVSADELLPLVRGVVRGAGHALVVADLPFGSYEPGPTAALAVATRFMKEGGAHAVKLEGGQRVAEQIACLTAAGIPVMAHIGFTPQSVNSLGGFRVQGRGGDAEQTVADAVAVAEAGAFSVVMEMVPTELATQITGKLTIPTIGIGAGLNCDAQVLVWQDMAGLSSGKVARFVKQYADIAGELRRAAMQYAEEVASAVFPAEEHCF

SEQ ID NO: 63902 - protein, 414 aa, Mycobacterium leprae
MNHNHFVPAPPRRLPLELLDTVPDSLLRRLKQYSGRLATEAVTAMQERLPFFADLEASQRASVTLVVQTAVVNFVQWMQNPHSDVSYTAQAFELVPQDLARRIALRHTVDMVRVTMEFFEEVVPLLARSEEQLTALTVGILKYSRDLAFTAATAYADAAEARGTWDSRMEASVVDAVVRGDTGPELLSRAAALNWDTTAPATVVVGTPTPNHDGPNGQVSSERASQEVREIAARHGRAALTDVHGTWLVAIISGQLAPTDKFFSDLLHAFSDGPVVIGPTAPMLTAAYHSASEAVSGMNAVAGWSGAPRPVQARELLPERALMGDASAIVALHTDVMLPLADAGPTLIETLDAYLDCGGAIEACARKLFVHPNTVRYRLKRITDFTGHDPTLPRDAYVLRVAATVGKLNYPTHH

SEQ ID NO: 63903 - protein, 115 aa, Mycobacterium leprae
MAVTQEEIIAGIAEIIEEVTGIEPSEITPEKSFVDDLDIDSLSMVEIAVQTEDKYGVKIPDEDLAGLRTVGDVVTYIQKLEEENPEAAEALRAKIVSENPEAAANVQARLETESK

SEQ ID NO: 63904 - protein, 416 aa, Mycobacterium leprae
MTMPSTANGGFPSVVVTAVTATTSISPDIESTWKGLLAGESGIHVLEDEYITKWDLPVKIGGHLKEPVDSHMSRLDLRRMSYVQRMSKLLSGRLWESTGSPEVDPDRFTVVVGTGLGGAERIVESYDLMNAGGPRKVSPLAVQMIMPNGAAATVGLQLGACAGVMTPVSACSSGSEAIAHAWRQIIMGDADVAVCGGVEGPIEALPIAAFSMMRAMSTRNDDPEGASRPFDKNRDGFVFGEAGALMLIETEEHAKARGAKPLARLLGAGITSDAFHMVAPAADGVRAGRAMTRSLELAGLSAKDVDHVNAHGTATPIGDSAEANAIRVAGCEQAAVYAPKSALGHSIGAVGALESVLTVLALRDGVIPPTLNYQTPDPEIDLDIVAGEPRYGDYRYAINNSFGFGGHNVALAFGRY

SEQ ID NO: 63905 - protein, 473 aa, Mycobacterium leprae
MTITAPKVVGKSIDPRDPLLRLSNFFDDGRVEPLHERNQSGVFAATGTVNGLRTIAFCTDGTVMGGAMGIEGCAHIVNAYDTAIEEQSPIVGIWHSGGARLAEGVRALHAVGQVFEAMIRASGYIPQISVVVGFAAGGAAYGPALTDVVIMAPEGRVFVTGPDVVRSVTGEDVDMASLGGPETHHKKSGVCHIVANDELDAYERGRRLVGLFCQQGHFDRSKAEAGDTNIQALLPESSRRAYDVHPVVTAILDENTPFDEFQANWAPSMVVGLGRLSGRTVGVLANNPLRLGGCLNSESAEKAARFVRLCDAFGIPLVVIVDVPGYLPGVDQEWGGVVRRGAKLLHAFGECTVPRVTLVTRKTYGGAYIAMNSRSLNATKVFAWPDAEVAVMGAKAAVGILHKRKLAAAPNDEREALHDDLAAEHERIAGGVDSAIDIGVVDEKINPAHTRSKLTEALAQSPVRRGRHKNIPL

SEQ ID NO: 63906 - protein, 282 aa, Mycobacterium leprae
MPELPEVEVVRRGLQDYIVGKTITAVRVHHPRAVRRHVAGPTDLTNRLLGTRINGIDRRGKYLWFLLDTDIALVVHLGMSGQMLLGTVPRVDHVRISALFDDGTVLNFTDQRTLGGWLLADLMTVDGSVLPVPVAHLARDPFDPRFDVEAVVKVLRCKHSELKRQLLDQQTVSGIGNIYADEALWRAEVHGARIAATLTRRQLAAVLDAAADVMRDSLAKGGTSFDSLYVNVNGESGYFDRSLDAYGREGEGCRRCGAVMHREKFMNRSSFYCPRCQPRPRR

SEQ ID NO: 63907 - protein, 282 aa, Mycobacterium leprae
MMPSTPRTSIPSITLNDENTMPLLGLGVAELSEDETERAVLAALEIGCRLIDTAAAYGNEAAVSRAIAASGIPRAQLFVTTKLATPDQGFTKSQDACNASLDRLGMDYVDLYLIHWPAPPVGQYVDAWGGMIQSRGEGHARSIGVCNFTEEHLSAIIDLTFVTPAVNQIELHPLLNQDEMRKSNAQHNVITQSYTPLVLGRLMDNSTLTAIAAEYGKTPAQVLLRWNLQLGNAVVFRSAKAEHIASNFDVFDFELAVNHMDAMNELHDGTRLRPDPETYAGS

SEQ ID NO: 63908 - protein, 325 aa, Mycobacterium leprae
MCNHECGALGESVTLEQLGEFAVIDRLVRGRRQPAVVALGPGDDAAVVTASDGRIVVSTDVLVQDRHFRLDWSTPHDVGRKAIAQNAADIEAMGARATTFVVGLGAPGDTPVAQVDALVDGLWDEAGRIGAGIVGGDLVSCPQWVLSVTVLGDLDGRAPVLRSGAKNGSMVAVAGALGRSAAGYALWHKGIDGFDDLRRRHLVPEPPYGKGVAAAACGAQAMIDVSDGLIADLRHVARASGVSIDLSTAALAADHAALIAAATAVGGDPWPWVLGGGEDHALVACFAGTALSGWRIIGRVFDGPARVLVDGQEWRGHAGWQSFGG

SEQ ID NO: 63909 - protein, 384 aa, Mycobacterium leprae
MNVYQRPLMPWLPSGGRVRVAVVFGGRSNEHAVSCLSAGSILRNLDRQRFDVVAVGITPEGTWMLTDPNPDALAIANRQLPAVSCESGIELTLPADPRRSGQLVSLSHGAGLGAGEVLTSVDVVFPVLHGPYGEDGTIQGLLELARVPYVGAGVLASAAGMDKEFTKKLFAAEGLPLSAYTVLRPLRPTLHRQECERLSLPVFVKPARGGSSIGISRVSSWGQLPSAIAYARRHDPKVIVEAAVNGRELECGVLEMPDGTVAASAVGEIRVAGVSGSEDSFYDFTTKYLDDAAELDVPAKVDDDVADEVRQLAIQAFRAIDCQGLARVDFFLTDDGPVINEINTMPGFTMTSMYPKLWAVSSVDYPTLLATMVDTALARGVGMR

SEQ ID NO: 63910 - protein, 351 aa, Mycobacterium leprae
MEMAGIVVRSESAVAVMGAGAWGTALAKVLIDAGGPEAGVVLWARRPDVAERINTTRCNRAYLPGTLLPPGIRATADPADALRGASTVLLGVPAQRMRANLERWGGLVADGATLVSLAKGIELGTLMRMSQVIVSVTGVDPAQVAVLSGPNLASEIAQCQPAATVIACSDLGRAVALQRMLSSGYFRPYTNSDVVGTEIGGVCKNVIALACGMAAGVGFGENTAATIITRGLAEIIRLGMALGAQVTTLAGLAGVGDLVATCTSPHSRNRSLGERLGRGEIMQSILHGMDGSDGGDGYVVEGVTSCASVLALASSYDVEMPLTDAVHRVCHKGLSVEKAMALLLGRSTKSE

SEQ ID NO: 63911 - protein, 200 aa, Mycobacterium leprae
MNKAELIDVLTQKLGSDRRQATAAVENVVDTIVRAVHKGDSVTITGFGVFEQRRRAARVARNPRTGETVKVKPTSVPAFRPGAQFKAVVAGAQRLPLEGPAVKRGVATSAAKKAAIKKAPVKKALAKKAATKAPAKKAVKAPAKKITTAVKVPAKKATKVVKKVAAKAPVRKATTRALAKKAAVKKAPAKKVTAAKRGRK

SEQ ID NO: 63912 - protein, 485 aa, Mycobacterium leprae
MEMDNERKQVGGARKPRTLAEKVWDDHVVVAGQGYHQDRGPDLIYIDLHLVHEVTSPQAFDGLRLAGRWVRRPDLTVATEDHNVPTVDIDKPIADPVSRIQVETLRRNCAEFGVRLHPMGDIEQGIVHVVGPQLGLTQPGMTIVCGDSHTSTHGAFGAIAMGIGTSEIEHVLATQTLPLRPFKTMAVTVDGRLPAGVTAKDIILALIAKIGTGGGQGYVLEYRGSVIESMSMEGRMTICNMSIEAGARAGMVAPDETTYEFLRDRPHAPTGKQWDAAVAYWQQLRTDDDAVFDTEVYLDATSLSPFVTWGTNPGQGVPLAASVPDPELMIDDVARQAAEKALAYMDLRPGTPMRDIAVDAVFVGSCTNGRIEDLRLVADVLRGHKVADGVRMLIVPGSMRVRAQAEAEGLGEIFITAGAQWRQPGCSMCLGMNPDQLAPGERCAATSNRNFEGRQGKGGRTHLVSPAVAAATAVRGTFSAPADLN

SEQ ID NO: 63913 - protein, 502 aa, Mycobacterium leprae
MTAVTSDGTPQAAKVRVRFCPSPTGVPHVGMVRTALFNWAYARHTGGTFVLRIEDTDADRDSEESYLALLDALRWLGLNWDEGPEVGGPYGPYRQSQRTDIYREVVAKLLATGEAYYAFSTPEEVENRHLAAGRNPKLGYDNFDRDLTDAQFSAYLAEGRKPVVRLRMPDEDISWDDLVRGTTTFAVGTVPDYVLTRASGDPLYTLVNPCDDALMKITHVLRGEDLLSSTPRQVALYQALIRIGMAERIPEFGHFPSVLGEGTKKLSKREPQSNLFAHRDRGFIPEGLLNYLALLGWAIADDHDLFSLDEMVAAFDVVDVNSNPARFDQKKADAVNAEHIRMLDSEDFAGRLRDYFTTHGYHIALDPANYEAGFVAAAQLVQTRIVVLGDAWDLLKFLNDDEYSIDSKAAAKELDADAGPVLDVACAVLDSLVDWTTASIEDVLKVALIEGLGLKPRKVFGPIRVAATGALVSPPLFESLELLGRARSLQRLSAARARVTSA

SEQ ID NO: 63914 - protein, 242 aa, Mycobacterium leprae
MFARELAEYPFGELTFTGRSWPLADVRLLAPMLASKVVCIGKNYADHIVEMGGQTGLASADPVIFLKPNTAIIGPNVPIRLPANASPVHFEGELALVVGRSCKDVPAVQAVDCILGYTIGNDMSARDQQRADGQWTRAKGHDTFCPVGPWIVTDLGPLDPADLELRTAVNGEVKQHSRTSLMIHGIGAIMEWISAVMTLLPGDLILTGTPAGVGPVEDGDIVSITVEGIGTLTNPVVRKGKS

SEQ ID NO: 63915 - protein, 333 aa, Mycobacterium leprae
MFYDDNADLSIIQRRKVGVIGYGSQGYAHSLSLRDSGVQVRVGLPEGSKSRPKAFEQGLDVDTPAEVAKWADVIMLLVPDTAQADVFENDIEPNLQPGDALFFGHGLNIHFELVKPSGDVTVAMVAPKGPGYLVRRQFVDGKGVPCLIAVNQDPTGTGEALALSYAKAIGGTRAGVIKTTFKDETETDLFGEQAVLCGGTEELVKAGFDVMVEAGYPPEMAYFEVLHELKLIVDLMYEGGIARMNYSVSDTAEFGGYLSGPRVIDADTKERMRGILRDIQDGSFVKKLVANVEGGNKQLEVLRKENAEHPIEVTGKKLRDLMSWVDRQSTETA

SEQ ID NO: 63916 - protein, 169 aa, Mycobacterium leprae
MVGLPTHTLSVLVEDTPGVLARVAALFSRRGFNIESLAVGATECKTMSRMTIVVSAEETPLEQVTKQLHKLINVIKVVEQEADNSLSRELALIKVRAEAGTRSQVIEAVHLFRARVIDVSLESLTVEATGDCSKIEALLRVLEPFGVREIVQSGVVSLSRGPRGIGTVR

SEQ ID NO: 63917 - protein, 625 aa, Mycobacterium leprae
MSAPTKPHARPQGAGNSVPNTVKPATQFPSKPAVAKLERVSPEQLTGAQSVIRSLEELDVEVIFGIPGGAVLLVYDPLFYSKKLRHVLVRHEQGAGHAASGYAHVTGKVGVCMATSGPGATNLVTPLADAQMDSVPVVAITGQVGRSLIGTDAFQEADISGITMPITKHNFLVRAGDDIPRVLAEAFHIASSGRPGAVLVDIPKDVLQGQCKFSWPPKMDLPGYKPNTKPHNRQIRAAAKLIADARKPVLYVGGGVIRGEATEQLRDLAELTGIPVVSTLMARGAFPDSHHQNLGMPGMHGTVAAVAALQRSDLLIALGTRFDDRVTGKLDSFAPDAKVIHADIDPAEIGKNRHADVPIVGDVKAVIVELIAMLRHYEVPGNIEMTDWWSYLDGVRKTYPLSYSPQSDGTLSPEYVIEKLGEIVGPEAVYVAGVGQHQMWAAQFISYEKPRTWLNSGGLGTMGFAIPAAMGAKIARPEAEVWAIDGDGCFQMTNQELATCAIEGAPIKVALINNGNLGMVRQWQALFYQERYSQTDLATHSHRIPDFVKLAEALGCVGLRCECEEDVVDVINQARAINNRPVVIDFIVGADAQVWPMVAAGASNDEIQAARGIRPLFDDESEGHV

SEQ ID NO: 63918 - protein, 509 aa, Mycobacterium leprae
MTVVSGASKASGADLLDYDVVVARFDPVFGLEVHVELSTVTKMFCGCATTFGAEPNTQVCPVCLGLPGSLPVLNRAAVQSAIRIGLALNCEIVPWCRFARKNYFYPDVPKNYQISQYDEPIAINGYLEVPLEDDTTWRVEIERAHMEEDTGKLTHLGSETGRIYGATTSLIDYNRAGVPLIEIVTKPIEGAGVRAPQIARAYVKALQDLLRTLDVSDVRMDQGSMRCDANVSLKPIGTVEFGTRSEIKNVNSLKSVEMAVRYEMQRQGAILVSGGRIAQETRHFHEDGYTSPGRAKETAQDYRYFPDPDLEPVAPSRELVEQLRQTIPELPWLSRKRIQQEWGISDEVMRDLVNAGAVELVAATVKNGASSEQARAWWGNFLVQKANEANITLDELAITPAQVAVVVALVDEGKLSIRLARQVVEGVLAGEGEPEQVMVDRDLALVRDDSVMQAAVDEALAADPDVAEKIRGGKVAAAGAIVGAVMKTTRGQADAARVRELVLAICGQG

SEQ ID NO: 63919 - protein, 343 aa, Mycobacterium leprae
MRIGILTGGGDCPGLNAVIRAIVRTCDARYGSSVVGFQDGWRGLLENRRMQLCNDDRNDRLLAKGGTMLGTAHVHPDKLRAGLHQIKQTLDDNGIDVLIPIGGEGTLTAAHWLSQEDVPVVGVPKTIDNDIDCTDVTFGHDTALTVATEAIDRLHSTAESHQRVMLVEVMGRHAGWIALSSGLASGAHMTLIPEQPFDVEEVCCLVKRRFQRGDSHFICVVAEGAKPVPGSITLRQGGMDEFGHERFTGVAAQLGAEVEKRINKDVRVTVLGHVQRGGTPTAFDRVLATRFGVNAADASHAGEYGQMVSLRGQDIGRVPLEDAVRQLKLVPESRYDDAAAFFG

SEQ ID NO: 63920 - protein, 497 aa, Mycobacterium leprae
MIGSLHEIIRLDASTLAAKIVAKELSSVEITQACLDQIEATDDTYRAFLHVAAEKALSAAAAVDKAVAAGGQLSSTLAGVPLALKDVFTTVDMPTTCGSKILQGWHSPYDATVTTRLRAAGIPILGKTNMDEFAMGSSTENSAYGPTRNPWNVDRVPGGSGGGSAAALAAFQAPLAIGSDTGGSIRQPAALTATVGVKPTYGTVSRYGLVACASSLDQGGPCARTVLDTALLHAVIAGHDARDSTSVEAAVPDIVGAAKAGESGDLHGVRVGVVRQLRGEGYQSGVLASFQAAVEQLIALGATVSEVDCPHFDYALAAYYLILPSEVSSNLARFDAMRYGLRVGDDGSRSAEEVIALTRAAGFGPEVKRRIMIGAYALSAGYYDSYYSQAQKVRTLIARDLDKAYRSVDVLVSPATPTTAFSLGEKADDPLAMYLFDLCTLPLNLAGHCGMSVPSGLSSDDDLPVGLQIMAPALADDRLYRVGAAYEAARGPLPSAI

SEQ ID NO: 63921 - protein, 99 aa, Mycobacterium leprae
MSPISRDEVLHLARLTRLVLTDTELASFSSQLDVILAHVSQIQAVDVTGVEPTDNPLKYVNITRPDETVPCLTQQQALAEAPEAIYGRFVVPQILGDNK

SEQ ID NO: 63922 - protein, 694 aa, Mycobacterium leprae
MSSPEADPIGPEVLQQWRKLTEEVREHQFRYYVRDAPIISDAEFDALLDRLTVLEEQHPELCTPDSPTQLVGGAGFMTDFVATEHLERMFSLDNAFSGDELNAWVTRIRAEIGNDAHYLCELKIDGVALSLVYRDGRLTRATTRGDGRTGEDVTLNARTIEDVPERLTVSDIYPLPEVLEVRGEVFFRVVDFQALNTSLVEEGKNPFANPRNSAAGSLRQKDPAVTAHRKLRMICHGLGHIEGFRPATQHQAYLALRDWGLPVSEHTTLVNDIAGVQGCIAYWAEHRHEVDHEIDGIVVKIDEVTLQRRLGSTSRAPRWAIAYKYLPEEAQTKLLDIRVNVGRTGRVTPFAFMTPVKVAGSTVGQATLHNPSEVKRKGVLIGDTVVIRKAGDVIPEVLGPVVDLRDGSEREFVMPTTCPECGTTLAPEKEGDADIRCPNARSCPGQLRERVFHVASRSALDIQGLGYEAGVALLAAQVITSEGDLFTLTEKALLRTELFRNKAGELSANGKRLLVNVDKAKTAPLWRVLVALSIRHVGPTAARALATEFGSVDAILAASPEQLAAVEGVGTTIAAAVTEWFTVDWHRVIVNKWRAAGVRMVDERDTSVLPTCEGLTIVVTGSLAGFSRDDAKEAIVARGGKVAGSVSKKIAYVVVGDLPGYKYDKAVELGVPILNEDGFRLLLEQGPPVQQVVD

SEQ ID NO: 63923 - protein, 358 aa, Mycobacterium leprae
MKVLAAMSGGVDSSVAAARMVDAGHDVVGVHLALSTVSGTLRTGSRGCCSKEDVSDARRVADVLGIPFYVWDFAEKFQEDVIDNFVSAYARGETPNPCVQCNQRIKFSALSVRALMLGFDTVATGHYARLSGGRLRRAVDRGKDQSYVLAVLTAQQLRHAAFPIGDTLKRQVRAEAARRGLLVADKPDSHGICFIPSGNTRAFLSECIGIRRGSVVDADGTVLAEHDGVHGFTVGQRKGLGIVGPGPNGRPRYVTAIDADTATVYVGDAADLGVHTLIGRAPVFTAGAAPLGPVQCVVQIRAHGETAVAVVELIGDELFVRLCEPLRGVARGQTLVLYRLDPDGDEVLGSATIASMSA

SEQ ID NO: 63924 - protein, 245 aa, Mycobacterium leprae
MTTMWGAPLHRRWCGSRLRDPLQAKFLTLASLKWVLANRAYTPWYLVRYWRLLKFKLANPHIITRGMVFLGKGVEIHATPELAQLEIGRWVHIGDKNTIRAHEGSLRFGDKVVLGRDNVINCYLDIELGSSALMADWCYVCDFDHRMDDINIPIKDQGIVKSPVRIGPDTWMAAKVTVLRGTSVGRGCVLGAHAVVRGVIPDYSVAVGAPAKVVNNRKLSWEQSAAQRAELAAALADIERKKAAH

SEQ ID NO: 63925 - protein, 364 aa, Mycobacterium leprae
MAAGPALSARGYLAMNAQTQAGCSLMEWENNDNGRQRWCVRLVQGGGFGGPLFDGFENLYVGEPGTIFSFPMTQWTRWRQPVIGMPSTPRFLGNGQLLVTTHLGQVLVFDAHRGMVVGSPLDLVDGVNPTDPTRGLADCVSAQRGCPVASAPAYSPASQTVVLDIWQPGAPTAGLIGLKYHSRQTPLLARAWTSDAIGAGVLASPVLSADGSTVYVNGRDQHLWALHAANGKPKWSVPLEFLAQTPPTVTPQGLIVSGGGPDTRLAAFKDAGDHAQQIWRRDDLTPLSTSSLAGVSVGYTVVSSSPAADAPGMSLLAFDPRNGHTLNSYPLPAATGYPVGVSIANNRRVITVTSDGQLYSFAPT

SEQ ID NO: 63926 - protein, 411 aa, Mycobacterium leprae
MNTPPKVSVLITVTGVDQPGVTSALFAVLSRHGGELLNVEQVVIRGRLTLGVLVLCPPEVAAYTALRDDVQAAIRRVGLDVTIERSDDLPIIREPSTHTIFVLGRPITARAFGAVAREVAALDVNIDVIRGISDYPVTGLELRVSAPLEAAGSLRTALNRVATEEHVDVAVEGYGLARRIKRLIVFDVDSTLVQGEVIEMLAARAGAQGTVAAITEAAMRGELDFAESLQQRVATLAGLPVTVVDEVANQLQLMPGARTTLRTLRRLGFRCGVVSGGFRRIIEPLAHELMLDFVAANELEIVDGILTGRVVGTIVDRPGKAKALRYFSEQAGVPMEQTVAVGDGANDIDMLTAAGLGIAFNAKPALRAVADASLSHPYLDTVLFVLGVTRGEIEAADAADGGVRRVEIPPD

SEQ ID NO: 63927 - protein, 574 aa, Mycobacterium leprae
MTAEALSSGELKAIRPYPARTGPKGNLVYKLITTTDHKMIGIMYCVACFIFFFVGGLLALLMRTELAAPGLQFLSNEQFNQLFTMHGTIMLLFYATPIVFGFANLVLPLQIGAPDVAFPRLNAFSFWLFLFGAAIGMAGFITPGGAADFGWTAYTPLTDAIHSPGVGGDLWIMGLIVAGLGTILGAVNMITTVVCLRAPGMTMFRMPIFTWNILVTSILVLIAFPLLTAALFGLAADRHLGAHIYDAANGGVLLWQHLFWFFGHPEVYIIALPFFGIVSEIFPVFSRKPIFGYTTLVYATLSIAALSVAVWAHHMFATGAVLLPFFSFMTYLIAVPTGIKFFNWVGTMWKGQLTFETPMLFSVGFAVTFLLGGLTGVLLASPPLDFHVTDSYFVVAHFHYVLFGTIVFSTFAGIYFWFPKMTGRLLDEQLGKLHFWLTFIGFHTTFLVQHWLGDMGMPRRYADYLPTDGFQGLNVVSTIGSFILGASMFPFVWNVFKSWRYGEVVTVDDPWGYGNSLEWATSCPPPRHNFTELPRIRSERPAFELHYPHMVERLRDEAYVGRRHAEELVEVSLH

SEQ ID NO: 63928 - protein, 362 aa, Mycobacterium leprae
MKSHVSKHRRKRRLGAMTTVSAYAATSATEPLTKVTINRRAPGPHDVAIQIKFAGICHSDIHTVKAEWGQPNYPVVPGHEIAGVVTAVGTEVTKHKVGDRVGVGCMVGSCGECSSCLAGIEQYCKRGATFTYNSIGTDGQSTQGGYSQAIVVDENFVVHIPDALPLDAAAPLLCAGITLYSPLRHWNAKPGTRLAIIGLGGLGHMGVKLGRKMGCEVTVLSQSLKKMEDGLQLGASNYYATADPDTFRKLRGSFDLILNTVSANLDLGKYLNLLDVNGTLVELGIPEHPMLVPAFALALMRRSLAGSNIGGITETQEMMNFSAEHSVTPEIELIEPDYINEAYERVLASDVRYRFVINISSL

SEQ ID NO: 63929 - protein, 325 aa, Mycobacterium leprae
MLTGKMKLIDRVSAINWNWLQDDKDAEVWDRLTGNFWLPEKVPVSNDLPSWGTLTASEKQLTMRVFTGLTLLDTIQGTVGAVSLIPDALTPHEEAVYTNIAFMESVHAKSYSSIFSTLCSTAEIDEAFRWSEENNNLQRKAKIVMEYYRGDEPLKRKVASTLLESFLFYSGFYLPMYWSSRAKLTNTADMIRLIIRDEAVHGYYIGYKFQRGLVLVDDARRAELKEYTYELLFELYDNEVEYTQDLYDRVGLTEDVKKFLRYNANKALMNLGYEALFPRDETDVNPAILSALSPNADENHDFFSGSGSSYVIGKAVVTEDEDWDF

SEQ ID NO: 63930 - protein, 693 aa, Mycobacterium leprae
MLNLYDADGKIQFDKDVLAARQFFLQHVNQNTVFFHNQDEKLDYLIRENYYEREVLDQYSRNFVKSLLDRAYAKKFRFSTFLGAFKYYTSYTLKTFDGKRYLERLEDRVCMVALTLAAGDTGLAEKLVDEIIDGRFQPATPTFLNSGKKQRGEPVSCFLLRIEDNMESIGRSVNSALQLSKRGGGVALLLSNIREHGAPIKNIEHQSSGVIPIMKLLEDAFSYANQLGARQGAGAVYLHAHHPDIYRFLDTKRENADEKIRIKTLSLGVIIPDITFELAKRNEDMYLFSSYDVERVYEVPFADISVTEKYYEMLDDARIRKTKIKAREFFQKLAELQFESGYPYVMFEDTVNRANPIEGKITHSNLCSEILQVSTPSLFNDDLSYAKVGKDISCNLGSLNIAKTMDSPDFAQTVEVAIRALTAVSDQTHIKSVPSIEQGNNDSHAIGLGQMNLHGYLSREGIFYGSEEGVDFTNIYFYTVLFHVLLASNSIAIERGTFFKGFERSKYASGEFFDKYIEQTWEPKTDKVRQLFAEAAIRIPTQNDWKRLKELVVAHGIYNQNLQAVPPTGSISYINHSTSSIHPIVSKVEIRKEGKIGRVYYPAPYMTNDNLQYYQDAYEIGYQKIIDTYAAATQHVDQGLSLTLFFKDTATTRDVNKAQIYAWRKGIKTLYYIRLRQMALEGTEVEGCVSCTL

SEQ ID NO: 63931 - protein, 138 aa, Mycobacterium leprae
MQAHNLVYFSSVSENTHRFVQKLGVPAMRIPLHSRIEVSDPYVLVLPTYGGGRTAPDLQAGGYVPKQVIAFLNNEYNRALICGVVAAGNTNFGAEFCYAGDVVARKCGVPYLYRFELMGTEDDVTAVRAGLANLWKEH

SEQ ID NO: 63932 - protein, 623 aa, Mycobacterium leprae
MTRSLDELVTRVASKLMAATAATAVTISEGVLAILVEHFGVDVSFLRHNNHDIHATKLIVEWPPRDYVPDPDPIGVVYFADADPVFAMAEYLKEPAVLRPEPANADYQRRIEEGASVPAVSLACVPLLSGEITTGVLGFVKYGDREWHDDELRALQAIATLFAQLQARIVAEEQLRYLAEHDDLTGLLNRRALIAHLDERLADGQRGPVTLLFLGLDRLKAVNDYLGHNAGDRLIEVFADRLREAAESLTVIARFGGDEFVVVPAESVSVDVAESFAHRLQTRLQKQVVIDGEILTRTVSIGVATGLPGRDTTSDLLRWADHAALSAKSDGSKVVVLDHGISAQHTLRTEVELHLAGMIDTDLVLHYLPEVDMSTGKVLGTEALVRWQHPTRGLLFPDSFIPVAESINLAGKLGRMVMHSACAEFSRWRSAGVGLDALLRINVSPVQLVAEGFVDNVAGTLDEFGLDGSMVCLEITENVVVQNIDATRKTLAGLKEVGVHLAIDDFGTGYSVLTHLKSLPVDTIKIDKSFVAELGSNASDLAIVRAIMALAKEFELEVVAEGVETAVAAQVLLELGCNRAQGFLLSRPVDGAAMESLLAKGVIPMALGTCQSPEPSEHQIHRS

SEQ ID NO: 63933 - protein, 458 aa, Mycobacterium leprae
MTISVFDLFTIGIGPSSSHTVGPMRAAARFVDGLAANGLLEDVCDIRVELFGSLAATGAGHGTMSAILLGLEGEHPERLDADDMVTRLACMRAAGTICLGGLIVIKFTEADVVLRPQTVLDRHPNAMTIVALARDGTKLAAETYYSVGGGFVVAHGDPPEGAEWTTGGVSFGSAGELLELAATRGMSICELMAEYEQSLRSEQEVRAGLLNIRDVMTQSVQRGIAQGGYLPGGLKVRRRAHSWHERLCAEDPNRDPVFAEDWVNLVALAVNEENAVGGRVVTAPTNGAAGIIPAVLHYAQHYCPAGRADPDDTSVRFLLTAGAIGSLYKELASISGAEVGCQGEVGSAASMAAAGLAEILGGTPAQVENAAEIAMEHSLGLTCDPIAGLVQIPCIERNAISAGKAINAARMAMRGDGTHRVSLDEVIATMRATGRDMNFKYKETAAGGLALAVNIVEC

SEQ ID NO: 63934 - protein, 273 aa, Mycobacterium leprae
MVALDALDDWPVPTTAAAVVGPTGVLAARGDTEQVFPLASVTKPLVARAVQIAIEEGVVDLDTVAGPPGSTIRHLLAHASGLAMHSKYVMAPPGTRRIYSNYGFRVLAETVQREAGIGFSRYLTEAVLEPLAMTATKLEDGTWAAGFGATSTVADLAAFANDLLRPATVSAQIHAEATSVQFPDLDGVLPGHGVQRPNDWGLGYEIKNSKLPHWTGTLNSARTYGHFGQSGGFIWADPEAELALVVLTDRDFGEWALQLWPAISDAVISEYAR

SEQ ID NO: 63935 - protein, 758 aa, Mycobacterium leprae
MTVRDVGGQQDRETTFVVGSFADIPLRSDRVVWPPSEAAVEKHVFSAASAHGYTVDQLHWHTPEGIDVKPVYIAADRAAAEAGGYPLHSFPGEPPYLRGPYPTMYVNQPWTIRQYAGFSTAADSNAFYRRNLAAGQKGLSVAFDLATHRGYDSDHPRVQGDVGMAGVAIDSILDMRQLFDGIDLSAVSVSMTMNGAVLPILALYVVAAEEQGVPPEKLAGTIQNDILKEFMVRNTYIYPPEPSMRIISDIFAYTSAKMPKFNSISISGYHIQEAGATADLELAYTLADGVDYIKAGLDAGLDIDTFAPRLSFFWGIGMNFFMEVAKLRAGRLLWSELVAKFGPQSPKSLSLRTHSQTSGWSLTAQDPFNNVARTCIEAMAATQGHTQSLHTNALDEALALPTDFSARIARNTQLVLQQESGTTRPIDPWGGSYYVEWLTHQLAARARTHIAEVAEHGGMAAAISDGIPKLRIEEAAARTQARIDSGRQPVVGVNKYQVDQDHEIEVLKVENSRVRAEQVAKLQQLRANRDQLAVDAALAELSGAAGAHGRAGDNLLALAINAARVQATVGEISDALERVYGRHQAKIRTITGVYRREVGEAGKATDIANATELVKKFAEADGRRPRILVAKMGQDGHDRGQKVVATAFADLGFDVDVGSLFSTPEEVARQAADNDVHVIGVSSLAAGHLTLVPALRDALADVGRPDIMIVVGGVIPPDDFDELYAAGATAIFPPGTVIAYAAIGLLHKLAGRLGYTLT

SEQ ID NO: 63936 - protein, 269 aa, Mycobacterium leprae
MAGLLEGKRILVSGIITDSSIAFHIAKVAQEAGAQLVLTGFDRLRLIQRIADRLPDKAPLIELDVQNEEHLATLAERVTAEIGEGNKLDGVVHSIGFMPQTGMGTNQFFDAPYEDVSKGIHISTYSYASLAKALLLIMNSGGSIVGMDFDPTRAMPAYNWMTVAKSALESVNRFVAREAGKYGVRSNLVAAGPIRTLAMSAIVGGAFGEEAGAQMQLLEEGWDQRAPIGWNMKDPTPVAKTVCALLSEWLPATTGSIIYADGGASTQLL

SEQ ID NO: 63937 - protein, 253 aa, Mycobacterium leprae
MTDAAAKVSAAPGRGKPAFVSRSILVTGGNRGIGLAVARRLVADGHRVAVTHRASVVPDWFFGVECDVTDNDAIGAAFKAVEEHQGPVEVLVANAGITSDMLIMRMSEEQFQKVIDVNLTGVFRVAKLASRNMIKQRFGRYIFMGSVVGLSGVPGQANYAASKSGLIGMARSLARELGSRSITANVVAPGFIDTEMTRAMDSKYQEAALQAIPLGRIGAVEEIAGAVSFLASEDAGYISGAVIPVDGGLGMGH

SEQ ID NO: 63938 - protein, 572 aa, Mycobacterium leprae
MSAPIWMASPPEVHSALLSRGPGSGPLLVAAEAWRSLSSVYAEMADELVALLVVVPVSSWDGSAAEAYVIAYLPYLGWLRQASVDSAVMAAHYETMATAYITTLAMMPTLAELAANRTAHTVLVTTNFFGINTIPIARNEIDYVRMWVEAAIAMGTYQEVSTVVVDSAPEAIAAPQIMASDALEASSDQPSPTAPSQSPQVQNWLQWLQKIGYTDFYNTLVQPLITSLTNHPFFQGMFSGFDPWLPSLGNPLSFLSPFNIAFALGTPMDIGSYVGYLSQTFAFIGADLAAAFASGNPVTIGFTLLFTTIEAIGTIITDTIALVKTMIEQSFVLLPMILPLLTAPLAVATAGAAGSFAGLSELAGLVGVAPPGLPSAPPVAAVAPVVPPSMPTLASIPTPTPMPAPAASTAPVVTPPGPPPVTAPPSVTGAGVESFGYLVGRLPSTARGVVGTSVRQQSSAPDRIEAPDAAATPQEQARSRWRRRAKVTPFDSSGSPNPKAAPTASDQGAGTLGLAGTARQASSGPATGLVTLSNGTFSDSPRAPMLPRTWGADPTFCYNAADIGPAGGWDDE

SEQ ID NO: 63939 - protein, 181 aa, Mycobacterium leprae [sequence omitted]

SEQ ID NO: 63940 - protein, 438 aa, Mycobacterium leprae
MLSAFISSLRTVDLRRKILFTLGILVLYRVSAALPSPGVNYRHVQQCIQEATAGEAGEIYSLINLFSGGALLKLTVGVMPYITASIIVQLLTVVIPRFEELRKEGQAGQAKMTQYTRYLAIALAVLQATSIVALAANGGLLQGCQEDIISDQSIFSLVVIVLVMTGGAALVMWMGELITERGIGNGMSLLIFVGIAARIPAEGKQILDSRGGVIFAAVCLAALVIIVGVVFVEQGQRRIPVQYAKRMVGRRMYGGTSTYLPLKVNQAGVIPVIFASSLIYIPHLITQLVRSGSGGVGKSWWDKFVGTYLSDPADPVYINIYFGLIIFFTYFYVSVTFNPDERADEMKKFGGFIPGIRPGRPTADYLRYVLSRITLPGSIYLGAIAVLPNLFLQIGNGGEVQNLPFGGTAVLIMIGVGLDTVKQIESQLMQRNYEGFLK

SEQ ID NO: 63941 - protein, 146 aa, Mycobacterium leprae
MTIKLHDLQPARGSKTTRTRVGRGEASKGKTAGRGTKGTKARKQVPVTFEGGQMPIHMRLPKLKGFRNRLRTEYAVVNVGDISRLFPEGGTISVNDLVAKKAIRKNSLVKILGDGKLTVKVTLSAHKFSGSARHKITVAGGSVTEL

SEQ ID NO: 63942 - protein, 71 aa, Mycobacterium leprae
MASLKITQVRSTIGVRWKQRESLRTLGLRRIRHSVIREDNLQTRGLIAVVRHLVEVEPATGGSTPVGGGRD

SEQ ID NO: 63943 - protein, 217 aa, Mycobacterium leprae
MAAQSAGLLGDSREGRSRREGGSRGGRDRDRDGEKGNYLERVVAINRVSKVVKGGRRFSFTALVIVGDGHGMVGVGYGKAKEVPAAIAKGVEEARKSFFRVPLIDGTITHPVQGEAAAGVVLLRPASPGTGVIAGGAVRAVLECAGVHDILAKSLGSDNAINVVHATVAALKLLQRPDEVAARRGLRSGMLPRSWDPAGVAGERSVDRPVGRVREQA

SEQ ID NO: 63944 - protein, 121 aa, Mycobacterium leprae
MQSVSAIRRVSRLRRHARLRKKVSGTSERPRLVVNRSARHIHVQLVNDVTGTTVAAASSIEADVRGLQGDKKVRSVRVGQLIAERAKAAGINTVVFDRGGYTYGGRIAALADSVRENGLNF

SEQ ID NO: 63945 - protein, 179 aa, Mycobacterium leprae
MSRIGKQPIPVPAGVDITIDGQNVLVKGPKGTLDLTVAEPIMLARNDEGAIVVTRPDNERRNRSLHGLSRTLVSNLVTGVTQGYTVSMEIFGVGYRAQLKGSNLEFALGYSHPVVIEAPEGITFAVQSPTKFTITGIDKQKVGQISANIRRLRRPDPYKGKGVRYEGEQIRRKVGKTGK

SEQ ID NO: 63946 - protein, 132 aa, Mycobacterium leprae
MTMTDPIADFLTRLRNANSAYHDEVTVPHSNIKANIAQILKNEGYIRDFRTEDARVGKSLIIQLKYGPSRERSIAGLRRVSKPGLRVYAKSINLPRVLGGLGVVIISTSSGLLTDRQAARQGVGGEVLAYVW

SEQ ID NO: 63947 - protein, 61 aa, Mycobacterium leprae
MAKKALVNKAARKPKFTVRGYTRCSKCGRPRAVFRKFGLCRICLREMAHAGELPGVQKSSW

SEQ ID NO: 63948 - protein, 187 aa, Mycobacterium leprae
MSTAEKVQPRLKQRYRSEIREALNKQFSYGNVMQIPTVVKVVVNMGVGDAARDAKLINGAVSDLALITGQKPEVRKARKSIAQFKLREGMPIGVRVTLRDDRMWEFLDRLTSIALPRIRDFRGLSPKQFDGVGNYTFGLAEQSVFHEIDVDKIDRVRGMDINVVTSATTDDEGRALLRALGFPFKEN

SEQ ID NO: 63949 - protein, 105 aa, Mycobacterium leprae
MKVHKGDTVLVIAGKDKGAKGKVLQAYPARNRVLVEGVNRIKKHTAISANQRGAQAGGIVTQEAPIHVSNVMVVDSDGKPTRIGYRVDEETDKRVRISKRNGKDI

SEQ ID NO: 63950 - protein, 113 aa, Mycobacterium leprae
MADNTGAKEILCIRVLGGSSRRYASIGDVIVGTVKDAIPGGNVKRGDVVKAVVVRTAKECRRPDGSYIKFDENAAVIIKPDNDPRGTRIFGPVGRELREKRFMKIISLAPEVL

SEQ ID NO: 63951 - protein, 127 aa, Mycobacterium leprae
MMAAEAKTSAKAAPSATTAAPKGGAVKGGVSKDKGPKHTPSIPKVRGGRKMRIGYVVSDKMQKTIVVELEDRMRHPLYGKIIRTTKKVKAHDENSVAGIGDRVSLMETRPLSATKRWRLVEILEKAK

SEQ ID NO: 63952 - protein, 81 aa, Mycobacterium leprae
MMAVGISPGELRELTDEELIERLRESKEELFNLRFQMATGQLNNNRRLRTVRHEIARVYTVLRERELGLASGPGGANGEES

SEQ ID NO: 63953 - protein, 138 aa, Mycobacterium leprae
MLIPRKVKHRKQHHPRQRGIASGGTKVNFGDYGIQALEHAYVTNRQIESARIAINRHIKRGGKVWINIFPDRPLTKKPAETRMGSGKGSPEWWVVNVKPGRVLFELSYPNEQTARAALTRAIHKLPIKARIVTREEQF

SEQ ID NO: 63954 - protein, 281 aa, Mycobacterium leprae
MGQKINPHGFRLGITTGWKSRWYADKQYAEYVKEDVAIRRLLSTGLERAGIADVEIERTRDRVRVDIHTARPGIVIGRRGTEADRIRADLEKLTCKQVQLNILEVKNPESQAQLVAQGVAEQLSNRVAFRRAMRKAIQSAMRQPNVKGIRVQCSGRLGGAEMSRSEFYREGRVPLHTLRADIDYGLHEAKTTFGRIGVKVWIYKGDIVGGKREVTAVAPAGAERARRERPSGTRPRRSGAAGTTVTGTDAGRAVGGEESAATNIGHSDDSVVTHEPQIAES

SEQ ID NO: 63955 - protein, 175 aa, Mycobacterium leprae
MTTTEFPSAIAKARFVRVSPRKARRVIDLVRGRSVADALDILRWAPQAASEPVARVIASAAANAQNNNGLDPETLVVATVYAGEGPTAKRIRPRAQGRAFRIRRRTSHITVVVESRPVKDQRSAASTKARRAEASKTAGRAPAKKAGASSGATKMPPKKASVKTSEASETKGGSD

SEQ ID NO: 63956 - protein, 93 aa, Mycobacterium leprae
MPRSLKKGPFVDDHLLKKVDVQNEKNTKQVIKTWSRRSTIIPDFIGHTFAVHDGRKHVPVFVTEAMVGHKLGEFAPTRTFKGHIKDDRKAKRR

SEQ ID NO: 63957 - protein, 280 aa, Mycobacterium leprae
MAIRKYKPTTSGRRGASVSDFTDITRTKPEKALMRSLHGHGGRNVHGRITTRHKGGGHKRAYRLIDFRRNDTDGVNAKVAHIEYDPNRTANIALLHFLDGKKRYILAPQGLSQGDVVESGANADIKPGNNLPLRNIPAGTLIHAVELRPGGGAKLARSAGSSIQLLGKESSYASLRMPSGEIRRVDVRCRATVGEVGNAEQANINWGKAGRMRWKGKRPSVRGVVMNPVDHPHGGGEGKTSGGRHPVSPWGKPEGRTRKPNKSSNKLIVRRRRTGKKHAR

SEQ ID NO: 63958 - protein, 100 aa, Mycobacterium leprae
MATIADSRDIILAPVISEKSYGLLDDNVYTFVVHPDSNKTQIKIAIEKIFSVKVASVNTSNRKGKCKRTRTGFGRRKNTKRAIVTLAPGSKSIDLFGTPA

SEQ ID NO: 63959 - protein, 230 aa, Mycobacterium leprae
MAAKVENGSNIRKIDVKTPDGKVDGTIELPAELFDAPANIALMHQVVTAQRAAARQGTHSTKTRGDVSGGGRKPYRQKGTGRARQGSMRAPQFTGGGIVHGPKLRDYSQRTPKKMIAAALRGALSDRARNGRIHAVTELVVGKTPSTKSAKEFLGTLTDRKQVLVVIGRSDETGAKSVRNLPGVHLLSPDQLNTYDVLRADDLVFSVEALNSYIAAQQAAGTSTPEKVSA

SEQ ID NO: 63960 - protein, 218 aa, Mycobacterium leprae
MMARKGILGTKLGMTQVFDENNRVVPVTVVKAGPNVVTRIRTLERDGYSAVQLAYGEISPRKVNKPVTGQYNSAGVNPRRYLAELRLDHPDAAAEYEVGQELTAEIFADATYVDVTGTSKGKGFSGTMKRHGFRGQGASHGAQAVHRRPGSIGGCATPARVFKGTRMAGRMGNDRVTVQNLLVHKVDTENGVLLIKGAVPGRTGGLVMVRSAIKRGEK

SEQ ID NO: 63961 - protein, 101 aa, Mycobacterium leprae
MAGQKIRIRLKAYDHEAIDASARKIVETVVRTGANVVGPVPLPTEKNVYCVIRSPHKYKDSREHFEMRTHKRLIDILDPTPKTVDALMRIDLPASVDVNIQ

SEQ ID NO: 63962 - protein, 396 aa, Mycobacterium leprae
MAKAKFERTKPHVNIGTIGHVDHGKTTLTAAITKVLHDKFPNLNESRAFDQIDNAPEERQRGITINISHVEYQTEKRHYAHVDAPGHADYIKNMITGAAQMDGAILVVAATDGPMPQTREHVLLARQVGVPYILVALNKSDAVDDEELLELVEMEVRELLAAQEFDEDAPVVRVSALKALEGDAKWVESVTQLMDAVDESIPAPVRETDKPFLMPVEDVFTITGRGTVVTGRVERGVVNVNEEVEIVGIRQTTTKTTVTGVEMFRKLLDQGQAGDNVGLLLRGIKREDVERGQVVIKPGTTTPHTEFEGQVYILSKDEGGRHTPFFNNYRPQFYFRTTDVTGVVTLPEGTEMVMPGDNTNISVTLIQPVAMDEGLRFAIREGGRTVGAGRVVKIIK

SEQ ID NO: 63963 - protein, 701 aa, Mycobacterium leprae
MAQKDVLTDLTKVRNIGIMAHIDAGKTTTTERILYYTGISYKIGEVHDGAATMDWMEQEQERGITITSAATTCFWNDNQINIIDTPGHVDFTVEVERSLRVLDGAVAVFDGKEGVEPQSEQVWRQADKYEVPRICFVNKMDKIGADFYFSVRTMQERLGANVIPIQLPVGSEGDFEGVVDLVEMKAKVWSTEAKLGEKYDVVGIPTDLQEKAEEYRTNLLETVAETDEALLEKYFSGEELTVAEIKGAIRKLTISSEAYPVLCGSAFKNKGVQPMLDAVIDYLPSPLDVPAAIGHVPGKEDEEIVRKPSTDEPLSALAFKVATHPFFGKLTYVRVYSGKVDSGSQVINATKGKKERLGKLFQMHSNKENPVETASAGHIYAVIGLKDTTTGDTLADPNNQIVLESMTFPDPVIEVAIEPKTKSDQEKLSLSIQKLAEEDPTFKVHLDSETGQTVIGGMGELHLDILVDRMRREFKVEANVGKPQVAYKETIRRVVETVEYTHKKQTGGSGQFAKVIIKLEPFSGENGATYEFENKVTGGRIPREYIPSVEAGARDAMQYGVLAGYPLVNLKVTLLDGAYHDVDSSEIAFKIAGSQVLKKAAAQAQPVILEPIMAVEVTTPEDYMGDVIGDLHSRRGQIQAMKERAGTRVVRAHVPLSEMFGYVGDLRSKTQGRANYSMVFNSYSEVPANVSKEIIAKATGE

SEQ ID NO: 63964 - protein, 156 aa, Mycobacterium leprae
MPRKGPAPKRPLVNDPVYGSQLVTQLVNKILLKGKKSLAERIVYGALEHARDKTGTDPVITLKRALDNVKPALEVRSRRVGGATYQVPVEVRPDRSTTLALRWLVGFSRQRREKTMIERLANEILDASNGLGASVKRREDTHKMAEANRAFAHYRW

SEQ ID NO: 63965 - protein, 124 aa, Mycobacterium leprae
MPTIQQLVRKGRRDKIGKVKTAALKGNPQRRGVCTRVYTSTPKKPNSALRKVARVKLTSQVEVTAYIPGEGHNLQEHSMVLVRGGRVKDLPGVRYKIIRGSLDTQGVKNRKQARSRYGAKKEKS

SEQ ID NO: 63966 - protein, 252 aa, Mycobacterium leprae
MLIGSHVSSTDPLAAAEVEGADVVQIFLGNPQSWKAPTLRSDADVLKATALPVYVHAPYLINVASANSRVRIPSRKILQQTCDAAADIGAAAVVVHGGYVADDNDLEDGFQRWRKALDQLQTDVPVYLENTAGGDHAMARRFDTIARLWDVIGETGIGFCLDTCHAWAAGEGLIHVVDRIKAITGRIDLVHCNDSKDEAGSGRDRHANLGSGQIDAELLVAAVKVAGAPVICETAEEGRKDDIAFLREKTSG

SEQ ID NO: 63967 - protein, 1316 aa, Mycobacterium leprae
MLDVNFFDELRIGLATAEDIRQWSYGEVKKPETINYRTLKPEKDGLFCEKIFGPTRDWECYCGKYKRVRFKGIICERCGVEVTRAKVRRERMGHIELAAPVTHIWYFKGVPSRLGYLLDLAPKDLEKIIYFAAYVITTVDEEMRHNELSTLEAEMMVERKSVEDQRDADLEARAQKLEADLAALEAEGAKADARRKFRDGGEREMRQLRERAQRELDRLEDIWSTFTKLAPKQLIVDENLYRELVDRYGEYFTGAMGAESIQKLMQDFDIEAEAESLREVIRNGKGQKKLRALKRLKVVAAFQQSGNSPMGMVLDAVPVIPPELRPMVQLDGGRFATSDLNDLYRRVINRNNRLKRLIDLGAPDIIVNNEKRMLQESVDALFDNGRRGRPVTGPGNRPLKSLSDLLKGKQGRFRQNLLGKRVDYSGRSVIVVGPQLKLHQCGLPKLMALELFKPFVMKRLVDLNHAQNIKSAKRMVERQRPQVWDVLEEVIAEHPVLLNRAPTLHRLGIQAFEPMLVEGKAIQLHPLVCEAFNADFDGDQMAVHLPLSAEAQAEARILMLSSNNILSPASGRPLAMPRLDMVTGLYYLTTAVDGDTGAYRPAAEDRPESGVYSSPAEAIMAADRGVLSVRAKIKVQLTQVRPPADIEARWFGANGWRPGDPWIADTTLGRVMFNELLPLGYPFVNKQMHKKVQAAIINDLAERYPMIVVAQTVDKLKDAGFYWATRSGVTVSMADVLVPPRKKEILDHYEERADKVEKQFQRGALNHDERNEALVEIWKEATDEVGQALRDHYPVDNPIITIVDSGATGNFTQTRALAGMKGLVTNPKGEFIPRPVKSSFREGLTVLEYFINTHGARKGLADTALRTADSGYLTRRLVDVSQDVIVREHDCQTERGIVVELAVRVPDGSLIRELYIETSAYARTLGANAVDEAGNVIVARGEDLGDPEIDALLAAGITQVKVRSVLTCTTGTGVCATCYGRSMATGKLVDIGEAVGIVAAQSIGEPGTQLTMRTFHQGGVGEDITGGLPRVQELFEARVPRGKAPIADVTGRVRLEDGERFYKITIVPDDGGEEVVYDKLSKRQRLRVFKHADGSERVLSDGDYVEVGQQLMEGSADPHEVLRVQGPREVQIHLVREVQEVYRAQGVSIHDKHIEVIVRQMLRRVTIIDSGSTEFLPGSLIDRAEFESENRRVVAESGEPAAGRPVLMGITKASLATDSWLSAASFQETTRVLTDAAINCRSDKLNGLKENVIIGKLIPAGTGINRYRNIQVQPTEEARASAYTIPSYEDQYYSPDFGQATGAAVPLDDYGYSDYR

SEQ ID NO: 63968 - protein, 1178 aa, Mycobacterium leprae
MLEGCILPDFGQSKTDVSPSQSRPQSSPNNSVPGAPNRISFAKLREPLEVPGLLDVQTDSFEWLIGSPCWRAAAASRGDLKPVGGLEEVLYELSPIEDFSGSMSLSFSDPRFDEVKAPVEECKDKDMTYAAPLFVTAEFINNNTGEIKSQTVFMGDFPMMTEKGTFIINGTERVVVSQLVRSPGVYFDETIDKSTEKTLHSVKVIPSRGAWLEFDVDKRDTVGVRIDRKRRQPVTVLLKALGWTSEQITERFGFSEIMRSTLEKDNTVGTDEALLDIYRKLRPGEPPTKESAQTLLENLFFKEKRYDLARVGRYKVNKKLGLHAGELITSSTLTEEDVVATIEYLVRLHEGQSTMTVPGGVEVPVETDDIDHFGNRRLRTVGELIQNQIRVGMSRMERVVRERMTTQDVEAITPQTLINIRPVVAAIKEFFGTSQLSQFMDQNNPLSGLTHKRRLSALGPGGLSRERAGLEVRDVHPSHYGRMCPIETPEGPNIGLIGSLSVYARVNPFGFIETPYRKVVDGVVSDEIEYLTADEEDRHVVAQANSPIDEAGRFLEPRVLVRRKAGEVEYVASSEVDYMDVSPRQMVSVATAMIPFLEHDDANRALMGANMQRQAVPLVRSEAPLVGTGMELRAAIDAGHVVVAEKSGVIEEVSADYITVMADDGTRRTYRMRKFARSNHGTCANQSPIVDAGDRVEAGQVIADGPCTENGEMALGKNLLVAIMPWEGHNYEDAIILSNRLVEEDVLTSIHIEEHEIDARDTKLGAEEITRDIPNVSDEVLADLDERGIVRIGAEVRDGDILVGKVTPKGETELTPEERLLRAIFGEKAREVRDTSLKVPHGESGKVIGIRVFSHEDDDELPAGVNELVRVYVAQKRKISDGDKLAGRHGNKGVIGKILPAEDMPFLPDGTPVDIILNTHGVPRRMNVGQILETHLGWVAKSGWKIDVAGGIPDWAVNLPEELLHAAPNQIVSTPVFDGAKEEELQGLLSSTLPNRDGDVMVGGDGKAVLFDGRSGEPFPYPVTVGYMYIMKLHHLVDDKIHARSTGPYSMITQQPLGGKAQFGGQRFGEMECWAMQAYGAAYTLQELLTIKSDDTVGRVKVYEAIVKGENIPEPGIPESFKVLLKELQSLCLNVEVLSSDGAAIELREGEDEDLERAAANLGINLSRNESASIEDLA

SEQ ID NO: 63969 - protein, 130 aa, Mycobacterium leprae
MSKLSSDELLDVFKEMTLLELSDFVKKFEETFEVTAAAPVSVAVAGAPAAGEAGEAAEEQSEFDVILESAGDKKIGVIKVVREIVSGLGLKEAKDLVDGVPKLLLEKVAKEAADDAKAKLEATGATVSVK

SEQ ID NO: 63970 - protein, 177 aa, Mycobacterium leprae
MARADKATAVANIAEQFKAATAALITEYRGLTVANLAELRRSLTGSASYAVAKNTLIKRAASEVGIEGLDELFAGPTAIAFVTGEPVDAAKAIKTFAKEHKALVIKGGYMDGHPMTVAEVERIADLESREVLLAKLAGAMKGTFAKAIGLFNAPTSQMARLTAALQEKKAFEPASAE

SEQ ID NO: 63971 - protein, 235 aa, Mycobacterium leprae
MSKSSKAYRAAAVKVDRTNLYTPLQAAKLAKETSSTRQDATVEVAIRLGVDSRKADQMVRGTVNLPHGTGKTARVAVFAVGEKADVAVAAGADVVGSDDLIEKIQGGWLEFDAAVATPDQMAKVGRIARVLGPRGLMPNPKTGTVTPDVAKAVADIKGGKINFRVDKQANLHFVIGKASFDEKRLAENYGAALEEVLRLKPSSSKGRYLKKVTVSTTMGPGIPVDPSITRNFTEE

SEQ ID NO: 63972 - protein, 142 aa, Mycobacterium leprae
MATKKKVAGLIKLQIQAGQANPAPPVGPALGQHGVNIMEFCKAYNAATENQRGQVIPVEITVYEDRSFTFALKTPPAAKLLLDAAGVGKGVAEPHKTKVVKVSWDQVREIAETKKADLNANDIDAAAKIIAGTARSMGITVE

SEQ ID NO: 63973 - protein, 228 aa, Mycobacterium leprae
MQEAGIDEFAAGGGHVEPAAEVDPAAALKAELRSKPGDWYVIHSYAGYENKVKANLETRVQNLDVGDCIFQVEVPTEEVTEIKNGQRRLVNRKVLPGYILVRMDLTDDSWAAVRNTPGVTGFVGATSRPSALALDDVVKFLLPSGSAKKDAKGAVSTAAAAEAGGLERSIIEVDYEVGESVTVMDGPFATLPATISEVNAEQQKLKVLVSIFGRETPVELTFSQVSKI

SEQ ID NO: 63974 - protein, 146 aa, Mycobacterium leprae
MSDERYAASDGGGTEVGSGTRGRTTVVTKPATRPQRPTGKRSRQRAANASNTGANVEVEESSTQAAIAKEGKVKKPKKSADRSANPIVFIYNYLKQVVGEMRKVIWPNRKQMLTYTSVVLAFLAFMVALVGLADFGLAKLVLLVFG

SEQ ID NO: 63975 - protein, 55 aa, Mycobacterium leprae
MASSTDVRPKITMACEVCKHRNYITKKNRRNDPDRMELKKFCRNCGKHQSHRETR

SEQ ID NO: 63976 - protein, 105 aa, Mycobacterium leprae
MPVVKINAIEVSTDVGLELERRFAHRAHAVENSPGFLGFQLLRPIKGENRYFVVTHWESDEAFQAWANGPAIEAHAGHSANPVAAGSSLLEFEVVLDVATTSQTN

SEQ ID NO: 63977 - protein, 356 aa, Mycobacterium leprae
MSLSLGIVGLPNVGKSTLFNALTRSNVVVANYPFATIEPNEGVVSLPDPRLAKLAELFGSERILPAQVTFVDIAGLVKGASEGAGLGNKFLAHIRECDAICQVVRVFSGDDITHVTGRVDPQSDIGIIDTELILADLDTLERALPRLEKEARNHKERKPIYAAAINAQQVLNVGTTLFAAGVDGSALRELNLLTNKPFLYVFNADEAVLTAAAWVAELRQLVAPADAVFLDAAIEAELAELDDESAAELLESIGQTERGLDALARAGFRTLALQTFLTVGPKEVRAWTIHQGDTASKAAGVIHTDFEKRFIKAEIVSYDDLIATGSMSAAKAAGKVRTEGKDYVMADGDVVEFRHG

SEQ ID NO: 63978 - protein, 428 aa, Mycobacterium leprae
MTEAVPTDSVDSKASSQVNSAENPFPVRAVALRIAGWIDKLGTVWVEGQLAQITMRPNAKTVFMVLRDPAADISLIVTCSRDFVLRAPVKLAEGIQVVVCGKPSFYIGRGTFSLRLSDIRAVGIGELLVRIDRLRRLLDSEGLFDPRLKRPIPFLPNMIGIITGRASAAERDVTTVASARWPAARFAIRNTAVQGPNAVSQIVEALRELDRNVDVEVIVVARGGGSVEDLLTFSDETLCRAIAACRTPVISAVGHEPDNPLCDLVADLRAATPTDAAKKVVPDAAVEQRLIEDLQRRSAQALRNWVSREQRTLVQLRSRPVLAEPLRTLTTRSEEIHRAQSAIRREIIRLVTTETERVGHLATQLATLGPAATLARGYAIVQALEDGTQTVTAAVLRSVDDAPTGTRLRVRVSDGAIVAVSEGRADGP

SEQ ID NO: 63979 - protein, 328 aa, Mycobacterium leprae
MELVRVTEAGAMAAGRWVGRGNKEGGDGAAVDTIRELVNTVSMRGVVVIGEGEKDHAPMLYNGEEVGNGDGPDCDFAVDPIDGTTLMSKGMPNAISVLAVADRGAMFDPSAVFYMNKITVGPDAAHVLDITAPIGENIRAVAKVKDLSVRDMTVCILDRPRHAQLIDDVRATGARIRLITDGDVAGAISACRPQSGTDMLAGIGGTPEGIIAAAAIRCMGGAIQAQLAPRDDVERRKALDAGYNLDRILTTEDLVSGENVFFCATGVTDGDLLKGVRYYAGGCTTQSIVMRSKSGTVRMIEAYHRLSKLNEYSAIDFTGDNNAAYPLP

SEQ ID NO: 63980 - protein, 426 aa, Mycobacterium leprae
MVAPLAEVDPDIAELLGKELGRQRDTLEMIASENFVPRSVLQAQGSVLTNKYAEGLPGRRYYDGCEHVDVVENIARDRAKALFGADFANVQPHSGAQANAAVLHALMSPGERLLGLDLANGGHLTHGMRLNFSGKLYETGFYGVDATTHLIDMDAVRAKALEFRPKVLIAGWSAYPRILDFAAFRSIADEVGAKLWVDMAHFAGLVAVGLHPSPVPHADVVSTTVHKTLGGGRSGLILGKQEFATAINSAVFPGQQGGPLMHVIAGKAVALKIATTPEFTDRQQRTLAGARILADRLTAADVTKAGVSVVSGGTDVHLVLVDLRNSPFDGQAAEDLLHEVGITVNRNVVPNDPRPPMVTSGLRIGTPALATRGFGEAEFTEVADIIATVLTTGGSVDVAALRQQVTRLARDFPLYGGLEDWSLAGR

SEQ ID NO: 63981 - protein, 170 aa, Mycobacterium leprae
MPKPTKGPRLGGSSSHQKALLTNLAASLFEHGRIKTTEPKARALRPYAEKLITHAKKGTLHNRREVLKKLPDKDVVHALFAEIGPFFSDRDGGYTRIIKVEARKGDNAPMAVIELVREKTVTSEADRARRVAAASAKAAQAQEKPAQEEEVEATSDEVAYTSEPDKAAEH

SEQ ID NO: 63982 - protein, 347 aa, Mycobacterium leprae
MLISQRPTLSEDILTDNRSQFVIEPLEPGFGYTLGNSLRRTLLSSIPGAAVTSIRIDGVLHEFTTVPGVKEDVTEIILNLKGLVVSSEEDEPVTMYLRKQGPGEVTAGDIVPPAGVTLHNPGMRIATLNDKGKIEAELVVERGRGYVPAVQNRALGAEIGRIPVDSIYSPVLKVTYKVDATRVEQRTDFDKLILDVETKSSITPRDALASAGKTLVELFGLARELNVEAEGIEIGPSPAEADHIASFALPIDDLDLTVRSYNCLKREGVHTVGELVSRTESDLLDIRNFGQKSIDEVKVKLHQLGLSLKDSPDSFDPSEVAGYDVTTGTWSTDGAYDSQDYAETEQL

SEQ ID NO: 63983 - protein, 201 aa, Mycobacterium leprae
MARYTGPITRKSRRLRIDLVGGDQAFEKRPYPPGQHGRARIKESEYLLQLQEKQKARFTYGVMEKQFRRYYEEAVRQPGKTGEELLKILESRLDNVIYRAGLARTRRMARQLVSHGHFSVNGVHVNVPSYRVSQYDIIDIRDKSLDTVPFQIARETVGDRPIPSWLQVVGEHQRILIHQLPERVQIEVPLIEQLIVEYYSK

SEQ ID NO: 63984 - protein, 138 aa, Mycobacterium leprae
MPPKKANAAGPKKGQKTRKREKKNIPYGAAHIKSTFNNTIVTITDQQGNVIAWASSGHVGFKGSRKSTPFAAQLAAENAARKAQEHGVRKVDVFVMGPGSGRETAIRSLQAAGLEVGAISDVTPQPHNGCRPPKRRRV

SEQ ID NO: 63985 - protein, 124 aa, Mycobacterium leprae
MARLVGVDLPRDKRMEVALTYIYGIGRTRANEILEATGIERDLRTRDLTDDQLTHLRDYIEANLKVEGDLRREVQADIRRKMEIGCYQGLRHRRGLPVRGQRTKTNARTRKGPKRTIAGKKKAR

SEQ ID NO: 63986 - protein, 37 aa, Mycobacterium leprae
MKVNPSVKPMCDKCRVIRRHRRVMVICVDPRHKQRQG

SEQ ID NO: 63987 - protein, 73 aa, Mycobacterium leprae; identical to SEQ ID NO: 61703

SEQ ID NO: 63988 - protein, 798 aa, Mycobacterium leprae
MAGIPATVVQRCNSTNLDDRLHYSPLGDRAKEERNPMAIMDTNTEVHTLFTQEVAATQQYFDDPRFAGIIRLYTARQVVEQRGTIPTDYTVARDAATAFYARLRELFAAGKSVTTFGPYSPGQAVSLKRMGIEAIYLGGWATSAKGSITEDPGPDLASYPLSQVPDDAAVLVRALLAADRNQQYLRLHMTEQQRAATPAYDYRPFIIADADTGHGGDSHVRNLIRRFVEIGVPGYHIEDQRPGTKKCGHQGGKVLVPSDEQIKRLNAARFQLDIMRVPGIIVARTDAEAANLIDSRADERDQPFLLGATNLKIPSYKACFLALVRCFYELGVKELHGHLLYALGDGEYAAASAWLDRQGILAQVSGTVNAWQENGKQSIDDLFEQVEYRLLAAWEKDAGLMTYGEAVEEMLQFGESEGELIGMSPEEWRRFVGRASLYAAREKAKELGVDPGWDCELAKTPEGYYQIRGGIQYAIAKSLAAAPFADILWMETKTADLADARQFAEAIHAEFPEQMLAYNLSPSFNWDTTGMSDEEMKRFPEELGKMGFVFNFITYGGHQIDGVAAEEFATALRQDGMLALARLQRKMRLVESPYRTPQTLVGGPRSDAALAASSGRTATTKAMGKGSTQHQHLVQTEVPKKLLEEWLALWSEHYQLGEKLRVQLRPRRAGSDVLELGIYGNGDEQLANVIVDPIKDRRGRSILQVRDQNTFAEKLRQKRLMTLIHFWLVHRFKADTVIYVTPTEDNLYQTSKMKSHGIFSEVYQEVGEIIVAEVNHPRLVELLTPDRVALRRLITKEG

SEQ ID NO: 63989 - protein, 766 aa, Mycobacterium leprae
MRAPNGWNNLPNKLSDFSTLVNSATRVAAINLSEVTQTAEVCEAVRRAALCTDGGEALQRRQADADNARYLLIRLAVAAALFVPLAHLSVMFAVLPSTHFPGWEWMLTALAIPVVTWAAWPFHRVAIHNARYHGASMETLISTGITAATIWSLYTVFGHHQSTEHRGVWRALLGSDAIYFEVAAGITVFVLAGKYYTARAKSHASIALLALAALSAKDAAVLQPDGSEMVIPANELNEQQRFVVRPGQTIAADGLVIDGSATVSMSPITGEAKPVRVNPGAQVIGGTVVLNGRLIVEAAAVGDETQLAGMVRLVEQAQQQNANAQRLADRIASVFVPCVFAVAALTAVGWLIAGSGPDRVFSAAIAVLVIACPCALGLATPTAMMVASGRGAQLGILLKGHESFEATRAVDTVVFDKTGTLTTGQLKVSAVTAAPGWQANEVLQMAATVESASEHAVALAIAASTTHREPVANFRAVPGHGVSGTVAERAVRVGKPSWIASRCNSTTLVTARRNAELRGETAVFVEIDGEQCGVIAVADAVKASAADAVAALHDRGFRTALLTGDNPASAAAVASRIGIDEVIADILPEDKVDVIEQLRDRGHVVAMVGDGINDGPALARADLGMAIGRGTDVAIGAADIILVRDNLDVVPITLDLAAATMRTIKFNMVWAFGYNIAAIPIAAAGLLNPLVAGAAMAFSSFFVVSNSLRLRNFGAILSCGTSRHRTVKRWRCPPPTRLRSTACSPVDASPLRPVAHRTGVKPPTHR

SEQ ID NO: 63990 - protein, 750 aa, Mycobacterium leprae
MTASLVEDTNNNHESVRRIQLDVAGMLCAACASRVETKLNKIPGVRASVNFATRVATIDAVDVAVDELRQVIEQAGYRATAHAESAVEEIDPDADYARNLLRRLIVAALLFVPLADLSTMFAIVPTNRFPGWGYLLTALAAPIVTWAAWPFHRVALRNARYRAASMETLISAGILAATGWSLSTIFVDKEPRQTHGIWQAILHSDSIYFEVAAGVTVFVLAGRFFEARAKSKAGSALRALAARGAKNVEVLLPNGAELTIPAGELKKQQHFLVRPGETITADGVVIDGTATIDMSAITGEARPVHASPASTVVGGTTVLDGRLVIEATAVGGDTQFAAMVRLVEDAQVQKARVQHLADRIAAVFVPMVFVIAGLAGASWLLAGASPDRAFSVVLGVLVIACPCTLGLATPTAMMVASGRGAQLGIFIKGYRALETINAIDTVVFDKTGTLTLGQLSVSTVTSTGGWCSGEVLALASAVEAASEHSVATAIVAAYADPRPVADFVAFAGCGVSGVVAEHHVKIGKPSWVTRNAPCDVVLESARREGESRGETVVFVSVDGVACGAVAIADTVKDSAADAISALCSRGLHTILLTGDNQAAARAVAAQVGIDTVIADMLPEAKVDVIQRLRDQGHTVAMVGDGINDGPALACADLGLAMGRGTDVAIGAADLILVRDSLGVVPVALDLARATMRTIRINMIWAFGYNVAAIPIASSGLLNPLIAGAAMAFSSFFVVSNSLRLSNFGLSQTSD

SEQ ID NO: 63991 - protein, 195 aa, Mycobacterium leprae
MSLLSIGQQFPAYQLTALIGGDLSKVDAQQPGDYFTTVSSDSHPGKWRVVFFWPKDFTFICPTEIAAFGKLNEEFEGRGAQILGVSIDSEFVHFQWRAQHEDLKRLPFPMLSDIKRELSAASGALNADGVADRVTFIVDPDNDIQFVSVTAGSVGRNVEEVLRVLDALQSDQLCACNWRKGDPTLNATELLKTSA

SEQ ID NO: 63992 - protein, 414 aa, Mycobacterium leprae
MAAKRRMPRVHDLAPLIQFKRPKFGATKRRLEAALTIQDLRCIAKQRTPKAAFDYTDGAAEDELSIKRAQQAFRDIEFHPAILRDVTNVCAGWDVLGHSVLLPFGIAPTGFTRLMHTEGEIAGARAAAAAGIPFSLSTLATSAIEDVVAAVPQGRKWFQLYMWRDRDRSMALVERAADAGYDALLVTVDVPVAGARLRDTRNGMSIPPALTLRTVFDALPHPRWWIDLLTTEPLAFASLDRWSGTVSDYLNTMFDPSVTFDDLAWIKTQWPGKFVVKGIQTLDDARAVVERGIDGVVLSNHGGRQLDRAPVPFHLLPTVAREFGKDTEILLDTGIMSGADIVAAIALGARCTLVGRAYLYGLMAGGEAGVRRAIEILESGVIRTMQLLGVTCLEELSPRHVTQLQRLGPIEPPA

SEQ ID NO: 63993 - protein, 99 aa, Mycobacterium leprae
MDVMAATEYLARSTTLTSVGWIGYIIIGGIAGWIAGKIVQGGGSGILMNIVIGVVGALIGGFLLSFFVNTAAGGWWFTLFTSILGSVILLWVVGRVRKT

SEQ ID NO: 63994 - protein, 483 aa, Mycobacterium leprae
MSAPESKTAIAQIGVTGLAVMGSNIARNFARHGYTVALHNRSIAKTDTLLKEHGSEGNFVRTETIPEFLAALQTPRRVLIMVKAGDATDAVINELADVMEPSDIIIDGGNSLFTDTIRREKAMRERGLHFVGAGISGGEEGALNGPSIMPGGPAESYTSLGPLLEEISAHVDGVSCCTHIGPGGSGHFVKMVHNGIEYSDMQLIGEAYQLLRDGLGMSAPQIADVFTEWNRGDLNSYLVEITAEVLRQTDIKTGRPLVDVILDKAEQKGTGRWTVQSALDLGVPITGIAEAVFARALSGSVLQRKAAIGLASGKLGNKPTDRETFIEDVRQALYASKIVAYAQGFNHIQTGSTEFGWNITPGDLATIWRGGCIIRAKFLNRIKEAFDAAPDLASLIVAPYFRSAVESAIDSWRRVVSTATQLGIPNPGFSSALSYYDALRTERLPAALTQAQRDFFGAHSYGRVDARGKFHTLWSEDRSEVTV

SEQ ID NO: 63995 - protein, 952 aa, Mycobacterium leprae
MSVPNSSNKQTCFTARHIGPNSEDVATMLAVIGVESLDDLAAKAVPSDILDNVTDTGVAPGLDRLPPPATESETLAELGALARANTVAVSMIGQGYYDTLTPAVLSRNILENPAWYTPYTPYQPEISQGRLEALLNFQTLVSDLTGLEIANASMLDEGTAAAEAMTLMYRAARSTASRVVVDVDVFAQTVAVFATRAKPLGIDIVVADLREGLPDGEFFGVITQLPGASGRITDWTALIAQAHSRGALVAVGADLLALTLITPPGEIGADVAFGTTQRFGVPMGFGGPHAGYLALHTKHARQLPGRLVGVSVDSDGTPAYRLALQTREQHIRRDKATSNICTAQVLLAVMAAMYASYHGAEGLTGIARRVHAQARALAAGLSAAGVEVVHQAFFDTVLARVPGRTVQIQGAAKERGINVWLVDGDHVSVACDEATTDEHITAVLAAFAATPARASFAGPDIATRTSAFLTHPTFTKYRTETSMMRYLRALADKDIALDRSMIPLGSCTMKLNAAAEMESITWQEFTRQHPFAPVSDTPGLRRLISDLESWLVQITGYDAVSLQPNAGSQGEYAGLLAIHDYHVSRGEPHRNVCLIPSSAHGTNAASAALVGMRVVVVGCHDNGDVDLDDLRIKLSEHANRLSVLMITYPSTHGVYEHDIAEICAAVHDAGGQVYVDGANLNALVGLARPGKFGGDVSHLNLHKTFCIPHGGGGPGVGPVAVRSHLVSFLPGHPFAPELPQGQPVSSAPYGSASLLPITWAYIRMMGADGLRTASLTAIASANYIARRLDKYFPVLYTGENGMVAHECILDLRPITKSVGVTVDDVAKRLADYGFHAPTMSFPVPGTLMVEPTESESLAEIDAFCEAMIAIRGEIARVGAGEWSVEDNPLRGAPHTAECLLASDWDHPYTREEAAYPLGKAFRPKVWPPVRRIDGVYGDRNLVCSCLPVEAFV

SEQ ID NO: 63996 - protein, 638 aa, Mycobacterium leprae
MELRPFYPSVNWGYALPDSLWWIAKAWAISAACVVVLVMLSFITRWGRQYWRITRGYFIGPQSVGVWLMLAVLLFSVVISVRLNVLFSYQSKDLYNALQAAFEGAGAQNDLVKQSGMHGFWMSLGIFSILAVIFIARVMADIYLTQRFIIAWRMWLTNHLTTDWLDQRAYYREQFIDNTIDNPDQRIQQDIDIFTAGAGGTPNGPSNGTGSTLLFGAVESVISVISFTAILWNLSGRLAVFEFEIPRAMFWIVIVYVLLATIITFWIGRPLIGLNFANEKLNAAFRYALVRLRDAAEAVAFYRGEEAERKQLEQRFTPIIDNYRRYVSRTIRFLGWNASVSQTIVPLPWILQAPRLFAGKINLGDVGQTATAFGNIHDSLSFFRNNYAAFAAFRAAIIRLHGLVVANARSRELPHVTAKSTNDGTVHVVAVEVRTSAGEQLIDPLDLQLNCGSSLVITGRSGVGKTTMLRSLAELWPYASGTLSRPDGKNETMFLSQLPYVPLGNLRGVVCYPNAPADIPEDTVRDTLTKVALNPLCDRLDEERDWAKILSPGEQQRIAFARILLTKPKAIFLDESTSALDEGLEFALYQMLRSELPDCIIVSVSHRRAVELLHAQQLELLGGGQWRLGPVEKEPLHV

SEQ ID NO: 63997 - protein, 319 aa, Mycobacterium leprae
MIKPTPAAVGSYVTRRCDRLFKSAAAAAGSTVVAAILLIAIFLLLRAVPSLRANHANFFTSAKFDTTGDKNLAFGIRDLFMVTVLSSICALVLAVPVAIGIAVFLTQYVPARLSRLFSAMVDLLAAVPSIIFGLWGVFVLAPKLQPIAVFLNHNLGWLFLFKQGNVSLAGGGTIFTSGIVLAVMILPIVTSVSREVFRHTPLIQIEAAQALGATKWEVVQMTVLPFGRSGVAAAAMLGLGRALGETLAVLIILRSAARSGNWSLFDGGYTFASKIASAASEFSQPLPTGAYIAAGFALFFLTFVVNAVARAISGGRVNG

SEQ ID NO: 63998 - protein, 426 aa, Mycobacterium leprae
MFVNLTCLSEGNGSRGKALAESTQAELKTSWYLLGPAFVAAIAYVDPGNVAANVSSGAQFGYLQLWVVVVANVLAGLVQYLSAKLGLVTGQSLPQAISKQMSHPFRLGFWLQAELVAMATDVAEIVGGAIAFHILFRVSLLLGGVITGTVSLLLLMVKDRRGQLLFERVITGLLFVIVVGFTSSFFVATPSPEDMVNGLLPRFQGTESVLLAAAIIGATVMPHAVYLHSGLALDRHGHPHAGRSRRRLLRVTRLDVILAMTIAGIVNTAMLLVAAINLQHHQVTAYIEGTYTAIQDTLGATIAMLFAIGLLASSLASASVGAYAGALIMQGLLQRSIPMLIRRLITLCPAIAILALGFDPTRALVLSQIVLSFGIPFAVLPLVKLTNNRGLMGNDTNHPATTVLGWAVAILVSLLNVVLIYLTVTS

SEQ ID NO: 63999 - protein, 431 aa, Mycobacterium leprae
MADTDDTVTLKYPGGEIDLQIVRATEGNDGIAIVPVLAKTGYTTFDVGYGNTASTKSSITYIDGDAGILRYRGYPIEQLAEKSTFIEVCYLLIYGELPATDQLAEFTHRIQRHTMLHEDLKRFYDGFPRNAHPMPVLSSVVNALSAYYQDALDPMDNGQVELSTIRLLAKLPTIAAYAYKKSVGQPFLYPDNAFSLVENFLRMTFGLPAEPYEPDPEVVRALDMLFILHADHEQNCSTSTVRLVGSSRANLFTSISGGINALWGPLHGGANQAVLEMLEGIRESGDDVGGFVQKVKNCQAGVKLMGFGHRVYKNYDPRARIVKEQADKILVKLGGDDDLLNIAKGLEEAALTDDYFIERKLYPNVDFYTGLIYRALGFPTRMFTVLFALGRLPGWIAHWREMHDEGDSKIGRPRQIYTGYTERDYTAIETR

SEQ ID NO: 64000 - protein, 143 aa, Mycobacterium leprae
MLDSDARLASDLSLAVMRLARQLRFRNPQSPVSLSQLSALTTLANEGAMTPGALAIRERVRPPSMTRVIASLADMGFVDREPHPVDGRQVLVSVSQSGAELVKAARRARQEWLVERLMTLNSDKRDILRNAADLILELIDESP

SEQ ID NO: 64001 - protein, 714 aa, Mycobacterium leprae
MADTAIQWSKDADGIVTLTMNDPSRSANVMNEIYIESMGNAVDRIVAEKDSITGVVITSAKRTFFAGGDLTAMINTGSEEAGQCFDTVETVKKQLRTLETLGKPVVAAINGAALGGGLEIALACHHRIAADVKGSQLGLPEVTLGLLPGGGGVTRTVRMFGIQNAFVNILSQGTRFKPAKAKEIGLVDELLSTVEELVPAAKAWIKANPEAHEQPWDKKSYEMPGGTPTSPGLAAILPSFPSLLRKQLKGAPMPAPRAILAAAVEGAQVDFDTASRIESRYFVSLVTGQVAKNMIQAFFLDLQHINSGGSRPDGIGKTPIKKIGVLGAGMMGAGIAYVSAKAGYNVVLKDVSLEAAQKGKSYSEKLEAKALERGRTTQEKSDVLLACIAPTGDPTDLKGVDFVIEAVFENQELKHKVFQEIEDIVDPNAVLGSNTSTLPITGLATGVKRQEDFIGIHFFSPVDKMPLVEIIKGEKTSDEALARVFDYALAIGKTPIVVNDSRGFFTSRVIGTFVNEALAMLGEGVEPSSIEQAGAQAGYPAPPLQLSDELNLELMHKIAIATRKGVEDAGGMYESHPAETVVEKMIKLGRSGRLKGAGFYEYVDGKRSGLWLGLRETFKSGSSQPPLQDMIDRMLFAEALETQKCLDENVLTSTADANIGSIMGIGFPPWTGGSAQFIAGYSGPAGTGQQAFVSRARELVAKYGDRFLPPESLL

SEQ ID NO: 64002 - protein, 338 aa, Mycobacterium leprae
MSAELTDLQLLHELEPVVEKYMNRHERLHKNWNPHDYIPWSDGKNFYALGGQDWDPEQSQLSDVAQVAMVQNLVTEDNLPSYHREIAMTMGMDGAWGQWVNRWTAEENRHGIALRDYLVVTRAVDPVELEKLRIEVVNRGFSPGQNHQGGLFADTLFDSILYVTFQELATRVSHRNTGKACNETIADQLLAKISSDENLHMIFYRDVSEAGIELAPNLAIKALHKILHNFKMPGFLVPEFRRKAVIIAVGGVYDIRIHLDEVVMPVLKKWRILEREDFSGEGTRLRDEIGEHLTELEAACDKFEVSKQRYIEREARRTEKITARKVLSTEGTLRMSGR

SEQ ID NO: 64003 - protein, 384 aa, Mycobacterium leprae
MLAPMAGVTNVTFRTLCREFGSTRGNLLRPAPPHLRSPLEQSQVGTISGLYVCEMVTARALVERNAVTIHMTTFAPDESPRSLQLYTVDPATTYTAAKMVADEGLADHIDMNFGCPMPKVTRRGGGAALPYKRRLFGQIVAAAVRATEGTKIPVTVKFRIGIDDEHHTHLDAGRIAEAEGAAAVALHARTAAQRYSGTADWAQIAQLKQQVRTIPVLGNGDIYDASDALAMMAVTGCDGVVIGRGCLGRPWLFAELSAAFTGRPAPAPPTLGEVAEIVRRHGKLLVAHFGEDKGMRDIRKHIAWYLHGFPAGSELRNALALVKTLDELDCLLNRLDGAVPFPDAAIGPRGRQGSPAWVALPDSWLTDPDDCTVPIGADIMESGG

SEQ ID NO: 64004 - protein, 258 aa, Mycobacterium leprae
MAKRLDLKGVNIYYGSFQAVLDVSLAVLPRSVTAFIGASGCGKTTVLRTLNRMHEVVPGARVEGTVLLDDEDIYAPGIDPVGVRRAIGMVFQRPNPFPAMSIRDNVVAGLKLQGVRNRKVLDDTAEYFLRGTNLWDEVKDRLDKPGGGLSGGQQQRLCIARAIAVQPDVLLMDEPCSSLDPISTMAIEELIGELKQEYTIVIVTHNMQQAARVSDQTAFFNLEAVGRPGRLVEIDDTEKIFSNPTEKATEDYISGRFG

SEQ ID NO: 64005 - protein, 317 aa, Mycobacterium leprae
MHRLRAAEHPRPDYVLLHISDTHLISDGSLYGAVDADSRLGELLEQLKHSQLRPDAIIFTGDLADRGEPEAYRKLRCLVESFATELDAELFWVMGNHDNRVALRTLLLDEAPSMAPLDGVRRVDGLRVITLDTSVPGRHYGEISASQLDWLADELTTSAPDGTILALHHPPIPSVLDMAVTVELRDQASLGRVLKGSDIRAILAGHLHYSTNATFVGIPVSVASATCYTQDLTVVAGGARGRDGAQGCNLVHVYQDTVVHSVIPLGIGNMVGTFVSPAQARRDIAESGLFIEPSGRDSLFAHPPMVLTPSVTQSLGD

SEQ ID NO: 64006 - protein, 754 aa, Mycobacterium leprae
MIDTVEYAATTPDQPQPFAELGLREDEYQRVREILGRRPTDTELAMYSVMWSEHCSYKSSKVHLRYFGETTTEEMRTGMLAGIGENAGVVDIGDGWAVTFKVESHNHPSYVEPYQGAATGVGGIVRDIMAMGARPVAVMDQLRFGAADALDTRRVLDGVVRGIGGYGNSLGLPNIGGETVFDSCYDGNPLVNALCVGVLRQEDLHLAFASGAGNKIILFGACTGLDGIGGVSVLASDTFDAEGARKKLPSVQVGDPFMEKVLIECCLELYAGGLVIGIQDLGGAGLSCATSELASAGDVGMAIQLDTVPRRAKDMTPAEVFCSESQERMCAVVAPENVDAFLAVCRKWEVLATVIGEVTDGDRLRITWHGETVVDVPPRTVAHEGPVYQRPVSRPESQEALNADSSKGLPRPVSGDELRATLLALLGSPHLCSRAFITEQYDRYVRGNTVLAEHADAGVLRIDESTGRGIALSTDASGRYTRLDPYAGAQLALAEAYRNVAVTGATPVAVTNCLNFGSPEDPGVMWQFAQAVRGLADGCAALKIPVTGGNVSFYNQTGAVAILPTPVVGVLGVLDNVARRIHTSLGTEPGEILMLLGDTYDEFDGSVWAQVMAGHLGGLPPMVDLAREKLLAEVLSSASRDELVSAAHDLSEGGLAQAIVESALAGETGCRIALPEDADPFVMLFSESAGRVLVAVPRPEESRFRSMCEARGLPAMRIGVVDQGSDSIEVRGQFTVSLAELRMTFEAVLPRFFG

SEQ ID NO: 64007 - protein, 472 aa, Mycobacterium leprae
MSIPNVLAARYASAELVAIWSPEARVIAERQLWLAVLRAQAELSVPMPVKAIADYERVLGEVDLASIAARERVLRHDVKARIEEFNALAGHEQVHKGMTSRDLTENVEQLQIRRSLELVFCHGVAVVARLAECAVSYRDLVMAGRSHNVAAQATTLGKRFASATQETLIALTRLRELIDRYPLRGIKGPMGTGQDMLDLLGGDAAALAELEQRIAEFLGFTKVLASVGQVYPRSLDHDVISALVQLGAGSSSLAHTIRLMAGHELVTEGFAPGQVGSSAMPHKMNSRSCERVNGLQVVLRGYAAMAAELAGAQWNEGDVFCSVVRRVALPDSFFAIDGQIETFLTVLDEFGAYPAVIRRELDRYLPFLATTKVLIAAVRAGMGREAAHHVIREHAVATALAMRECGAEPDLLDRLAADGRLPLDRAALDAALADKKAFTGAAADQVDEVVAMVDKLVGRYPEAAKYTPGAIL

SEQ ID NO: 64008 - protein, 414 aa, Mycobacterium leprae
MNINLFLLIIVVITALAFDFTNGFHDTGNAMATSIASGALAPKVAVFFSAILNLVGAFLSTAVAATIAKDLIEADLVTLELVFAGLVGGIVWNLLTWLLGIPSSSSHALIGGIVGARIAAVGGHGVIWSGVISKVIIPAIIAALLAIVVGAVATWLVYAITRSVPAMSTDTRFRRGQIGSASLVSLAHGTNDAQKTMGVIFLALMSYGTVSKTASTPPLWVIVCCAIAIAAGTYLGGWRIIRTLGKGMVEIKPPQGMAAESSSAAVILLSAHFGYALSTTQVCTGSVLGSGLGKPGGEVRWGVAGRMATAWLVTLPLAGSVGAVTYWIVHLIGGYPGAVIGFSLLVAASVAIYIRSRKVKVDHKNVNENWEGSLTAGLDGSDEHKPHSDVGPKLSATLPRYRSSHHTVGVRNAS

SEQ ID NO: 64009 - protein, 238 aa, Mycobacterium leprae
MPPGSVDVVSRAALDKDPRDVVAMFDDVAHRYDLTNTVLSLGQDRYWRRATRSALRIGPGQKVLDLAAGTAVSTAELSKSGAWCVAADFSVRMLATGGARKVPKVAADATQLPFSDGVFDAVTISFGLRNIADYQAALREMARVTRPGGQLVVCEFSTPTNALVANVYTEYLMRALPQVARLVSSNPDAYIYLAESIRAWPDQVTLACQLSRTGWASPRWRNLTGGIVALHAADKPVR

SEQ ID NO: 64010 - protein, 408 aa, Mycobacterium leprae
MRVETSADVVVVGAGPAGSAAATWAARAGNDVIVIDSVCFPRDKACGDGLTPRAVAELKRLGLDDWLNTRIRHRGLRMSGFGGEVEVDWPGPSFPSTSSAVPRLELDDRIRKVAENSGARMLLGTKAVSVYHDSSRRAASVTLADGTEVGCRQLIIADGARSPLGRKLGRSWHQKTVYGVAARGYLTTPRSDDLWLTSHLELRSPDGAVLPGYGWIFPLGNGEVNIGVGALSTSKRPADLALRSLISYYTDLRRHEWGFSGQPRAVSSALLPMGGAVSGVAGPNWMLIGDAAACVNPLNGEGIDYGLETGRLAAELLDLRDLSYVWPSLLQQHYGRGFSVARRLALLLTFKRCLPAIGPSAMRSTSLITIAVRVMANLVTDDDADWVARVWRSGGWASWLVDRRPPFS

SEQ ID NO: 64011 - protein, 330 aa, Mycobacterium leprae
MVVAGINFGDAAFAATVQDRVVRIEQLMDAELRDTDEVMTESVLHLFAAGGKRFRPLFTVLSAQIGPRPDAPEVIIAGAVIELVHLASLYHDDVMDEAEVRRGAPSANLRWSNSVAILAGDYLFATASRLVSQLGLDAVRIIADTFAQLVTGQMRETRGVPEGADSIEQYLKVVYEKTGCLIGSAGRLGGLFAGAHAEQVERLSRLGSIVGTAFQISDDIIDIDSDYTKSGKLPGTDVREGVRTLPILYALRETGPDSERLRALLAGPVDNDAEVVEALALLRASPGMARARQVLAHYADQASGELAQLPDGPSRDALATLVDYTTNRHG

SEQ ID NO: 64012 - protein, 496 aa, Mycobacterium leprae
MRSAIRYDLPASLVVFLVALPLSLGIAIASDTPVLAGLIAAIVGGIVAGALGGSPLQVSGPAAGLTVVIADLISDFGWGVTCFITVAAGVLQVLLGLSRVARAALAISPVVVHAMLAGVGITIALQQAHVLLGGKSKSTAWHNAIGLPSQILGAHRPGVILGVLVITILIAWRWVPARVARIPGPLVAIVVTTLVSVVFPFHVSRIQVDNRSSLDVLQLPKLPDGHWGAVVLGVITVALIASVESLLSAVSLDKMHNGPRTDLNRELIGQGAANIVSGAIGGLPITGVIVRSSTNVIAGAKSRASSIMHGIWILLFTIPFAGLVDQIPSAALAGLLIVVGVQLLKPAHIETALRNGDLAVYLVTAVCVVFLNLLHGVMIGLAVAIALTGWRVIRARVEAQPVGDEWHVLVAGACTFLALPRLTRVLASVPPCTRVTVNISVNYLDHAAHQAIHDWQRQHHATGGTVHINGVVETGHFSRCAMGDLIGPEQQPEAAA

SEQ ID NO: 64013 - protein, 324 aa, Mycobacterium leprae
MAMSNPSVTRIAGPWHHLDVHANGIRFHVVEAVPTQPAGQDCAPSATARPLVMLLHGFGSFWWSWRHQLRGLTEARLVAVDLRGYGGSDKPPRGYDGWTLAGDTAGLIRALGHSSATLVGHAEGGLACWATALLHPRLVRAIALINSPHPAALRRSMLTHRNQGYALLPTLLRYQLPIWPERLLTRNNAAEIERLVRSRSSAKWQACEDFAVTIDHLRIAIQIPAAAHCALEYQRWAVRSQLRNEGRKFMKSMSRPFSVPLLHVRGDADPYLLADSVDRTRRYAPHGRYVSVSDAGHFSHEEAPEEINRYLTRFLKQVHGPRLS

SEQ ID NO: 64014 - protein, 266 aa, Mycobacterium leprae
MPVSAGCTARVQGTVPLVFDVGPSWLRPLVDNIAVMPGVYQRLLPADVLAIVTAARAIPSVALRRDGREAAVLVLFSGPESGPPDGGAPDDADLLLTVRASTLRHHAGQAAFPGGASDPTDDGPVATALREAHEETGIDLARLHPLATLERMFIAPSRFHVVPVLAYSADPGPVAVVNEAETAIVARVPLCAFINPANRLMVYRRAHGHRWYGPAFLLNDMLVWGFTGQVIAAMLDVAGWAQSWDVTDVREVGEAMALVDSQGDPR

SEQ ID NO: 64015 - protein, 330 aa, Mycobacterium leprae
MIRTGALVLSSAATGVGYASIVERNAFVLRELTIPILTPGSTPLRVLHISDIHMMPHQRRKQAWLRDLATWQPDLVVNTGDNLAHPKAVPGVIQALGNLLSRPGVFVFGSNDYFGPHLKNPVNYLTNPTHRVRGKPLPWKDLRAAFTERGWLDLTHTRREFEVAGLHIAAAGVDDPHISRDRYDTIAGPASPVANLRLGLTHSPEPRVLDRFAADCYQLVMAGHTHGGQLCLPFYGALVTNCGLDRSRAKGLSRWDADMRLHVSAGIGTSPLAPMRFCCRPEATLLTLIATPMGSRVESPVRTGAVRNQQLQCVERAHRDSGPRPPTQLD

SEQ ID NO: 64016 - protein, 508 aa, Mycobacterium leprae
MAEFAEFIAAIDQGTTSTRCVIFDHNGAEVARHQLEHEQILPRSGWVEHNPVEIWERTASVLMSVLNATNLSAKDIAALGITNQRETTLVWNRNTGRPYCNAIVWQDTRTDRIAVALDRDGRGEVIRRKAGLPPATYFSGGKLQWILENVDGVGAAAENGEALFGTPDTWLLWNLTGGPRGGVHVTDVTNASRTMLMDLEKLDWDDELLSFFSIPRAMLPAIASSSPLQPYGVTLADGPVGGEVPITGVLGDQHAAMVGQVCLDAGEAKNTYGTGNFLLLNTGEAIVRSGNGLLTTVCYQFGDAKPVYALEGSIAVTGSAVQWLRDQLGIISGAAQSESLARQVVDNGGVYFVPAFSGLFSPYWRSDARGAIVGLSRFNTNAHLARATLEAICYQSRDVVDAMAADSGVRLDVLKVDGGITSNDLCMQIQADVLGVDVVRSVVAETTALGSAYAAGLAVGFWAGPSDLRANWQEDKRWTPTWGEDQRAAAYAGWRKAVQRTLDWVDVS

SEQ ID NO: 64017 - protein, 351 aa, Mycobacterium leprae
MATRGLAIGVVGATGQVGHVMRTLLEQRDFRADSVRFFASARSQGRKLAFRGQKIEVEDAETADPTGLDIALFSAGASMSRVQAPRFAAAGVTVIDNSSAWRRDAQVPLVVSEVNYNRDVRDAFPLPKGIIANPNCTTMVSMPVLKVLHDEAQLLRMVVSSYQAVSGSGLAGVAELAAQVRAVIDVAEQLIHDGGVVQFPAPSKYVAPIAFNVVPLAGSLVDDDSGETDEDQKLRFESCKILGIPDLLVSGTCVRVPVFTGHSLSINAEFARPLSPQRARDLLGGAPGVKLVDVPTPLASAGVDESLVGRIRRDPGVPDGRGLALFVSGDNLRKGAALNAIQIAELLATQL

SEQ ID NO: 64018 - protein, 421 aa, Mycobacterium leprae
MALVVQKYGGSSVADADRIRRVAERIVQTKKQGNDIVVVVSAMGDTTDDLLDLAQQVCPEPPARELDMLLTAGERISNALVAMAIESFGAQARSFTGSQAGVITTGTHGNAKIIDVTPTRLQFALDEGRIVLVAGFQGVSQDTRDITTLGRGGSDTTAIAMAAALGADVCEIYTDVDGIFSADPRVVHNARKLDTVTFEEMLEMAACGAKVLMLRCVEYARRHNIPVHVRSSYADKPGTVIVGSIKDVPMEDPILTGVAHDRSEAKVTIVGIPDIPGYAAKVFRAVADADVNIDMVLQNVSKVEDGKTDITFTCSRDSGPIAVAKLGSLRDEIGFTQLLYDDHIGKVSLIGAGMRSHPGVTATFCEALAAVGVNIELISTSEIRISVLCRDTELDKAVFALHEAFGLGGEDEVTVYAGTGR

SEQ ID NO: 64019 - protein, 411 aa, Mycobacterium leprae
MFTVRARLALAAGASARWTSRITGRGAGTMIGGLVAITLDRSILSQLGAGRRTIVVTGTNGKSTTTRMTVDALSTLAPGSVATNAEGANMDAGLVAALAANRAATLAVLEVDEMHVPRVADALTPHIVVLLNLSRDQLDRVGEINVIERTLRTGLARHPTAVVIANCDDVLMTSVAYDSPNVVWVAAGGTWSNDSVSCPRSGEVIVRKNRHWYSTGADFKRPSPHWWFDDNTLYGPDELALPMRLALPGSVNRGNAAQAVATAVMLGADATTAVAAVSKVDEVAGRYRSVRIGEHTTRILLAKNPAGWQEALSMVDTQAAGVVISINGQVPDGKDLSWLWDVRFEHFEKIPVVAAGERGTDLAVRLRYAGVEHTLVHDTVAAIASCPPGQVEVVANYTAFRQLQRRLARHG

SEQ ID NO: 64020 - protein, 230 aa, Mycobacterium leprae
MRIGLVLPDVMGTYGDGGNAVVLRQRLLLRGIAAEIVELTLADPVPESLDLYTLGGAEDYAQRLATRHLLRYPGLQHAASYGAPVLAICAAVQVLGQWYETASRERVDGVGLLDVTTAPQDVRTIGELVSTPLLTSLNQRLSGFENHRGGTVLGPAATPLGAVVKGAGNRVGDHFDGVIQGSVMATYMHGPCLARNPELADLLLSKVVGELAPLELPEVELLRRERLAAR

SEQ ID NO: 64021 - protein, 203 aa, Mycobacterium leprae
MFEGPVQNLIDELGKLPGIGPKSAQRIAFHLLSVEPQDIDRLTAVLVKVRDDVRFCTVCGNVSDDERCRICSDTRRDASVVCVVEEPKDVQAVERTREFRGRYHVLGGALDPLSGIGPEQLRIRELLSRIGERVDDVGITEVIIATDPNTEGEATATYLVRMLRDMPGLTVTRIASGLPMGGDLEFADELTLGRALTGRRTMV

SEQ ID NO: 64022 - protein, 116 aa, Mycobacterium leprae
MQPGGDMSALLAQAQQMQQKLLETQQQLANAQVHGQGGGGLVEVVVKGSGEVVSVAIDPKVVDPGDIETLQDLIVGAMADASKQVTKLAQERLGALTSAMRPTAPPPTPPTYMAGT

SEQ ID NO: 64023 - protein, 611 aa, Mycobacterium leprae
MTLYRKYRPAAFAEVVGQEHVTEPLSIALEAGRINHAYLFSGPRGCGKTSSARILARSLNCAQGTTATPCGVCESCLSLAPNAPGHIDVVELDAASHGGVDDTRELRDRAFYAPAQSRYRVFIVDEAHMVTTAGFNALLKIVEEPPDHLIFIFATTEPEKVLPTIRSRTHHYPFRLLSPRTMRALVGRICAQEGVVVDDAVYPLVIRAGGGSPRDTLSVLDQLVAGAEGEHVTYQRALKLLGATDVGLIDDAVDALGAHDAAALFGAVESVIDAGHDPRRFATDLLERFRDLIVLQAVPDAAARGVVDASEDVLDRMREQAVRIGPATLTRYAEVVHSGLGEMRGATAPRLLLEVVCARLLLPSATDAESALLQRVERIETRLNMSIPAARAAYPLQSAPAEKAAQPSLPHQPFLASPDSQPAPDAQSSKLATPQAAAEPTPGMGAPNAAAVRTMWSTVREKVRQRSRTTEVMLAGATVRAVEDNTLILTHGSAPLAKRLSEQHNVDVIAEALKDALGVNWRVRCEAGVPVPAVGALPACEGMVALPTQEKVPVLDVASAQQYEDEGMLAEPGRRDLSAPRPDLEEVALELLQNELGARRIDKWLTDAVED

SEQ ID NO: 64024 - protein, 276 aa, Mycobacterium leprae
MITMISQTVGLVPASLQYPNNSVRALVSQTLLQTKRLLTRWARDYVTIIGALVLPILFLVVLNIVLGNLAYVVTYDSGLYSFVPLITLGAAITGSTFVAIDLVRERSIGLLSRLWVLPIHRASGLLARILANTIRTFVTTLVMLVTGVILGFRFRQGVIASLMWVSVPVIFGIAIAVMVTTVALYTEQTFVVEAVELVQAIAVFLSTGLVPLNQYPGWIQPLVAHQPVSYAIAAMRGLSMGGPVLASMVAMLVWTAGICASCAVPLGVGYRRACTH

SEQ ID NO: 64025 - protein, 467 aa, Mycobacterium leprae
MTHYDVVVLGAGPGGYVAAIRAAQLGLSTAVVEPKYWGGICLNVGCIPSKVLLHNAELAHIFTKEAKTFGISGDASFDYGIAYDRSRKVSEGRVAGVHFLMKKNKITEIHGYGRFTDANTLSVELSEGVPETPLKVTFNNVIIATGSKTRLVPGTLLSTNVITYEEQILTRELPDSIVIVGAGAIGIEFGYVLKNYGVDVTIVEFLPRAMPNEDAEVSKEIEKQFKKMGIKILTGTKVESISDNGSHVLVAVSKDGQFQELKADKVLQAIGFAPNVDGYGLDKVGVALTADKAVDIDDYMQTNVSHIYAIGDVTGKLQLAHVAEAQGVVAAEAIAGAETLALSDYRMMPRATFCQPNVASFGLTEQQARDGGYDVVVAKFPFTANAKAHGMGDPSGFVKLVADAKYGELLGGHMIGHNVSELLPELTLAQKWDLTATELVRNVHTHPTLSEALQECFHGLIGHMINF

SEQ ID NO: 64026 - protein, 285 aa, Mycobacterium leprae
MRETSNPVFRSLPKQRGGYARFGTDAAPMQQGYYQPDPYAATPYQETRAYQVSRPLTIDDVVTRTGMTLAVLVVSAIVSFFLVASNFALATPLTLAGVFGGLAMVLVATFGGKQNSPAIVLSYAVLEGLFLGAVSFLFANFQVSTVNAGVLIGEAVLGTFGVFFGMLVVYKTGAIRVTPKFTRMLVAGTFGVLALMLGNFVLAMFGLGGGTGLGLRSGGPVAILFSLACIGIAAFGFLLDFDAADQMIRAGAPEKAAWGIALGLTVTLVWLYVEILRLLSYLQND

SEQ ID NO: 64027 - protein, 327 aa, Mycobacterium leprae
MNTLHVNIGLACYSDWAFTSAVVALVVALLLLAYELAYVGSRRLDNRTRVVPGSVAADSGTPGIVVDSLQRPFGERVGQAGLAVAYLGIGLLLACILLRGLATLRVPWGNMYEFINLTCFSELVAGAIVLRRRQYRPLWVFLLVSVLILLTISGRWLYANAAPVIPALQSYWLPIHVSVVSLGSGIFLVAGIASILFLLSTSRLVASDPEGAKALARLVRRFPDAQTLDRIAYRTTIFAFPVFGFGVIFGAIWAEQAWGRYWGWDPKETVSFVAWVVYAAYLHARSTAGWRDRRAAWINVVGCVAMVFNLFFVNLVTVGLHSYAGVD

SEQ ID NO: 64028 - protein, 262 aa, Mycobacterium leprae
MTGFTEIAAAGPLLVALGVCMLAGLVSFVSPCVVPLVPGYLSYLAAVVGVSHEETQPGAGVIKTPPAARWRVAGSAVLFVAGFTTVFVLDTVAVLGMTTVLTTHQVLLQRVGGVLTIVMGLVFVGLLPALQRQVQFSLRQLTTVAGAPVLGTVFALGWTPCLGPTLSGVITVAAATDGVNVTRGILLVIAYCMGLGIPFVLLASGSAQAVAGLRWLRQYGRAIQVFGGMLLIAIGAALIAGVWDDFVSWLRDAVVSDMRVSI

SEQ ID NO: 64029 - protein, 329 aa, Mycobacterium leprae
MSVSGYPRHRPRRLRSTPAMRRLVAQTSLEPRNLVLPMFVADGIDELRPIASMPGVVQHTRDSLRRAAVAAVDAGVGGLNLFGVPRDQDKDATGSAGVDPDGILNVALRDLAEDLGDATVLMADTCLDEFTDHGHCGVLDGQGRVDNDATVARYVELAVAQAESGANVVGPSGMMDGQIGALRDGLDSAGYADVAILAYAAKFSSAFYGPFREAVSCSLSGDRRTYQQEPGNAREALREIKLDLDEGADIIMIKPASGYLDVVATAAGVSPVPVAAYQVSGEYAMICAAAANNWIDERAAVLESLTSIRRAGADIVFTYWAADVACWLS

SEQ ID NO: 64030 - protein, 563 aa, Mycobacterium leprae
MVGATMTTRGRKLRPGRITFVGAGPGAPGLLTAQAVAVLANAALVFIDPDVPEPVLALIGKDLPPVSGPAPAGPAAVTAGRAADGTLEGDHYQAAPMVMSGGADIRPALGDPTEVAKTLTAEARSGVDVVRLVAGDPLTVDAVIAEVNAVARTNLQIEIVPGLVTSSVVPTYAGLPLGSSHTVADVRGDVDWEALAAAPGPLILQATASHLADAAHILIDHGLDDATPCVVTAQGTTCQQRSVETTLEGLADSAVLVGTDTAGPLTGPLVVTIGKTVTSRARLNWWESRALYGWTVLVPRTKDQAGEMSERLTSYGALPVEVPTIAVEPPRSPAQMERAVKGLVDGRFQWVVFTSTNAVRAVWEKFGEFGLDARAFSGVKIACVGEATADRVRAFGISPELVPAGEQSSLGLLDEFPPYDSVFDPVNRVLLPRADIATETLAEGLRGCGWEIEDVTAYRTVRAAPPPAATREMIKTGGFDAVCFTSSSTVRNLVGIAGKPHARTVIACIGPKTAETASEFGLRVDVQPETAAVGPLVDALAEHVARLRAEGALPPPRKKSRRR

SEQ ID NO: 64031 - protein, 318 aa, Mycobacterium leprae
MAHVIRIGTRGSLLATTQAALVRDALIANGHPAELVIVNTAGDQSSASIDSLGVGVFTTALRAAIEEGCVDAAVHSYKDLPTADDPRFTVAAIPPRNDPRDAVVTRDELVLAELPAGSLVGTSSPRRAAQLRALGLGLEIRPLRGNLDTRLNRVSSGDLDAIVVARAGLARLGRLDEVTETLDPVQMVPAPAQGAIAVECRAGDSRLVAVLAALDDADTRAAVTAERVLLAELEAGCSAPVGAIAQVVESIDGEGRVFEELSLRGCVAALDGSDVIRASGISTSGRASELGLAVAVELFELGARELMWGARSDRARGS

SEQ ID NO: 64032 - protein, 467 aa, Mycobacterium leprae
MSILLFGVSHRSAPVSVLEQLSLDRSDQIKIVDRVLQSPLVTEAMVLSTCNRVEVYAVVEAFHAGLSVIGQVLSEYSAMSIGDLTKYAYVRYSEAAVEHLFTVASGLDSAVVGEQQVLGQVRRAYAAAEANRTVGQVLHEVAQRALSVGKRVHSETAIDAAGVSVVSVALGIAGRTLGGLAGRIAVVIGAGAMGALSSSYLTQANVGRIHVLNRSLSRARRLAGKIGESGVPADVWTLNHLDEALADADLVVSCTGAVSPVVSLADVHHALAAMRRDETTRPLVICDLGMPRDVDPAVAKLPGVWVVDVEGVQREPSARASAADVDAARRIVAAEVATYLTRQRMAEVAPTVTALRQRAADVVEAELLRLDHRLPGLESAQREEVARTVRRVVDKLLHAPTVRIKQLASAPGGDSYTEALRELFELDQTAVDAVATAGELPVMVSGFSDTTRYGTSPAQSSSKYHAE

SEQ ID NO: 64033 - protein, 441 aa, Mycobacterium leprae
MFSALLLAGVLSGLAFVVGIVAGIRLSPRLIERRQRLANEWAGITVLQMLQRIIALMPLGAAVVDTYRDVVYLNEQAKELGLVRDRQLDDQAWRAAQQALGGDDVEFDLLPGKRPAAGRSGLSVHGHARLLSEKDRRFAVVFVHDQSDYVRMEAARRDFVANVSHELKTPVGAMALLAEALLASADDAETVSRFAEKVLIEANRLGYMVAELIELSRLQGAERLPNVTDIDVDIIVSEAIARHKVAADTAAIEVRTDPPSGLRVLGDQTLLVTALANLVSNAIAYSPGGSLVSISRRRRGDNIEIAVTDRGIGIALEDQERVFERFFRGDKARSRATGGSGLGLAIVKHVAANHNGSIGVWSKPGTGSTFTLSIPAAMPLYQDNDEQSGQPRGCDMWLNRPQREEEEFKSMTPAQAMMQSEVTRGNVNDKCPDCGGRGIAG

SEQ ID NO: 64034 - protein, 367 aa, Mycobacterium leprae
MKRSAVGSFFAGAHVAEAVSLAPLTTLRVGPVAQRVITCASTEQVVDVIRQLDAPAGGRGAGPLLIFAGGSNLVIADTLADLTAVRLANAGITIDGNLVRAEAGAVWDDVVVRAIEHGLGGLECLSGIPGSAGATPVQNVGAYGAEVSDTITRVRLLERSSGSVRWVSACELRFGYRTSVFKQADPSGSQPPAVVLEVEFKLDASGQSAPLHYGELVATLDATSGQRANPHAVREAVLALRVRKGMVLDAADHDTWSVGSFFTNPVVAPDVYRQLAKMVDGPVPHYPAQDGVKLAAGWLVERAGFGKGYPDGAAPCRLSTKHVLALTNRGAATAEDVVTLARTVRNGVLEVFGITLEPEPALVGCVL

SEQ ID NO: 64035 - protein, 226 aa, Mycobacterium leprae
MQGQPTRKQLAALVDHTLLKSEATHADVAALVAEAVELGVYAVCVSPSMVPAAVEAGAGGLRVATVVGFPSGEHVSIVKAQEAVQAVASGATEIDMVIAVGAALAGDLDAVRSDIEMVRSAIAGVVLKVIVESAVLLGQANERTLAEVCHVAEAAGADFVKTSTGFHPAGGASVRAVTLMTEAVGGRLGVKASGGIRTAVDAIALLDAGATRLGLSSTREVLDGLS

SEQ ID NO: 64036 - protein, 287 aa, Mycobacterium leprae
MSDAAIQRVGVVGAGQMGSGIAEVAVRAGVGVTVFETTDTLVTAGRNRIVKSLERGVSAGKVTERERDSALGHLVFTTDLNDLADRQLVIEAIVEDEAVKTKVFAELDRVITDPDAVLASNTSSIPIMKIAAATKNPQRVLGLHFFNPVPVLPLVELVSTLVTDEAAATRAEEFASGVLGKQVVRCSDRSGFVVNALLVPYLLSAIRIVEAGFATVEDVDKAVLAGLSHPMGPLRLSDLVGLDTLKLIADKMFEEFKEPHYGPPPLLLRMVEAGLLGKKSGQGFYTY

SEQ ID NO: 64037 - protein, 179 aa, Mycobacterium leprae
MAELDRKELADLVRRLSVVQGCVTLSSGKQADHYVDLRRATLHHRASALIGRLMRELTKDWNYTVVGGLTLGADPVAIAIIHSPGRPIDAFVVRKYAKTHGLQRLIEGSEVSGQRVLVVEDTSTTGASALTAVRAVQDAGGDVVGVATVVDRGTGAAEAIKAEGLLYRSVLGLADLGLG

SEQ ID NO: 64038 - protein, 848 aa, Mycobacterium leprae
MDSFNPTTKMQVALTSALQAASSAGNPEIRPVHLLLAMLMQNDGIAAPLLETVGVEPDIVRNEAQRLLERLPQASGCSSQPQLSRESLAAITTAQQLATEMDDEYVSTEHLMLGLAMGDSDVAKLLTGHGASPQVLREAFVKIRGSARVTSSDPEFTYQALEKYSTDLTAQSGEGKLDPVIGRDNEIRRVVQVLSRRTKNNPVLIGEPGVGKTAIVEGLAQRIVAGDVPESLRDKTLVALDLGSMVAGAKYRGEFEQRLKVVLDDIKFSAGQIITFIDELHTIVGAGATGESAMDAGNMIKPMLARGELRLVGATTLDEYRRYIEKDAALERRFQQIFVGEPSVEDTVGILRGLKDRYEVHHGVRITDSALVAAAALSDRYITARFLPDKAIDLVDEAASRLRMEIDSRPVEIDEVERLVRRFEIEEMALVNEEDEASKERLETLRAELADQKERLAELTARWQNEKNAIDVVRELKEQLETLRGESERAERDGDLAKAAELRYGRIPEVEKKLEAAVPTAQAREDVMLKEEVGPDDIANVVSAWTGIPAGRLLEGETAKLLRMEDELGKRVVGQKKAVHAVSDAVRRSRAGVADPNRPTGSFLFLGPTGVGKTELAKALADFLFDDQRAMVRVDMSEYGEKHSVARLVGAPPGYIGHDQGGQLTEAVRRRPYTVVLFDEVEKAHSDVFDVLLQVLDEGRLTDGQGRTVDFRNTIPILTSNLGSGGSEEQVMAAVRSVFKPEFINRLDDVLIFDGLNPEELVRIVDIQLEQLGKRLAQRRLQLEVSLPAKRWLAQHGFDPVYGARPLRRLVQQAIGDQLAKMLLAGEVHDGDTLPVNVRPDGEALILG

SEQ ID NO: 64039 - protein, 620 aa, Mycobacterium leprae
MARAVGIDLGTTNSVVSVLEGGDPVVVANSEGSRTTPSTVAFARNGEVLVGQPAKNQAVTNVDRTIRSVKRHMGSDWSIEIDGKKYTAQEISARVLMKLKRDAEAYLGEDITDAVITTPAYFNDAQRQATKEAGQIAGLNVLRIVNEPTAAALAYGLDKGEREQTILVFDLGGGTFDVSLLEIGEGVVEVRATSGDNHLGGDDWDDRIVNWLVDKFKGTSGIDLTKDKMAMQRLREAAEKAKIELSSSQSTSVNLPYITVDSDKNPLFLDEQLIRAEFQRITQDLLDRTRQPFQSVVKDAGISVSEIDHVVLVGGSTRMPAVTDLVKELTGGKEPNKGVNPDEVVAVGAALQAGVLKGEVKDVLLLDVTPLSLGIETKGGVMTKLIERNTTIPTKRSETFTTADDNQPSVQIQVYQGEREIASHNKLLGSFELTGIPPAPRGVPQIEVTFDIDANGIVHVTAKDKGTGKENTIKIQEGSGLSKEEIDRMVKDAEAHAEEDRKRREEADVRNQAETLVYQTEKFVKEQRETENGSRVPEDTLNKVEAAVAEAKTALGGTDISAIKSAMEKLGQDSQALGQAIYEATQAASKVGGEASAPGGSNSTDDVVDAEVVDDERESK

SEQ ID NO: 64040 - protein, 880 aa, Mycobacterium leprae
MTTQMLIRMVLGLSMTAVVLLFAARRVLWLYKLTMSGQPANGRTDELGTRIWTQITEVFGQRRLLQWSLPGLTHLFTMWGFFILLTVYIEAYGVLFQPNFHLPIIGRWNAIGFLQDFFALAVLTSTVTFAIIRMRNEPKEYGRKSRFYGSHTGGAWLILFMIFNVIWTYAVFRGASVDALGEAFPYNSGAFFSHAIAAVLYPLGQGANQIIETVALLLHIGVMLAFLLIVLHSKHLHIFLAPINVTFKRLPDGLGPLMPMESDGEPINFEDPSEDAVFGRGKIEDFTWKAMLDFATCTECGRCQSQCPAWNTGKPLSPKLVIMDLRDHWMAKAPYILGEKTAEKLEGLNLETTKDKSRHVPESGFGRVPGHGPEQATRPLVGTAEQGGVIDPDVLWSCVTCGACVEQCPVDIEHIDHIIDMRRYQVMMESEFPSELSTLFKNLETKGNPWGQNAGDRTNWIDEVDFDVPVYGEDVDSFDGYEYLFWVGCAGAYDDKAKKTTKAVAELLAIAGVKYLVLGTGETCNGDSAHRSGNEFLFQQLAAQAVEILDGLFEGVNSVDRKIVVTCPHCFNTIGKEYRQLGGNYTVLHHTQLLNWLVHDKKLVPVTPVSQDITYHDPCYLGRHNKVYEAPRELVRAAGANFTEMPRHAERSFCCGAGGARMWMEEHIGKRINHERVDEALATNATTIATACPFCRVMVTDGVNDRQEEAGRSGVEVLDVAQVLLGSLDYDKAKLPAKGTAAAEITKTAGLSPAKPTESEAPAPEKSTQAAASAAPAKGIRLAAGAKQPDAKKPVSQTTSAKATEAPAATVPVKGLGIAGGAKRPGAKKSPDQAETPAPTESKSEAKPEPSDHADGNPAPPTAPVKRLGITRSARPPGKH

SEQ ID NO: 64041 - protein, 548 aa, Mycobacterium leprae
MTKLRHYLERGAAEVHYLRSIFESGALGFEPPLTYAAMAVAMRKWGDLAMLPAMPARRSPHRAALIDEEGTLTYKELDRAAHALANGLIAKGVRGGDGIAILARNHRWFVIANYGCARVGARIILLNSEFSGPQIKEVSEREGAKVIIYDDEYTKVVSKAEPALGKLRALGVNPDEEEPPGSTDETLAELIARSSSAPAPKVRKRASIIILTSGTTGTPKGANRNTPASLAPLGGILSKVPFRAHEVTLLPAPMFHALGYLHATLAMFLGSTLVLRRRFKPATVLEDIEKHQATAMVVVPVMLSRILDTLENLETKSDLSSLRVVFVSGSQLGAELATRALEELGPVIYNMYGSTEIAFATIAGPKDLQINSATVGPVVKGVKVKILDDSGKEVPRGQVGRIFVGNAFPFEGYTGGGGKQIIDGLLSSGDVGYFDEHDLLYISGRDDEMIVSGGENVFPAEVEDLISGHPEVVEATAIGVDDKEWGARLRAFVVKKQDATIDEDAIKAYVRDHLARYKVPREVIFLEELPRNPTGKVLKRELRDFEVH

SEQ ID NO: 64042 - protein, 457 aa, Mycobacterium leprae
MLGETRRLQVAPASSVASDKTIQRTTFAKQRVAVLGGNRIPFARSNGAYAEASNQDMFSAALSGLVDRFGLAGERLDMVIGGAVLKHSRDFNLMRECVLGSQLSPYTPAFDLQQACATGLQAAIVAADGIAAGRYEVAVAGGVDTTSDVPISLGDNLRRNLLKLRRSKSNVQRLKLVGALPANIGVEIPANSEPRTGLSMGEHAAITAKKMGIKRVDQDELAAASHRNMASAYDRGFFDDLVTPFLGLYRDDNLRPNSHVEKLATLRPVFGVQAGDATMTAGNSTSLTDGASVALLATEQWVAAHSLTPFAYWVDAEIAAVDYVSGNDGLLMAPTYAVPRLLARNGLSFQDFDFYEIHEAFASVVLAHLQAWESEEYCRQCLGLDTALGPIDRSKLNVNGSSLAAGHPFAATGGRILVQTAKQLAEQKATQKGCGPMRALISVCAAGGQGVAVILEA

SEQ ID NO: 64043 - protein, 387 aa, Mycobacterium leprae
MAFPRTLIVLAAASALVVTCGHDVAQAPDSASIVAGELTAAALTPACVDLPASVPGTLSTRDKLAQLLMVGVRDAADAKAVVTDHHVGGIMIGSWTDLSMLINGALTDIARNPGPLPLAVSVDEEGGRVSRLKSLIGMAPSARVLAQTSTVDQVYDMALDRGHKMRDLGITIDFAPVVDVTDAPDDSVIGGRSFSSDPAVVTAYAGAYARGLRDAGVLPVLKHFPGHGHGSGDSHTGGVTTPPLQDLQTNDLVPYRTLVADAPVGVMLGHLDVPGLTGDDPASLSPAAVQLLRTGANYGAPPFNGPVFSDDVSSMAAISDRYGLADAVLRTLQAGTDIALWVSTQTVPAVLDRLEKVVSAGELAMSAVDASVVRVATIKGPGPGCGR

SEQ ID NO: 64044 - protein, 457 aa, Mycobacterium leprae
MSIATINPATGETVKTFTPTTQDEVEDAIARAYARFDNYRHTTFTQRAKWANATADLLEAEANQSAALMTLEMGKTLQSAKDEAMKCAKGFRYYAEKAETLLADEPAEAAAVGASKALARYQPLGVVLAVMPWNFPLWQTVRFAAPALMAGNVGLLKHASNVPQCALYLADVIARGGFPEDCFQTLLISANGVEAILRDPRVAAATLTGSEPAGQAVGAIAGNEIKPTVLELGGSDPFIVMPSADLDAAVATAVTGRVQNNGQSCIAAKRFIAHADIYDEFVEKFVARMETLRVGDPTDPDTDVGPLATESGRAQVEQQVDAAAAAGAVIRCGGKRPDRPGWFYPPTVITDITKDMALYTDEVFGPVASVYCATNIDDAIEIANATPFGLGSNAWTQNESEQRHFIDNIVAGQVFINGMTVSYPELPFGGIKRSGYGRELSTHGIREFCNIKTVWIA

SEQ ID NO: 64045 - protein, 465 aa, Mycobacterium leprae
MSQPQPRHAPFAPTRDAKAIRTVRFWASPIVITLSLMSALAALYLGGILNPTTNLQHFPLAVVNEDAGPAGAQIVEGLLAGLDKNKFDVRVVSCREAQQLLDSAGVYGSAVIPPSFSSQLRDFGTSAVLPTHADRPVIMVSTNPRAGALGSSIAGQTLTQAITMVNSKAGQRLTAEVAAQTGGAHLTGAAALGLTSPIDIKLAIYNPLPNGTGNGLSAFYYALLLLLTGFTGSIVVSTLVDSMLGYIPTEVGPVYHYAEQINISRFHTLVVKWGLMVVLALITSAVYLAIAHGLGMPIPLGWQLWLYGVFAISAVGITSSSLIAGLGSMGLLVSMFIFMILGLPSAGATVPLEAVPPFFRWLSEFEPLHQLFLGVRSLLYLKGHADSGMSQALFMTALGMAIGLLLGGVVTRIYDRGGCHRIPGAVGMAIAEWHQAQHQARLRPNKSGKRPNVIPTQPKCHLPVI

SEQ ID NO: 64046 - protein, 279 aa, Mycobacterium leprae
MTITRTERNFYGVGGVRIVYDVWMPDTRPRAVIILAHGFGEHARRYDHVAHYFAAAGLATYALDLRGHGRSAGKRVLVRDLSEYNADFDILVGIATRDHPGLKRIVAGHSMGGAIVFAYGVERPDNYDLMVLSGPAVAAQDMVSPLRAVVGKGLGLVAPGLPVHQLEVDAISRNRAVVAAYKDDPLVYHGKVPAGVGRVMLQVGETMTRRAPVLTTPLLVVHGSEDRLVLVDGSHRLVECVGSTDVELKVYPGLYHEVFNEPERDQVLEDVVCWILKRL

SEQ ID NO: 64047 - protein, 564 aa, Mycobacterium leprae
MMPPDIKPRSRDVTDGLEKAAARGMLRAVGMNDDDFAKAQIGVASSWNEITPCNLSLDRLAKAVKEGVFSAGGYPLEFGTISVSDGISMGHQGMHFSLVSREVIADSVETVMQAERLDGSVLLAGCDKSLPGMLMAAARLDLASVFLYAGSILPGRTKLSDGTEHEVTLIDAFEAVGACSRGLMPRADVDAIERAICPGEGACGGMYTANTMASAAEALGMSLPGSAAPPATDRRRDGFARRSGQAVIELLRRGITARDILTKEAFENAIAVVMAFGGSTNAILHLLAIAHEADVTLSLEDFSRIGFKVPHIADVKPFGRHVMFDVDHIGGVPVVMKALLDAGLLHGDCLTVTGQTMAENLASIAPPDPDGQVIRTLHNPIHPTGGITILRGSLAPDGAVVKTAGLDSDVFEGTARVFDGERAALDALKDGTIAKGDVVVIRYEGPKGGPGMREMLAITGAIKGAGLGKDVLLLTDGRFSGGTTGFCVGHIAPEAVEAGPIAFLRDGDRVLLDVVGCSLDVLVDPVEFSSRKKDFIPPAPRYTTGVLAKYVKLVSSATVGAVCG

SEQ ID NO: 64048 - protein, 135 aa, Mycobacterium leprae
MLDHRRSRRSWQPRSIVSQMLSAVLGWLGEGLNEDTVREDDNRYGYSQQKGNYAKRLRRIEGQVRGIARMIDEDKYCIDILTQISAVSNALRSVALNLLDEHLEYCVSRAVAEGGSEAEDKFAEASAAIARLVRS

SEQ ID NO: 64049 - protein, 367 aa, Mycobacterium leprae
MTEAQTTVGVVAESGSDERRVALVPKAVASLVNSGLAVVVESGAGEGALLPEQLYTEAGARIGDAWAADIVVKVAPPAAAEVGRLRRGQTLIGFLASRNADNWIGELKRAGVQAFALEAIPRISRAQVMDALSSQANVTGYKAVLLAASESTRFFPMLTTAAGTVKPAIVLVLGVGVAGLQALATAKRLGARTTGYDVRPEVAEQVRSVGAQWLDVGIEASGAGGYARELTADERAQQQKALEKAISGFDVVITTALVPGKPAPRLVTAAAVEAMKPGSVVVDLAGETGGNCELTEPGQTVIKHDVTIAAPLNLPATMPEHASELYSKNIKALLDLLIKDGKFAPDFDDEVVAESCVTRDREDSIDV

SEQ ID NO: 64050 - protein, 333 aa, Mycobacterium leprae
MKFLQQMRKLFGLAAKFPARLTIAVIGTALLAGLVGVVGDTAIAVAFSKPGLPVEYLQVPSPSMGHDIKIQFQGGGQHAVYLLDGLRAQEDYNGWDINTPAFEEYYHSGLSVIMPVGGQSSFYSNWYQPSQGNGQHYTYKWETFLTQEMPSWLQANKNVLPTGNAAVGLSMSGSSALILASYYPQQFPYAASLSGFLNPSEGWWPTMIGLAMNDSGGYNANSMWGPSTDPAWKRNDPMVQIPRLVANNTRIWVYCGNGAPNELGGDNIPAKFLESLTLSTNEIFQNTYAASGGRNGVFNFPPNGTHSWPYWNQQLVAMKPDIQQILNGSNNNA

SEQ ID NO: 64051 - protein, 310 aa, Mycobacterium leprae
MLFRQLEYFVAVAQERHFARAAERCYVSQPALSSAIAKLERELNVTLINRGHSFEGLTPEGERLVVWAKRILAEHDAFKAEVHAVRSGITGTLRLGTVPTASTTASLVLSAFCSEHPLIKVQICSRLPVTELHRRLGDFELDAVIVHSAPDDTHAVDLVPLYHEHYVLVSPADMLPPGASVLAWPEASQLPLALLTPDMRDRQLIDRAFAGHAITATPQVETDSVASLFAQVATGNWACIVPHTWLWTTPIGAEIRAVEMVDPVLKADVALATNSAGPGSPVARALVASAKQLALNEFFEAQLAGITRRR

SEQ ID NO: 64052 - protein, 666 aa, Mycobacterium leprae
MRRVGLLRIWNQPERRNGIPALDGLRAIAVALVLTQHGGIPGLSGGFIGVDLFFVLSGFLITSLLLDELRHTGRIDAINFWIRRACRLLPALVLMVLTVGIARELFPYQALTNLRNDAIATFLWVANWRFVVHKADYFTQGTPPSPLQHAWSLGVEEQYYLVWPLLLIAVTLLLAARARRRCRYATLGAVRLAVFVLASLGALASATVAIARVCDVTRDRIYFGTDTRAQALLVGAAASALLVRDWPSLNRGWCLIRTRWGQLIARFLPVLGLAGLAAATHYATGGAGDFRHGLLIGVAIAAVIVIAPVALEQRGTVARLLALRPLVWLGTISYGIYLWHWPIFLALNGERTGWSGVPLFASRCSATVAVAAVSWWLIEQPIRHWRPVRVPLLPLAAATVASAAAATMWVIPVGTETGLRDIALPPEVSTVAAVSPSPPRGKLSSTRDPNQPFTVAVFGDSIGWTWMHYLPPTPGFAFIDHTVIGCSLVRGTPYQYIGQTLEQRPECDNWPIRWSTQINKDHPNVALLIIGRWETVNRVNEGQWTHIGDPTFDSYLNAELQQALNILGSSGVRVVVATVPYSRGGEKPDGQLYPEDQPDRVNQWNTMLRNTVSQHSNVQILDLNKKLCPDGVYTAKVDGIKVRSDGVHLTPEGVKWLTPWLEESLK

SEQ ID NO: 64053 - protein, 1609 aa, Mycobacterium leprae
MKIPHVTDPVSNMVGGMAQVVRASTHAATGAVNTMQMLASPVAEFAWPVVQSVAKSTGRALGTGHSPNFANRVDPPVRWHNGQRVHLDLDPLLPFPRWHEYAAVVEEPVRRIPGVAKGHVEGSLGRLVIELDKNADSDVVLGKVRDVVIALAADLALTGARSAPKVAPFADPGNPLAILMPLTAAVMDLVALSAAVTGWVTRLPAVPQTIRAAAALVNHQPRMVSLLESRLGRVGTDIALSITTAAASGLTQAVGTPLLDLACRGLQLSEAAAHQRVWRDREPQLASPKRPQAPVVPVISSAGEKSHAAGHNWTAAASNEASHLVVGGSIDAAIDTAKGSMKGPVESYVDSAANGSLIAAASALLAGGGTEDAAGAILAGVPRAAHMGQQAFAATLGRGLANAGQLVLDPGALRRLDQVKVVVIDGAALRGDHRAVLLARGNTPGWDDDRVYEVTDALLHGERAPEPDPDESPATGARLRWVPLQGPSATPVQGREHADLVVNGECVGGVDVGWEVDPYAIPLLQTAHRTGARVVLRHVAGTEDLSASVGATHPPGTPLLKLVRELRTDRGPVLLITAVHRDFASTDTLAALAIADVGVALDDPHAATPWTADIITGTDLAAAVRILSALPVARSASESSVHLAQGGTTLAGLLLITASAGSKSASPITLRRWFSPVNAAAATALVTGVVSASKVLRLPDPTPQPLTAWHALDPEIVYSRLAGVTQPLAVEPGTPDWRRRLDDLSYTRALSPLRKPVTKLARLASATRQEFADPLTPILAVGAAASAIVGSNIDALLVAGVMTVNAITGGVQRLRAEAAAAELFAEQDQLVRRVVVPAVATTRRRLEAAQHATRTVTVSAKSLRAGDVIDLAAPEVVPADARVLVAEDLEVDESLLTGESLPVDKRVDPVAINDADRASMLFEGSAIVAGHARAIVVATGVGTAAHRAISAVADVEVSAGVQARLRELTSKVLPLTLAGGAAVTGLALLRRASLRQAVADGVAIAVAAVPEGLPLVATLSQLAAAQRLTAKGALVRSPRTIEALGRVDTICFDKTGTLTENRLRVVCAVPNTRMPHDPLPDITDPHSAAVLRDAARASTQPHDGQGHTHATDEAILTAASSLNSHTDSTWSLIAEVPFESSRGYAAAIGITGNGKAPMLMLKGAPEKILPRCRFADPEADVAHAESLVRHLAEQGLRVLAVAQCSWGHDTTDDNDTDADAVDAAAHDLELVGYIGLADTARPSSRPLIEALVTAGRNVVLITGDHPITARAIAQQLGLRSDARVVNGTELIGLDEDACAELAADVQVFARVSPEQKVQIVAALQRCGQVTAMVGDGANDAAAIRMADVGIGVSGRGSSAARGAADIVLTDDDLGVLLDALVEGRSMWAGVRDAVTILVGGNVGEVVFTIIGTVFGAGRAPVGTRQLLLVNLLTDMFPALSIAVTSQYEEPGEDEYQTDEEADEARRTHQHEVLTGPTPSLDAPLMRQIVNRGVVTAAGATTAWAIGRWTPGTERRTATMGLTALVTTQLAQTLLTRRHSPLVVATALGSAGVLIGIIQTPVISQFFGCTPLGPIAWSGVITATAGATAVSVLAPQWLNKAFGIAQLNQE

SEQ ID NO: 64054 - protein, 893 aa, Mycobacterium leprae
MIRYMVSTEMALSNSASSSARFNHSDADRLLDGYRAARAQKVLFDLHSAGTAGPGIGYDEFVDDSGYVRPSWTELADAIGGRGRAGLHQLRSVMHRLIYNDGITYTGIDPGALTNDHGVVPGLWRLDSLPLLVSATDWEVLEAGLIQRSRLLDAVLTDLYGPRRLLTDGVLPPELLFGHPGYVRTDHGIEVPGHHQLFMHGCDLSRLPDGGFQINADWTQAPSGAGYALADRRVVAQALPDLYETIGPRPTTPFAQALRLALIDAAPEVAQDPVVVVLSPGIYSETAFDQAYLATLLGFQLVESSDLVVCDGKVWMRSLGTLKRVDVVLRRVDADYMDPLDLRADSLLGVAGLVEAQHRGTVTVVNTLGSGILESAGLLRFLPQLSERLLGETLLLPSAPVYWAGIDSERLHLLTNLSSLLIKSTVGGKTIVGPSLSSGQLTEMAARIAAKPWQWVGQELPQFSTAPTDHDGVLSPASIGMRVFTVAQRSGYAPMIGGLGYALASGIDAYSLKKVAAKDIWVLPTERARTEAITHSLLESPPMTGTGTLGVSSPRVLSDLFWMGRYGERAENMARLLIVTREHYHDSRHRQNTEENACLPVLIAALGKITGTDTGSGGQADVIAVAPSTLWSLTTDRNLPGSLVQSVDGLVLAARAVRAQLSRDTWMVLSEVERAMVHETEPPESLVEGDALLASVQARTLAGMLTLSGLAGESMVRDIGWTIMDIGKRIERGLALTALLHATLTDVRSPAAEHSIIESILVICESSVIYQRRTVSTIDVAVVAELMLFDATNPRSLVYQLDRLRVDLADLPGSSRSSLPERMVAEMSTRLRRSAPAQLKEVSADGRRYVLAELLAAVDTALRDLADAITATQLAVPCGMQPLWGPDNRQTMS

SEQ ID NO: 64055 - protein, 604 aa, Mycobacterium leprae
MAVVDDLAHSGMDAVPPSEDFGRQPPQDLAAEQSVLGGMLLSKDAIADVLERLRSGDFYRPAHQNVYDAILDLYGRGEPADAVTVAAELDRRGLLRRIGGAPYLHTLISTVPTAANAGYYAGIVAEKALLRRLVEAGTRVVQYGYAGAEGADVAEVVDRAQAEIYDVAECRLSENYVPLEDLLQPTMDDLDAIASNGGISRGAPTGFTELDEVTNGLHPGQMIIVAARPGVGKALALDTPLPTPTGWTAMGDVAVGDELLAVDEAPTRVVAATEVMLGRPCYEIEFSDGTVIVADAQHQWPTSYGIRTSAQLRCGLDIIAAAGSTPRHAGRLTTAAFMAPVLCIDSVRRVRSVPVRCVEVDNAAHLYLAGRGMVPTHNSTLGLDFMRSCSIKHRLASVIFSLEMSKSEIVMRLLSAEAKIKLADMRSGRMTDDDWTRLARRMSEISEAPLYIDDSPNLTMMEIRAKARRLRQKTNLKLVVVDYLQLMTSGKRFESRQVEVSEFSRHLKLLAKELELPVVAISQLNRSPEQRTDKKPMLSDLRESGSLEQDADVVILLHRPDAFDRDDPRGGEADLILAKHRNGPTKTVTVAHQLHLSRFTNMAR

SEQ ID NO: 64056 - protein, 152 aa, Mycobacterium leprae
MKLILTADVDHLGSVGDTVEVKDGYGRNFLLPHGLAIVASRGAQRQADEIRRARETKAMRDREHANEIKVAIEALGSVSLPMKTVADSGKLFGSVTAGDVVAAIKKAGGPNLDKRIVRLPKTHIKAVGTHPVSVHLHPEVDVVVLLDVVAAR

SEQ ID NO: 64057 - protein, 84 aa, Mycobacterium leprae
MAKSTKRRPAPEKPAKARKCVFCAKKNQQIDYKDTTLLRTYISERGKIRARRVTGNCVQHQRDIAIAVKNAREVALLPFTSSAR

SEQ ID NO: 64058 - protein, 168 aa, Mycobacterium leprae
MAGDTTITIVGNLTADPELRFTSSGAAVVNFTVASTPRIYDRQSGEWKDGEALFLRCNIWREAAENVAESLTRGARVIVTGRLKQRSFETREGEKRTVVEVEVDEIGPSLRYATAKVNKASRSGGGGGGFGSGSRQAPAQMSGGVGDDPWGSAPTSGSFGVGDEEPPF

SEQ ID NO: 64059 - protein, 96 aa, Mycobacterium leprae
MRPYEIMVILDPTLDECTVGPSLETFLNVVRKDGGAIDKVDIWGRRRLAYEISKHAEGIYVVIDLKAAPATVSELDRQLSLNESVLRTKVMRTDKH

SEQ ID NO: 64060 - protein, 708 aa, Mycobacterium leprae
MPGSRLNRTWLLHLNRQVNWRWVRYSLYLAVVVLLLLPIVTFTMTYFMVKVPRPGDIRTNQVSTILANNGLEIAKIVPPEGNRVDVNLSQVPVHVRQAVIAAEDRNFYSNPGFDFRASVRAVQNNLFGSGDLQGGSTITQQYVKNALVGSAQHGFDGLMRKTKELVIAIKMSDAWSKDDVLQSYLNIIYFGRGAYGISAAAKAYFDKPVEQLTCSEGALLAALIRRPSVLDPAINLKGVTARWNWVLDGMVDINALSPNDRSVQLFPATVPPDQARAQNQTTGPNGLIERQVVKELFELFNIDRQTLNTQGLQVITTIDPQAQRIVEKAVSKYLDGQDPDMRAAIVSIDPHNGAIRAYYGGADANGFDFAQAGLQTGSSFKVFALIAALEQGIGLGYRVDSSPLTVDGIKITNNGDESCGNCNIAEALKLSLNTSYYRLMLKLKNGPQAVADAAHQAGIVSSFPGVAHTLSEDGKGGPPNNGIVLGQYETRVIDMASAYATLAASGVYHRPHLVQKVVNAEGRVLFDASTADNSGDQRIAKAVADNVTAAMQPIAGYSRGHNLAGGRPSAAKTGTVQLGDTTANKDAWMVGYTPSLSTAVWVGTVKDNVPLITASGEAIYGSGLPSDIWKSTMDGALEGTPNEGFPKPTEVGGYAGVPTLAPPPPLKKVIQPTIEVAPGIIIPVGPPTTVTVPPTQALPDLTTSTTPP

SEQ ID NO: 64061 - protein, 180 aa, Mycobacterium leprae
MLELAILGLLIESPMHGYELRKRLTGLLGAFRAFSYGSLYPALRRMQADRLITGHVAPAGTPVRRARQVYQLTDAGRRRFSELVTDTGPDNYTDNGFGVHLAFFNRTPAEARMRILEGRRRRVEERREGLREAVTRASNSFDRYTRQLHQLGLESSEREVKWLNELIAAERALLGRVEQT

SEQ ID NO: 64062 - protein, 486 aa, Mycobacterium leprae
MNVPEAAQDTDLLTVAAVTLNRHTPVLRDLGSVFAASGHELYLVGGSVRDALLGRLDSPDLDFATDAGPEQVQQIMRRWADNLWETGIEFGTIGVGKGDYRLEITTFRADRYDQVSRNPEVRFSDRLDDDLVRRDFTVNAMAVRIASYGPGEFFDPLGGLAALRVRVLETPAAPSVSFGDDPLRMLRAARFVSQLGFTVAPQVHAAIEEMASQLARISAERVSTELDKLLLGNDPAAGIDLLVQTGMGEVVLPEIGDMRMAIDEHHQHKDVYQHSLTVLRQAIALEDNGPDLVLRWAALLHDIGKPATRRHELNGGVSFHHHEVVGAKMVRKRMRALKYAKQLVDDVSQLVYLHLRFHGYGEGKWTDSAVRRYVTDAGPLLSRLHKLVRADCTTRNQRRAARLQDSYDRLEARIAELAAEEDLARVRPDLDGNQIMALLDIPAGPQVGEAWRFLKELRLDRGPLTNEEATAELLAWWKTRQSQGLL

SEQ ID NO: 64063 - protein, 1206 aa, Mycobacterium leprae
MKPAPRWTQSQSAQQVTHAMRPCRELSAQQPELSDAALVSRSWAMAFATLISRITGFARVVLLAAILGAALSSAFSVANQLPNLVAALVLEATFTAIFVPVLVRAERSDPDGGTAFVRQLITLTTTLLLLSTTLSVLAAPLLVRLMLGRNPQVNEPLTTAFAYLLLPQVLAYGLSSVFMAILNTRNVFGPPAWAPVINNIVAIAALVGYLVTPGELSVDPVRMGNAKLLVLGIGTTAGAFAQTAVLLVALGREHISLHPLWGLDQRLKRFGAMATAMVLYVLISQLGLVVTNQIASTTAASGPAIYNYTWLVLMLPFGIIGVTVLTVVMPRLSRNAAANDTPAMLADLSLATRLTLITLIPTVAFMTAGGSAMGSVLFAYGHFGEVDAGYLGTAIVLSAFTLIPYGLVLLQLRVFYAREQPWTPIVIIVVITAVRIIVSVLAPYVISNPELVAGYLGMANGLGFAAGAIVGYYLLRRALLPTGGHLFGVQEIRTVLVTIAASLLAGLAAHIADRLLRLNELTMHGGGAGSLLRLTVLTSIMLPTMAVVMLRGHVPEVHAALGAVRGQIMSRNWIAKLQKATVPDQSSRPITVTYPGQNNSSPPRVNAIQESIRSRPPERIAKAQIAKGPEVSDRPVESASSRSASDTGLPSELPRPVAGNSQPYISANLELEHVASLHPPEQQKVDFPAYPARRPIRFEVSRERGGEQSSPTGDVHLVPGACIAGGRYRLLAFHGGAPSLQFWQALDTALDRQVALTFVNPDGALPDDSLQETLSRTLRLSRIDMPGVAQVLDVIHTGSGGLVVSEWIRGGSLHEVADTSPSPVGAIRAMQSLAAAADAAHRAGVALSIDHPSRVRVSTEGDVVLAYPATMPDANHHTDIRGIGATLYALLVNRWPLPEAGMHSGLAPAQQDTTGQPVEPAVIDQNIPTQISAVTVRAVQEDGGILRASTLLNLLQQATAVADRTEVLSPIDDRSPTPTAFCPTTARDPVVFAQRRRNLLIGIGAAVVILVVALLVMASVINKVFGHLGSGLNNDKLGLNTPTSSTSSSPTSSVPEGSIVKPTKATVFSPDGEADNPDDAGLAIDGNPATSWQTDIYNDAVPFPGFKNGVGLMLHLPKPTVVSAVTIDVASIGTKVEIRSASTPTPAKLADTTVLIPATALKPGHNVIEVNSGSPMSNLLVWISTLGSTGGKSLAVISEITIHTPS

SEQ ID NO: 64064 - protein, 406 aa, Mycobacterium leprae
MSSPRCEDGDTLRCGDRNAAVTEIRSALAALGLLHSPGDDLTTSKYIALDLFDPQLEHAVRAFQQHRGLLVDGVVGEATHRALKEASYRLGARTLYHRFGAPLSGDDVATLQARLQDLGFYTGMVDGHFGLQTHNALISYQREYGLTADGICGPETLRSLYFLSSRVTGGSPHAIREEELVRRSGPKLSGKRIIIDPGRGGADRGLITQGPTGPISEADVLWDLASRLEGRMAAIGIETFLSRTTNGSPSDSERAAIANNVGAELMISLRCETQTSPAANGVASFHFGNSHGSVSTIGRNLADFIQREIVARTGLRDCRTHGRTWDLLRLTRMPTVQIDIGYITNPRDRGVLIGTQNRDAIAEGILAAVKRLYLLGKNDQPTGTFTFAELLAHELSVERASRLGGS

SEQ ID NO: 64065 - protein, 351 aa, Mycobacterium leprae
MSSLQGWVDTPALWSASLTDQSALLSSEIQKTPPEPMFRQEAYYDAECVVEMNVSHETTNELDTPIGAAAERAMRVLHTTYDPLCRPCHRRLFTIANQKGGVGKTTTAVNLAAALALQGLKALVIDLDPQGNASTALGISNRQSRVFSSYDVLIGEVSLQTALRCSPYNERLFCLPAAIDLAGAEIELVSMVARENRLRTALTELNDLDFDYVFIDCPPSLGLLTINALVAAPEVIIPIQCEYYALEGVSQLMCNIEMVKAHLNPQLEVTTVILTMYDGRTKLADQVAEEVRRYFGTKVLQTVIPRSVKVSEAPGYSMTIIDYDPGSRGAMSYLDASRELAERDQPPSMKG

SEQ ID NO: 64066 - protein, 248 aa, Mycobacterium leprae
MFHVKHVGSYEELASFTSVKGNLGFDTVFEAVFMIFGPRLNIAQRYVDLLANTGIERGLLGPHEANRLWDRHLLNSAVVAELLDPGDRVVDIGSGAGLPGLPLAIARPDLQVVLLEPLLRRVTFLREVVAELGLDVEVVRGRAEELWVRDRIGERDVAVSRAVAALDKLTKWSIPLLRPGGQILAIKGEHVFDEIHQHRRVMASLGAVDVMVVVCGANYLCRPVTVVLTRCGQQMRHKPARVGDRKTQ

SEQ ID NO: 64067 - protein, 380 aa, Mycobacterium leprae
MSLLPFDFVSLDIVYYPVSWIMWVWYKLFAAVLGPSNFFAWALSVMFLVFTLRALLYKPFVRQIRTTRQMQELQPRIRALQRKYGKDRQRMALEMQKLQREHGFNPILGCLPMLAQIPVFLGLYHALRSFNRTTGGFGQPHMSVTENRMTGNYVFTPVDVGHFLDANLWGAPIGAYMTQRSGLDAFIDFSRPAVILVGIPMMVLAGVATYFNSRASIARQSAEAAENPQTALMNKIALYVFPFGVVVGGPFLPLAIILYWFSNNIWTFGQQHYVFSMIEKEDEAKKQKAIERRTANAPAPGSKPKYVSTTAPVSVNGFSKDTMISDDGAKLGSQEADSIDWVTETKTATTPADKPDCVGYNNNPTSHTRRSGQRTKRRKR

SEQ ID NO: 64068 - protein, 120 aa, Mycobacterium leprae
MLSACNRMRRSSEFDATVKFGLRAVQSDVIIHVWRGCNRDETKAPHVGLIIAKTVGSAVERHRVARRLRHVARTMLGELGGADQVVIRALPSSRNVSSAWLAQQLRNGLRCALDLAETDW

SEQ ID NO: 64069 - protein, 47 aa, Mycobacterium leprae
MAKGKRTFQPNNRRRARVHGFRLRMRTRAGRSIVSDRRRKGRRTLTA

SEQ ID NO: 64070 - protein, 413 aa, Mycoplasma pneumoniae
MGQQGQSGTSAGNPDSLKQDKISKSGDSLTTQDGNATGQQEATNYTNLPPNLTPTADWPNALSFTNKNNAHRAQLFLRGLLGSIPVLVNRSGSDSNKFQATDQKWSYTDLQSDQTKLNLPAYGEVNGLLNPALVETYFGNTRAGGSGSNTTSSPGIGFKIPEQNNDSKATLITPGLAWTPQDVGNLVVSGTSLSFQLGGWLVSFTDFIKPRAGYLGLQLSGLDASDSDQRELIWAKRPWAAFRGSWVNRLGRVESVWDLKGVWADQAQLAAQAATSEASGSALAPHPNALAFQVSVVEASAYSSSTSSSGSGSSSNTSPYLHLIKPKKVESTTQLDQGLKNLLDPNQVRTKLRQSFGTDHSTQPQSLKTTTPVFGTSSGNIGSVLSGGGAGGGSSGSGQSGVDLSPVERVSGH

SEQ ID NO: 64071 - protein, 789 aa, Mycoplasma pneumoniae
MEKNKQALLLQAIEDVFAFSFSKYAKYIIQDRALPDLRDGLKPVQRRILYGMYQMGLKPTSPYKKSARAVGEIMGKYHPHGDASIYDAIVRMSQAWKNNLTTISIHGNNGSIDGDNAAAMRYTEARLSPYGFELLKDIEKQLVPFVNNFDDSEVEPSVLPTLLPNLFINGTSGIAAGYATNIAPHNVGELLDGLSYRIENPDCDLKAILKIVKGPDFPTGGLVYFEQELANIYQTGKGKFVIQAKYETNTAFGQNQIVITEIPYETVKANIVKQIEELISDNKLSALESVIDSSDRSGIRIIINHKDFLSADKIMAFLFKHTQLQVNFNLNNTVIANRCPVRVGLLAYFDQFLAFAHELIINSAKYDLALANKRLEIIKGLIKAVSMIDEIIRLIRRATDKQDAKTKLIDKYAFTLNQAEAIVSLRLYQLTNTDIKVLFAEQKELEQTIQTAERLIAKPQARNQLLQAQFFQYKKQFNQPRRAQIVGLIEKQKVQDSDFIEHKEVGLLISHDGIYFKFEPEQLAKHLVEFKSEQDQLIFGGVVQNSDYFFMVTSLGNIITVPIYKTLSNTKTKMNELLAKKPILMEDEKLVLAGIVNPDKMEQQLLVLTSQCGMVKRVELSKVINTKQIKSSCCMALRERDKLVNAFVQTKGEPKLVCLVSSSNSFATFLAEEIPIISNKGIGVKGIKLKAEEKVRFAMPLQDNDALVVINSDGGVYNFEVVELAVASRMSVGKKLIPKTKTPVSCFAANKHSEIIGHRGKNGSDLFTLNELNRLPKSTVSQMRLFKWS

SEQ ID NO: 64072 - protein, 635 aa, Mycoplasma pneumoniae
MKNNYSEANIKILKGLDAVKKRPGMYIGSTDSRGFHHLLWEILDNCVDEVLSGFANTIAVVLHAENQITVSDNGRGIPFETHSDSKISTIDTVFTYLHAGGKFDNDSYKIAGGLHGVGASVVNALSDQLQVTVKRQGKVYRSVYENGGKIKQKAHCIGNAKIDEHGTSVTFRPDPKVFKKIHFDSELIRARLKELAFLFKKLQLTFVDETGSGEKEVFFTEAGISQYLDELNADSKQIAQKIFVSGTEDDIELEAVFQFIDGEDEKLLSFANSIRTSEGGSHEASFRQSVGDVINNYCRKYNFLKERDKNFEASEIREGLNGIIKVNLPEKIIAFEGQTKSKLFSKEVKAVVQKLTQKHFFQFLERNSVDAKLIVEKLFYNRKLRQELKQQRQIKKNLSNPKAERILFGKLAPAQSKKVAERELFVVEGDSAGGTAKMGRDRFLQAILPLRGKVLNVEKINNKKEAINNEELLTLIFCIGTGIGNNFTIRDRKYDKIIIMTDADNDGAHIQILLLTFFYRYMKPLIEKGHIYLALPPLYKFEGRDKKARYLWTEQELEQYRAKHSHFNVQRYKGLGEMNADQLWETTMNPMTRKLIQVKLDNFIQAEKQINVFMGDKTELRKSWIEANINFSSEN

SEQ ID NO: 64073 - protein, 127 aa, Mycoplasma pneumoniae
MRIKGGKQTRVRRKKWLKQASGSFGTRHASYKVAKQTVIQAAKYAYRDRRNKKRDFRSLWILRLNAALREQGMTYSVFINLLKKHNIEINRKVLSELAIKEPSKFNLIVQKVKSEQPKAAKPAALGN

SEQ ID NO: 64074 - protein, 59 aa, Mycoplasma pneumoniae
MKVKSAAKKRFKLTKSGQIKRKHAYTSHLAPHKTTKQKRHLRKQGTVSASDFKRIGNLI

SEQ ID NO: 64075 - protein, 201 aa, Mycoplasma pneumoniae
MPLILDQGCFVSESRFHRLAQNIKQGSRREREQKPLINDKIGFNEFILIDENGSNLGTVRRTDALKMAEEKQLDLVLIGSNPAKPIVKLLDFGRYTYDLKRKKRQSKKNQTIIQIKEVVVKPTIAKHDLEFKAKQTTGWAEKGYHVKFVVRAFGRVSTRIELIEKVFNDFYLLVEPAVEVQKPLTASSKTMYSALLVPRKK

SEQ ID NO: 64076 - protein, 805 aa, Mycoplasma pneumoniae
MLISKKTLAVLIPEITHVSNNEICEKLQQIGIEVEAIRAFKNPDYLQLGILRAVTPHPHDNHLYVCQVQIDKNKQLNVVTGAVNIVDPNNLNKHVIVAKKGAELLNGLIIKTKNIKGIISDGMLCSYVDINPFSKHLIADGDDTHAIVLDNINRDEFGDYLSFLNLDDVVFEVTLPTNRSDLQSLIFLAKELAAVLKRPVFLEQKTTMTLREFYRFPLNLRNRAQANFFGGLFLRDVAITSSPWTTKGLLINQELRPVNCFVDQANMVTVYTGQPIHCHDADKIHGSVELKLATQLETMLALDNKEYEIKPGDLVVADEQGTIAIVGIIGSKRTMVDNTTNNIFFEVVNYNHERIKQTAQRLGVANFASRLMSKPISLQATENCLNYLQNNFLNPESIGKISKFSSTIKAPAFNRKIYLNFNQLRELIGVTKKQLNDHMIRNYLTSLGFKMENQIARAPAYRQDITVWQDISEELLKILDLNKIKEDEILSSTKLEKHEKLNAYDALQKLRTKLQTLGFHNVITYQLISPERARNFNLFGLSNLWEIKNPLSNERSVLRVGLIDSLLRVIQKNAAYKNKLGNIFEFSFVKTKDSNQLHIAALWLEKMFGSTYQKDQGVSVDIPAMKGLAQLIISNFGFNCDFEPITEGEYFTKNVGLKLVVFNEQIGYVGLIKDELLAPYDLKGRPVYGLEINLDRLLNSLNRLERSYTPISKLQDVFKDITFSFPRDESHFETFVKAIKKLQTIFKWELISVFDTEKDGVPITKYTVRYYLKNFTNTPLTLEQIKAVETQLKQQCELAKIALDL

SEQ ID NO: 64077 - protein, 341 aa, Mycoplasma pneumoniae
MIDQSKLIERWKTTFETAQNPTELLAFKNSFRNADLKPLLSQIKETTDIETKRHLGQLYKQLESTLQTLHDTQLQVFTQAQSSSVLTHGDVMLLATSFAPGSSNIIYQVIDELVNYFKKFLFTVNYDSELTTIADCFDLLNIPKDHPSRNLTDTFYLDKNRLLRTHCTAATLRAVKETKKSNNPDIRIASFGAVFRKDDDDATHSHQFNQLDFMWIKKDFSLTNLKWFMQNMINHIFGENTSARFRLSHFPFTEPSFEIDIRCWLCQNGCGVCKKTRWIEVLGAGILHPQVMANMGFSDTDNIRGIAAGIGIERLVMLKHGISDIRDLYDNNFKFLAQFTD

SEQ ID NO: 64078 - protein, 101 aa, Mycoplasma pneumoniae
MHWIFKKEPNISVQQNPTKENVSDVSMIEINNLTALERDEKVETEDINTNVIANTYTVQANVPTAFQTSETNSNTVTNVPKSPELISIQRLERLKNRYTFL

SEQ ID NO: 64079 - protein, 648 aa, Mycoplasma pneumoniae
MKNLFACQHLALSAIQHAKGGHVGMALGASPILYTLWTKHIQFNPNCPKWINRDRLVMSAGHGSMALYPILHFAGLITKQEMLHHKYGQVNTSSHPEYAPNNFIDASTGPLGQGLGMAVGMALTQRVLAAEFKALSPKLFDHFTYVVVGDGDLQEGVSYEVAHLAGVYQLNKLIVLHDSNRVQMDSVVRDVSLENLQTRFTNMGWNYLETSDAVADIDAAIKQAKKSDKPTFIEVHTTIAKNTTLEDQPAGHWFIPTDKDFARFNSNTKTNFTPFEYPQTVYDFFHKQVIARQAKPVQAYKELLEKLKDKPLYTKFINWTENDYQALYLNQLDERKVAQANAATRNYLKDFLGQINNSNSNLYCLNADVARSCNIKLGDDNLHTNPHSRNIQVGIREFGMSTIMNGMALHGGVKVMGGTFLAFADYSKPAIRLGALMNLPTFYVYTHDSYQVGGDGPTHQPYDQLPMLRAIENVQVWRPCDEKETAAGVNYGLLSQDQTNVLILTRQALPSLEQSDSVQTLKGGYIISNRKQPDVIVAASGSEVQLALQLEQALNEQQLKTRVVSVPNINMLLSQPQSYLQQLFDPNSVLLTLEASASMEWYALAKYVKKHTHLGAFSFGESNDGQVVYEHKGFNVTNLLKLIKTLKS

SEQ ID NO: 64080 - protein, 465 aa, Mycoplasma pneumoniae
MRYFALTDLTKPTAKFTTDAMELRQISNAYLNQAQAYLQKGLKQLKKDYKNAILYTPKTEYKRFLKWKQTFLQDLNQTQKRFFIVRAQHFSYVLLFNLLDEQVEAVIATFNNFLDEHRLEAQSKQFDLDTAVNELHDYFDQLQKNTAYSEDLPTHLTQKTEQLINARNTQLTNLLNKIATTKPPLNKQQRLLASFRNYHEHLFLKNEVKKVTWLNEPRAKKESVTPDEEHIIELKNVYKYITNGVTTNAVLKGIDLKLKAHDFIVILGPSGSGKTTLLNIISGMDRPSSGSVVVNGQEMICMNDRQLTNFRRNYVGYIFQQYGLLPNLTVRENVEVGANLQRNPDKRINIDELLEAVGMKHLQKKLPNELSGGQQQRVSIARAFAKNPLLIFGDEPTGALDLEMTQIVLKQFLAIKQRYKTTMVIVTHNNLIAQLADLVIYVADGKIQALQANPNPKQVEDINWI

SEQ ID NO: 64081 - protein, 300 aa, Mycoplasma pneumoniae
MLNHNSKVWIVNYACAIDYYLDKHKQQRGVLTPGGKGINMAIVMALFGIKPTVLTFLGQPTKDLFLQLLKPYQLDLVSFPATTQTRINVKLLDGAQTTEINDVTPLIEEQAVHEMIAYLKANVKPNDLLVLNGRFLQRDLVKLLDVAFSLTKYVVLDVDEPQLLQLLNQRQPWLMKPNRDEFVAMVNANNSNVDQQELVQLIKQFQTTQNLLMSDGAQGAYFFDQQQLLFMEAIPPQQLVSTTGAGDTLLGVFLANLLLDKDPVGSLKVAVNYASATISKLAVVNSNDQIVLKATNYYYL

SEQ ID NO: 64082 - protein, 694 aa, Mycoplasma pneumoniae
MFKPLLSAELFFNWTAKDFKDKTSFLKQACRVLQDKNCIKEEQIALTALKEREAQITTGIMSKLALPHMQSATVLKPFVAVFKVNNVDWQSLDNQPVKLIFLIGVPKDQGNLHLEFISQFSKLMLQDEFANKVPNIRSFNGLINLIDSFQQTAVASQPVVNEAAAQTEEPKDTNTQYDFVAVTACPTGIAHTFMAKEALEKFARDHNLKVKVETQGTDGIQNQLTESDLNNTKGIILACDRLIDLTRFYGHANVVEVSTTKAIKTPQTVYDQVVKKEGKLLGNKSSDSASQTELKETTEQLSFKDFHKRIYRAILSGVSYMLPFVVFGGILIAIAFLIDINNAGNAGKQFGSKDPIANWFKTLGGLSFGLIVPILSAYIAFALVGRQGLLPGFIVGLISAGKFLLNIDIVTGKIDWATESKVSSGFFGAIFGGLLAAVLIIVQQRYIYRKLPQALQGIKNILFIPLLGTLVTAALFWVINIPLIYLNYGLSKFLQIMDKPYLAPLLGLVIGLMMCFDLGGPVNKAAYVFGVVSLESQNSGTVAMASAILSGMVPPLGIAIAATIRKQCFDKEELPAAYACYVMGLSFISEGAIPFVAKRPKIMLAANLIGGAVCGVLTGAFALTIRAPHGGVFVFALLKTNLEGIAGNTLQIGAGVGLALLALIVSSFISAGIIIGHNLLVVRKKTKQLVNTNA

SEQ ID NO: 64083 - protein, 299 aa, Mycoplasma pneumoniae
MKISVIISTYNCGALIVKALCSLVSNQTPACELEVLVIDDGSIDNTRQIIKKFQAKVSFTLKYFYKKNGNWGSVINYVKENRLANGDWITVLDSDDTLKPNTLNKLANLVEKADYDLVVFDYTKCWKKIKLKIHTYPTWWKNMTRELQKQTPFCIPLGKFLKRNLFYKLPKLKEKVSFQDALYTASSLKLAKKVRHVNQSGGNYHFKRAGNSMSIPWNIKRFSAELDICKDLIRLNAQEIALVHLLRQQFRVQLKEKQIQLAVTRDFNFSGFSWYTRCFLWMVYQTMLKRYFYLQTTKQ

SEQ ID NO: 64084 - protein, 147 aa, Mycoplasma pneumoniae
MRVLVNNPRAQYDYYLLTGYCAGLVLKGSEVKSLALGQGSLKEAYVFIDKHEVYIKDFSISPYAFSGEFNHPFKRVKKLLLNRNEIKQITARQKQEGLSIIPLKVFFKNGKIKMEIWLAKPKKKFDKREAIKSKTIQRELRQQYGSP

SEQ ID NO: 64085 - protein, 388 aa, Mycoplasma pneumoniae
MRLNKLRHAKSKKDFPLFHLKCSLKMAKLKWKSGWPNLRKNLINVKPSKVKRSSANCANNMDRHNHVVFSLSKTHDLVSRICQKLKMPMGLITHNEFADGETYIRFEESVRNKDVFIFQSTCAPVNDSLMELLIAIDALKRGSAKSITAILPYYGYARQDRKTMGREPITSKLVADLLTTAGVSRVALTDIHSDQTQGFFNIPVDTLRTYHVFLTRTVELLGKKDLVVVSPDYGGVKRARLIATSLELPLAIIDKRRPAHNVAESINVLGEVANKNCLIVDDMIDTGGTVIAAAKLLREHHAKKVCVMATHGLFNGEAPQRFQKAFNEGLVDYLFVSNSIPQTKFDQCPQFQVIDLAPLFEEVLLCYANNSSISAIYTRHIEWIKKHV

SEQ ID NO: 64086 - protein, 178 aa, Mycoplasma pneumoniae
MDKKTRLKLDGVIVCEGKTDQARLQQLFDVSVITTNGSALNQRTINLIKAVAKKQPVILFLDPDVAGQKIRRQLEQHLDKYESCFIARKDMKPNSTKIGVAEATDAALIQALQQRQVFTKTTQPTLSWEQYLELNLNSKSKRLALCNKLHLSYFNHKQLFRKLNLLQLTFDQVCQLLK

SEQ ID NO: 64087 - protein, 276 aa, Mycoplasma pneumoniae
MPALKVIATPIGNIEEVSPRVKAALTKCEVLFCEDTRVTKKLLGLLGIDFSNKQFIINNEFKEKQNLSKVANLIHQYHCGLVSDAGYPSVSDPGHILVEYVRTQLPQIAIEVINGPSALVCGLVTSGFPESPLLFLGFLDHKPTQVTQTLKHYQNFQGTIVLFEAVHRLQQTLEVIQTVFSNTEVFVGRELTKLHESHYWFNTSAPLPDITLKGEFVIVINNHHTQPVGQYSDQLLKQEITQLVQMGVKVKDACHYLAKRLQLKSNKLYTLFHESD

SEQ ID NO: 64088 - protein, 320 aa, Mycoplasma pneumoniae
MEQVELIPQWYVAPVSVKDEAVVRNLKAKVKALGFDNEILDVRVLKEREVIEEVFSLKSGKLPRSLKNTAFTKWFVLDEDRYLKVKISEKNLLGRYIYIKMIYSEDAWRIIRNFPGITGIVGSSGRGALPTPLDQADADNLEQMLKGISVNPKKRVLVTNTAIVEMDADKFDEKCQYILKHKQVKPEAIAQVNESGEIIDTNQFAQALMEANKAEQDEWNEDVAIVKSEANKVDPSVLIPYLGKYEIVEGDTKVDQLQQFSVGNLVEVHLTGAIHIQGQIKALYQGTINKAVVEVELTTKTQLINLPLENLSFIEVEQSH

SEQ ID NO: 64089 - protein, 554 aa, Mycoplasma pneumoniae
MNSNAYLEAQRWLSHPRVKPNLKEVITAMSAEEIEHFFSLKKPSFGTAGVRGKMAPGYHGMNVFSYAYLTQGYVNYIQSLNPTKKPLRFLVARDTRKHGALFNGIVCDVITSMGHVVYMFDNNEPTPTPLVSYVIKKYHFDGGVNVTASHNPKTDNGFKIYDGHGAQLLDFQTDQLIAMLPPVVTMLDFEPRGNNELLHFLDNEVVYKNYFDDLKESLVVDNDSFKNLPVVFTGLHGTSVKLLPRFLTYLGYSNIISVQPQNVFDANFANADHLNPESKDTWELARQYASNTKAKLMMAIDPDADRFAIAEWNPQTQDWHYFSGNESGVMVAYYKLKHKQFKRQPYIVTTVVSTDLVDKIAKKYGAFVKRTNVGFKFIGQAVNHFSKDNELVVAFEEAIGMMASDGLNREKDSFQAAAIMLEIARYCHNKGISLLEFYRGEIFGEFGDYYNWTVPHTIHGVNWKEKMEQVLHQLTTATIKEVVGHKITKIKNYVDINLVEYVLENGNWIKFRISGTEPKLKLYFNLSNGYLAALKHEAKKMHEFLVRLLNLDKA

SEQ ID NO: 64090 - protein, 421 aa, Mycoplasma pneumoniae
MNIVNLISKKQRGKALTETEINWFVHSVNNKSLADYQVSAFLMAVWFQGMNSKELFCLTKAMVKSGESLHFNHHSKLSVDKHSTGGIGDKVSIALIPILTALDYSVAKLSGRGLGYTGGTIDKLEAVGVKTDFTPTEAQNLLDQNDCFIIGQSEGIAPVDKVLYALRDTTATVDSLPLIASSVMSKKLAINNDYIFIDLKYGKGAFCKTKTMAKELAQYMYSIAKQFKRKLYIKLSDMNQVLGKTIGNALEVLEVVHFLKRNWTEVGADFIQLMEQIVTEILIETKRAPNKRAAVALYHATLEGEKPWQRFLKFIELQGSSWERFLDLKELFNPQYKAPVLASQSGTLSYTSPVDLAMVSISLGAGRMVKTDLIDPMAGIKLVKQANEVVKAGDTVLELYSSKPITPAHIEAAQHTIIIKQ

SEQ ID NO: 64091 - protein, 224 aa, Mycoplasma pneumoniae
MKLEYNRIIDSTLLKADTLPHEIDALCADAHKYQFYAVCVNPSYVRYAKNILKGTGVKLCTVVGFPLGQTTQRQKVYETKIAIKEGADEIDMVMNIAEFKKRCACVISEIRAVKKVCGKRTLKVIIETALLNQDEIRDAVNVCIDGNADFVKTSTGFSMRGASLEDITIMREASGNLIKIKASGGVQTAQQFLDFFNAGVSRIGTSNAVKIMEELHKLESHEHR

SEQ ID NO: 64092 - protein, 450 aa, Mycoplasma pneumoniae
MFKSMISSIVMRSMQKKINAQTISETDVQAVLKEIRIALLDADVNLLVVKNFIKAIREQTVGQTVEPGQDLQKWLLKVIKQELINILSQPNQEITSKRPLKVMVVGLQGSGKTTTCGKLAVWLKKQFQQKAMLVALDIYRPAAIDQLATLAEQTESVFFAKGTQAPDQTTKEAVKTFKESGCQAIICDTAGRLQTNQELMDELVAIKNELHPDEILMVVDGLSGQEIINVAKEFHNRLKLTGFIITKLDSDARAGAALSLTSLLEVPIKLMGTSEKLTGLEQFHPERIASRILGLGDVMTLVEKAEEVFDKQSLTKTVSKMFLGKMDLEDLLLYMEQMNQMGSVSSIVKMLPGNLTVSDDHVESIEAKVKLWKVLINSMTREERRHPKLINRDPSRKQRIIKGSGRKMDELNKLMKEWSKLQTKTAEMGRMLKGGKNPFSGFGGLGGLGF

SEQ ID NO: 64093 - protein, 383 aa, Mycoplasma pneumoniae
MAKTIKHPRWGRYVAEAVGRGHPDKICDQIADSILDECIKQSPTSHVACEVFASKNLIMVGGEILTTGYVDVVQTGWKVLNRLGYTENDFSFLSCINSQSSEINQAVQSNDEIGAGDQGITVGYACSETEQLMPLGSIVAQALVQRAARIIDQYPFIKHDMKSQVVLNYTGNKVQCESVLMSVQHTQDVSLDQLRQTIINQVILPVLTEYGLNDPKIKHLVNPGGSFVVGGPMADTGLTGRKIIVDTYGPYANHGGGSFSGKDPTKVDRTGAYFARFIAKHIVSLGWAEECEVSISWVFSQPLPQSIQVKCFNINKEFSEQLINQVISQYFNWSVAKIIAKLKLLDQVEYFRYAVYGHFGHQTAPWEQLSERDSLQCLIKNFQ

SEQ ID NO: 64094 - protein, 319 aa, Mycoplasma pneumoniae
MEQPLCILGIETTCDDTSIGVITESKVQAHIVLSSAKLHAQTGGVVPEVAARSHEQNLLKALQQSGVVLEQITHIAYAANPGLPGCLHVGATFARSLSFLLDKPLLPINHLYAHIFSALIDQDINQLKLPALGLVVSGGHTAIYLIKSLFDLELIAETSDDAIGEVYDKVGRAMGFPYPAGPQLDSLFQPELVKSHYFFRPSTKWTKFSYSGLKSQCFTKIKQLRERKGFNPQTHDWNEFASNFQATIIDHYINHVKDAIQQHQPQMLLLGGGVSANKYLREQVTQLQLPYLIAPLKYTSDNGAMIGFYANLLINGKNN

SEQ ID NO: 64095 - protein, 485 aa, Mycoplasma pneumoniae
MKKQLKYWFSLMGLTMSVGLTACSSNQFVFANFESYVSPLLLERAEAKQPMTFLTYPTNEKLINGFANNTYTVAVASSYAVSELQQQGHLLPIDWAKFNLKKTQNGSNQATIQNKEDAKELFTKEIGDISGELLNWGVPYFLQDLVFVYRGEKIQELEGQDVTWSTIIKAIVNHKDRFNNNRLALIDDARTIFSLANVVHHEVKNTTVDVNPTGSTLNYFGNVYESFANLGLKRDNLNTLFVNSDSNIIINELANGRRQGGIVYNGDAVYAALGGDLRDEINENNLPNGDNFHIVQPKHSPVALDFLIINQQQTHFRDAAHQLIYQLALEGADQTAEELLKTDEEKGTSDEDYYTYGAMQNFSYVNYVSPLKNISDETTGIVFKENKQADTKQVVKQQSQSEQQSESAEKEETEQDDFYTATLKSLLKADSLDDKAKKLVDTIKKTYKIKKADNINWANLIEKPITPLQRSNLTLSWLDFKQRFW

SEQ ID NO: 64096 - protein, 88 aa, Mycoplasma pneumoniae
MKKIQVVVKDPVGIHARPASIIAGEANKFKSELKLVSPSGVEGNIKSIINLMSLGIKQNDHITIKAEGTDEEEALNAIKAVLEKHQVI

SEQ ID NO: 64097 - protein, 508 aa, Mycoplasma pneumoniae
MDLKQQYILALDEGTSSCRTIVFDKDLNQVAIAQNEFNQFFPKSGWVEQDPLEIWSVQLATMQSAKNKAQIKSNNIAAVGITNQRETIVLWNKENGLPVYNAIVWQDQRTASLCDKLNQDTKIKEFVKKHTGLPINPYFSATKIAWILENVPLAQKMLKEDKLLAGTIDTWLIWKLTGGKMHVTDVSNASRTLLFDITTMTWSQELGDIFKVPLSILPKVMPSNAHFGDIVPSHWSTSATGMVPIRGVAGDQQAALFGQLCVEPAMVKNTYGTGCFMLMNIGNELKYSQHNLLTTVAWQLENQKPVYALEGSVFVAGAALKWLRDSLKVMYSAAESDFYAKLAQKEEQEVVFVPAFTGLGAPYWDASARGAIFGIEANTKREHLVKATLEAIAFQANDLIKAMASDLNSSIKKIKADGGACNSNYLMQFQADIANLEVIIPKNVETTTMGAAFLAGLAVNYWKDTKQLEKLTGIAKQFKSQMNQTVREKKSKRWNEAVKRTLKWASLD

SEQ ID NO: 64098 - protein, 451 aa, Mycoplasma pneumoniae
MVQTPSEINTHLKHLLACDAYKLSHRLMYPNDTTNLYSCLTARGGRGGFPNFVWNHEFAKKIILEVFGNFCDSVLAVQNDPGLAQALTDKVTTVFGDPQFGLEFTQHICYLANFLKQHHQLPLTVKIHQSSEGLAFRTPLVTITGSDQMVPELVWLVNYFETVLLENIWLYQTTLTVAQSLKLLLERYANETADNTEFTHFQCHDFSMRGMSSLQSALYVANAHLQYFSGSDTILGGVAAKSILASEHSVMCADGQEGELNTFKRLLEQFPNKNLSLVIDSYDMWHVLDNILPQLKDLVLQRQEKLYLRPDSGNFETLICQGKRFNPEDKTTWGVIDYLDYHFGSTVNQKGYKVLNQKLGIVYGDGITYERIEYILEQLKQRGFCSSNIVFGVGSTTYQNLNRDTLGFVYKLTAIKKGNTWHDVTKSPITDPTKQSIGGRFDNPNLIQVYG

SEQ ID NO: 64099 - protein, 557 aa, Mycoplasma pneumoniae
MNLDNAKCFKQRVFIGNLTSEHLNKTVTIAGWVKRIKKLGELNFVIVGDKTNTIQVTCKNKEQVKYLTREDLVIVKGKLKRLDSVRFEITNPTITLFAKSKTPPLIIEDKTDALEEVRLRYRYLDLRRPVMQKRLALRHKVTLAVRNWLDQMGFIEVETPTLTKSTPEGARDFLVPARIREHSFYALPQSPQIYKQLLMVGGTEKYFQIAHVYRDEDSRKDRQPEHTQIDLEVAFYTKEMVMDLIQRLFVDVFRQVLNIKLKKPFPVLKFAEAFNRFGSDKPDLRYGFELEDCTDLFQDSPNQFTNLINAGGIVGGIQLPNLYLDEVSFKALRKLAKDNGVSLEFYSDKASSLKQPLDLPLAGTILLVAHKSKTQAWTALGAIRNELKYHLNLVKPNQYSFCWIVDFPLYEFDEKEQKWVSAHNMFSNPQPQWLVNFENHKAEALSEQYDLVLNGFELGSGSIRIHDPEVQTRLMQSLGVDPQQFGFVMEAYQYGAPVHAGMGLGLDRLMMIINNVDNIREVMAFPKNAQGIEMHTNAPDQVDIKDITTIWSKHPVK

SEQ ID NO: 64100 - protein, 414 aa, Mycoplasma pneumoniae
MSVLQKPRGVKDWYGEELIYFNWTVHQITNLAWKWGFSEVKTPLLEYAEAFKRTNANADIVKKELYEFHDKSNRLLALRPEATAGIVRLVCENKLLQPQNYPLRLFTIGTMYRYERPQSNRYREHYQFSCEVIGDTNPTVLLDTLLLGHAIIQQLGIEGVILKLNNLGNSATIQQWNQALQAYLTQFKAQLTELSQSRLSTNPLRILDDKVDGQLPFISDAPQIEQFLDAEQQALNTWLQQQLTQQQVPFEWNPTLVRGLDYYTGVVFEFVKDDTTVLAGGVYDNLVEELGGTPTKALGFACGIERSINCLSAVKKQAILANQPPRLLVIGLTEAALEKLLQLSLGWRAYHPVTIYPKVIRIINGIRAAQRLGYRFLGVIGGNNLEQQTITVKDLATEQQTTYTWDEFRQRQVL

SEQ ID NO: 64101 - protein, 191 aa, Mycoplasma pneumoniae
MSFSQVFHQSPRGWIEVICGPMFSGKTEELLRKIKRWKLAKIPVIIFKPKIDTRQQHLVKSRNGHSDEAIEINSPLEIYDYLTKDRFDVVAIDEAQFFSSEIVEVVKSLNDLGINVIVSGLDTDFRAEPFGSIPQLLAIADKICKLDAVCNVCGQLAQRTQRIVSKSNETVLIGDIEAYEPRCKLHQPSAG

SEQ ID NO: 64102 - protein, 264 aa, Mycoplasma pneumoniae
MFNLSDFSELPRWIGAEFLGTFFLILSGNGAGSQLTLNKMFAKESKAKLLTAAFAWGIAVLVGVLIANSLFEGAGNINPAVSLFYAVSGTIQKALYPLHVNFSIPLLWVALLLAWVAQFAGAMLAQALLNFLFWKHIEQTDPQSVLVTHCTNPAIFNIPRNFATEFVATSVLIASLLVAGSFGANRFDQSPRGVVPMLVVTGLIMSFGAATGTAINPARDLGPRIVYWLSPIKNKDPNLKYSWIPVAAPLSASVILGVLVAVIV

SEQ ID NO: 64103 - protein, 1443 aa, Mycoplasma pneumoniae
MVFDTETEKGKRIWALSQFLVKKNILDHNELHQLNNRIELVYLENDRENALFLVALTLKKPLTIDIWNALYEGFQDAEGAELRITFQEDATFFKDGSTKSSVTLAIIKDYFKSFFGKDKKYRILLEQELTHPNFLSYSNHELKANCQSQELDQWLIEQRQAFIKWMHQAGFTHFGFVSLFNPPAEKQLKVKSMKVSKYDKQFETEVFSTEFVPIHKINQQMDEIKLMGQIFELKDFPGYNNLRNTLNIYVTDFQLGGSLILKWFYKDPKTIEGIKIGTWVKATVKVERDAKTQLLQGIIKEISPIETPAYYRRPDQDKQKRVELVFHTKMSAFDGINSVQEYAQFAKERDWKTIAVTDKDNIHIYPTLYEVAKKYGLKAIYGLECNLIDDHIKIVSNPDKTKLKDATFVIFDIETTGLHGRYDSVIEFAGIKVKHNREVERMQFFLKIDGPLPAAVTEITKITQAQLEDGMEQQAGLEKLRAWLDGCVMVAHNGLSFDLPFLQTQFEKYNIAPLTNPLIDTLALSWALNPGFASHTLSNICAKLKFDFDDERLHRADYDTQALKKVFDYFKEQVELMGITNLEQLDQELNQQCHFELLKRTFTNTGIIYIKSQSGFAKLYELLSIALTDNNATRPLVLTSTLQKFAKSFVITDNPVQGDIFKAALTKPLKELEAAIKRVDFVLIAPPGAYAGYTIREGLKKEAIPNAIKLVVDTAQRLNKLVAVASDAYFIHPWENEYYKAIVCAKGLGGRWHRHFNYKEREQRVPNVFVRTTGEMLNEMSFLGEQLAYELVVENTNKLAKQLTADDLVPVQTKLQPPVIEGSNENLAAKTWSQAKAIYGDPLPKLIEQRIQEELKAIIDNGFGIIYWISHLLVKQSVQDGYFVGPRGSIGSSLVANLIGISEINPLVPHYLCESCQYFEVNEEVDDGYDLMVRDCPKCGAKAAFKGDGHNIPFATFMGFAGDKIPDIDLNFSSEYQAKAHAYVRELFGEQYTFRAGTIATVAEKTAYGYARNYFEIIKQTELATAPEIERFKQKLVGIKRTTGQHPGGIMIFPNHKSVYEFTPCGYPADDTSSDWKTTHFEYDALGNTILKLDILGQDDPTMLKHLGDLTHVNPQNIPRFDKKLTEMFWSVNPLKLKPHYLDEPTGAIGIPEFGTKFVRKILEQTKPKGFGDLIRVSGLSHGKNVWADNAQKILKDQNLSLKDVIACRDDIMLYLIHKGMQAKDAFEIMEKVRKGIALNAKEVQLMQSNGVEQHWINSCLKISYLFPKAHAAAYVLMAWRIAWFKLYHPLSYYACLLSFKLKEHDVSGFKSGVSFVKQKLEELNTLYRIKRIKPKEAELLTSYEVYLEMMARGIKLEQISLTHSHATRFVEHNGMLIAPFITIPGMGEAVANSIIEARNEKPFSSLDDFKKRTKITKKHIEAFTQMQLLDEFREQDNQKKLF

SEQ ID NO: 64104 - protein, 178 aa, Mycoplasma pneumoniae
MALSQITSLLFFEVTKESPLEEIVVKTPFTKTKGYKLKNEIVLVPIMRAGLGMVDPIVRYSEKIRVGHLGIYREHEGTNVISYYKKMPENIGNSHVIILDPMLATGTTLATAISSIKKNHPIKISVVAIVAAPEGIKAVEAAHPDVDIYLAAIDEKLNKDNYIIPGLGDAGDRLFGTK

SEQ ID NO: 64105 - protein, 362 aa, Mycoplasma pneumoniae
MLSAGIVGLPNVGKSTLFSAITNLQVEIANYPFATIEPNAGIVNVIDERLDKLASLIKPDKVTHTTFRFVDIAGLVKGASKGEGLGNQFLANIREVDLICHVVRCYEDKKIVHVNNQVDPVFDFEIIVNELIQADIEVVNTRIGKIKRKAESGDKQSKEEYQLLAPVLQGLQQNQMVLHLVNEVDLKKLKSLNLLTAKPILVVANVSEADLSNLDHNPHLTQLNQFLKQHNLPHAIPVCALLENELSSLDANGRQDWLKELGLSDYQGLNQLIKTAYDAIGLWSFFTFGKQEVRAWAFKKGWLAPQCAGEIHTDFERGFIKVEVISWNQLYELKSLQEAKKQGLVRLRGQGLRDARWWCVSL

SEQ ID NO: 64106 - protein, 288 aa, Mycoplasma pneumoniae
MLVNIKQMLQHAKQHHYAVPHININNYEWAKAVLTAAQQAKSPIIVSTSEGALKYISGHQVVVPMVKGLVDALKITVPVALHLDHGSYEGCKAALQAGFSSIMFDGSHLPFQENFTKSKELIELAKQTNASVELEVGTLGGEEDGIVGQGELANIEECKQIATLKPDALAAGIGNIHGLYPDNWKGLNYELIEAIAKATNLPLVLHGGSGIPEADVKKAIGLGISKLNINTECQLAFAKAIREYVEAKKDLDTHNKGYDPRKLLKSPTQAIVDCCLEKMQLCGSTNKA

SEQ ID NO: 64107 - protein, 512 aa, Mycoplasma pneumoniae
MKRCYITTPIYYASGKPHIGHAFTTILADVIKRYKQQNGYEAYFLTGTDEHGNKIESKAKSLGLDPQTFVDQNVAYFQQMWKQLDINFDHFIRTTDLSHKAQVQHAFQLLYDKGLIYQSNWEGAYCVECEQNYFTYDKQTMLCEIGHQLTLVQEPSLFIAFKDSKDWIGEMIATNKLNITPESRAAELKNNFLDGGLNDLALTRQNVTWGIPVPFDNKQTIYVWFDALFNYITNLGFAHNDPKFNKWWNNNDEEHEVIHLISREITRFHCIYWPIFLHQLGFKLPTQFLSHGWIVDGNGHKMSKSLGNVISPEELLAQFGVDGTRYCLLKEMRLDKDNRCSMAIFKDIYNADLANSFGNHASRTFGMIKKYLGGQLDFIEVQDPQVKQLMDQANQAMVQFDTAWNNFQFYKGINGLLQLVFQASKLIDQLKPWELVKQTDYTLLKQLLFACVRCTQVCFVLLAPILVHTSTQIFDLFNFSAQARSKTHLADPQQLQKISLAPVIQPLFKRLD

SEQ ID NO: 64108 - protein, 634 aa, Mycoplasma pneumoniae
MLSSCRAVTSMSRWSKHKKTKEVISMLSHNQKPNSWKILWRLIKSVQGRTSSKVLYVMVCAIFGILTGVTNSILLAQGLGFIFPTTNTETDGIQSVYLLVFAHNLPVMERLTIVCVTVVVAYILIFSFNVAQNYLGLKLYQEICALLRWKAYLKIQSMSTSFFDTQNNGDLMSRLTNDVYNINNLYAQVGGQTIQSLFILMTTATILFVLSPVIALISLTVLIALIALSFLFLKKARAAYAKVQNNLGDMSGYIEEVLSNHKVVHVLKLQEVMIDNFDKYNRPMVNPTIKANTYAVFIYSWFGFISNITYLASISIATAFSVNNIPSFGVSAINYSFMLSYIAALRQTALPLNQIFSLWNLIQLGIVSGERVFKILDLESPQKQATITKLPNIKGNIRFEKVVFGYSADKPILTGIDFSVKHGDIVAIVGPTGAGKSTIINLLMKFYKPFAGKIYMDNFEISEVSETAWREKISIVLQDPFLFSGTIKENIRMGRQDATDEEIIEACKVANAHDFIMRLPQGYNTFISNKTDYLSVGERQLLTIARAVIRNAPVLLLDEATSSIDVHSEKLIQQSIGRLMKDKTSFIISHRLSIIRNATLIIVINDGKVLEMGNHEQLMRQNGFYARLKRSAVK

SEQ ID NO: 64109 - protein, 288 aa, Mycoplasma pneumoniae
MKHISAVYNPAFTNIASKLNQTELLKDAAQSLNIQLDFFTCFDINTNQDKTKLPFKSNTILFLDKNIALAQWLESVGLRVINSSIAINNADNKALSHAVLAQHPTIKQIPTLIGPQNFRLAWYPEKLEQFIEQIKRCFQFPVIVKSIYGSFGDYVFLCKDEQKLRQTLSGLTEQIIVQQYIATSNSEAVRVIVVNNQVVGALHTQNEGDFRSNLNKGAVGEPYQLSQEETKLAITISQAMQLFYCGIDFLFDQDRSLIFCEVNSNVQLTKSSMYLKTNLAIQLLASIA

SEQ ID NO: 64110 - protein, 261 aa, Mycoplasma pneumoniae
MEYFDAHCHLNCEPLLEQHEKSLANFRLIGLKANVVGTNLTNSQIAVNLAKQHPDLLKAGVGIHPNDVQLFDLKAAQATLKKLVSTHRSFISCIGEYGFDYHYTKDYITQQEQFFLMQFQLAEQYQLVHMLHVRDVHERIYEVLKRLKPKQPVVFHCFSEDTNTALKLLTLREVGLKVYFSIPGIVTFKNAKNLQAALSVIPTELLLSETDSPYLAPVPFRGKTNWPECVVHTVQTIADIKQVPLAEIKQAIVHNAKKLFW

SEQ ID NO: 64111 - protein, 442 aa, Mycoplasma pneumoniae
MDTKQTMFALATAPFNSAIHIIRLSGPDVYRIINQITNKEVKPLGMRIQRVWLIDHNQKKVDDVLLFKFVAPNSYTGEDLIEISCHGSMVIVNEIIGLLLKHGAVQAQPGEFTQRGYLNGKMSLNQAASVNNLVLSPNTTLKDVALNALAGQVDARLEPLVEKLGQLVMQMEVNLDYPEYTDEQRELVTMNQAVVQITQILNQIVVGQDQLQRLKDPFKIAIIGNTNVGKSSLLNALLDQDKAIVSAIKGSTRDIVEGDFALNGHFVKILDTAGIRQHQSALEKAGIQKTFGAIKTANLVIYLLDARQPEPDPKIIARLKKLKKDFFLVHNKADLVQQSFQVSISAKQKQIQPLVDLLTQYLHQFYSVEQNQLYLISDWQTILLQKAIAELEHFLIKQQNCLFFDILVVHLRAAHEYILQVLGKNTNYDLINEIFKHFCLGK

SEQ ID NO: 64112 - protein, 210 aa, Mycoplasma pneumoniae [sequence omitted]

SEQ ID NO: 64113 - protein, 420 aa, Mycoplasma pneumoniae
MLDRNKLRNNLDFFKKKLVERGVSESQFEAYVQADKAMRKLLHQIELANQKQTLLAQQVAKKKGDPKLLKESKELKQKLEQLNIAFKEAETLSQELLLNLPNIADESVPVGRDETANLELLKEGRKPVFDFTPLPHWELCERLQLVAFDKATKLTGARFVAYTDKAAKLLRAIASLMIDLNKNKYQEWNVPVIVNETSLTGTGQLPKFKDDVFKLENTRYYLSPTLEVQLANLHANEIFTEGELPKYYTATGVNFRQEAGSAGKQTKGTIRLHQFQKVELVKFCKPSEAIHELEEMTRDAEQILLELKIPFRRLLLCSGDMGFSAQKTYDLEVWMAGCNEYREVSSCSSCGDFQARRAMIRYKDLTTGKNTYVATLNGTALAIDRIFAAILEHYQTKAGEVMIPQALLKYLDFDKITKPK

SEQ ID NO: 64114 - protein, 839 aa, Mycoplasma pneumoniae
MAKQQDQIDKIRQELAQSAIKNISLSSELERSFMEYAMSVIVARALPDARDGLKPVHRRVLYGAYTGGMHHDRPFKKSARIVGDVMSKFHPHGDMAIYDTMSRMAQDFSLRYLLIDGHGNFGSIDGDRPAAQRYTEARLSKLAGELLRDIDKDTVDFVANYDGEEQEPTVLPAAFPNLLANGSSGIAVGMSTSIPSHNLSELIQGLILLIDNPDCTINDLLGVIKGPDFPTGANIIYTKGIESYFETGKGNVVIRSKVSIEQLPTRAALVVTEIPYMVNKTSLIEKIVELVKAEEITGIADIRDESSREGIRLVIEVKRDTVPEVLLNQLFKSTRLQVRFPVNMLALVKGAPKLLNMKQALTVYLEHQLDVLIRKTQFNLKKYQERFHILSGLLIAALNIDEVIAIIKKSANNQVAMEALHERFGLDEIQARAVLDMRLRSLSVLEVNKLQTEQQELKALIEFCQQVLADKQLQLKLIKEQLTKINEQFGDPRRSEILYGISEDIDDEDLITQENVVITMSTNGYLKRIGVDAYNLQHRGGVGVKGLTTYTDDSISQLLVCSTHSDLLFFTDKGKVYRIRAHQIPPGFRTNKGIPAVNLIKIDKDEKICALISVNDYQNGYFFFCTKNGTIKRTSLSEFANILSIGKRAILFKENDVLFSVIRTSGQDDIFIGSTAGFVVRFHEDTVRPLSRAAMGVLGINLNQCEFVNGLSTSSNGSLLLSVGQNGIGKLTSIDKYRLTKRNAKGVKTLRVTAKTGPVVTTTTVFGNEDLLMISSAGKIVRISLEQLSEQRKNTSGVKLIKLKEKERLETVTIFKKEEAIKTTTATETDDVGSKQITQ

SEQ ID NO: 64115 - protein, 650 aa, Mycoplasma pneumoniae
MEDNNKTQAYDSSSIKILEGLEAVRKRPGMYIGSTGEEGLHHMIWEIIDNSIDEAMGGFASTVKLTLKDNFVTIVEDDGRGIPVDIHPKTNRSTVETVFTVLHAGGKFDNDSYKVSGGLHGVGASVVNALSSSFKVWVAREHQQYFLAFHNGGEVIGDLVNEGKCDKEHGTKVEFVPDFTVMEKSDYKQTVIASRLQQLAFLNKGIQIDFVDERRQNPQSFSWKYDGGLVQYIHHLNNEKEPLFEDIIFGEKTDTVKSVSRDESYTIKVEVAFQYNKTYNQSIFSFCNNINTTEGGTHVEGFRNALVKIINRFAVENKFLKETDEKITRDDICEGLTAIISIKHPNPQYEGQTKKKLGNTEVRPLVNSIVSEIFERFMLENPQEANAIIRKTLLAQEARRRSQEARELTRRKSPFDSGSLPGKLADCTTRDPSISELYIVEGDSAGGTAKTGRDRYFQAILPLRGKILNVEKSHFEQIFNNVEISALVMAVGCGIKPDFELEKLRYNKIIIMTDADVDGAHIRTLLLTFFFRFMYPLVEQGNIYIAQPPLYKVSYSNKDLYMQTDVQLEEWKQQHPNLKYNLQRYKGLGEMDAIQLWETTMDPKVRTLLKVTVEDASIADKAFSLLMGDEVPPRREFIEQNARNVKNIDI

SEQ ID NO: 64116 - protein, 380 aa, Mycoplasma pneumoniae
MKVLINKNELNKILKKLNNVIVSNNKMKPYHSYLLIEATEKEINFYANNEYFSAKCTLAENIDVLEEGEVIVKGKIFSELINGIKEDIITIQEKDQTLLVKTKKTNINLNTIDKKEFPRIRFNQNVDLKEFDELKIQHSLLTKGLKKIAHAVSTFRESTRKFNGVNFNGSNGKQIFLEASDSYKLSVYEIKQKTDPFNFIVETNLLSFINSFNPEGGDLISIFFRKEHKDDLSTELLIKLDNFLINYTSINESFPRVMQLFDFEPETKVTIQKNELKDALQRILTLAQNERFFLCDMQVTNSHLKINSNVQNIGASLEEVTCLKFEGHKLNIAVNALSLLEHIDSFDTDEIELYFQGSNKYFLISSNNEPELKEILVPSK

SEQ ID NO: 64117 - protein, 270 aa, Mycoplasma pneumoniae
MIISFVNNKGGVLKTTMATNVAGSLVKLCPEQRKVILDLDGQGNVSASFGQNPERLNNTLIDILLKVPKFNGANSSIEIDDCLLPVYEGLDILPCNFELNFADIDIARKKYKASDIAEIVKQLTRRYDFVLLDTPPNMATLVSTAMSLSDVIVIPFEPDQYSMLGLMRIVETIDTFKEKNPNLKTILVPTKVNMRTRLHNDVIELVKSKAHKNNVAFSEHFVSLTSKSSAAVGYEKLPISLVSPTSNKKYQTEYLEITKEILNLVNHGHQ

SEQ ID NO: 64118 - protein, 439 aa, Mycoplasma pneumoniae
MEQFSAFKLLLKKQYETTLGFYDKYIKNLKRFALKNNVLFVIVDNEFARETLNSNPDIVGLASKLYDDIRAVRFVNEQDFFINLAKLEEDNRETLYQSSGLSKNFTFKNFVVGDGNRRVYEAGVRISETQDADFSPLFIYGETGLGKTHLLQAIGNDKFFHFPNAKVKYVVSSDFAQEVVNAFYQKEKDQGIEKLKAAYESLDLLLIDDTQIFGKKEKTLEILFSIFNNLVSKGKQIVFVSDKTPDELANIDPRMVSRFKSGLLLKIEKHNLSSLCEILAVKLKEKDPNIQITNEAREKAAQISGNDVRSLNGIATKLLFYVKTTKQNLINNDNLKEILFEEFEKFHKKSFDPYLLIENVCRRFNVPVDSVLSENRKAELVRVRDVCNYILREKYKMQFQQIGKIFKRNHSTVVAAVKRVAKMIEKDDSLQDIITSLVI

SEQ ID NO: 64119 - protein, 48 aa, Mycoplasma pneumoniae
MKRTYQPSKLKRAKTHGFLARMATASGRKVLKLRRKKQRAQLTVSSER

SEQ ID NO: 64120 - protein, 385 aa, Mycoplasma pneumoniae
MPLNLNKKHKELKTTFNPFWSAAVVNEKNGLKNLKKAWGIIFKVLKVAIFIFLTIVGLWGCTQTLAQPWTGTNQLLGSGLEIGYNFGTTGDYRYDLQSNNVGPYFTFSDYTLAYGPFYGWFVWPASQIVLPIMYATRVPLGSGPELGFNMILSLIVLLFLVRLITIVITLNSTLALEKMNEVQGKLAEINAKYKGALDLQSKRNRQMEIMSLYKKHNIKSSASFVQVFVTLPIFLIIYRIVTTLRPIKAIILFNFWDLSKVPLTEIFSNFTSTGWTFIIFLIIVLPVQFISQKLPQIWASKRNENAKAHSQKSIEQLNKTKRMQLIFYFVFAVITAFSAAGVGVYWFLNALFTLLQSYLTHLFIVKRRTRRRLTYSKLEQMLERE

SEQ ID NO: 64121 - protein, 263 aa, Mycoplasma pneumoniae
MNSFYPSRKLGQNFTVDQSVIAKTCRLIKSLNPTALIEVGPGKGALTKALLKLQLPYHGIELDKRLAEYLLVNEILTEEQLTIGDALKQNLDQYFPDTIPLLCGNIPYSISSPLIANFLASKLQQFVLVCQWEFGQRLVAPVNSPNYSAFGVFCQYHLQIKSVFKIDKVAFKPKPQVDSVLMLLKKKPQVAYEAHFGRFLKQCFHQRRKLLVNNLKQLLPPTLLTNVLQQQDLAATVRAQELTPTQLFRLYLSLKPHLSDGKD

SEQ ID NO: 64122 - protein, 484 aa, Mycoplasma pneumoniae
MEKIRTRYAPSPTGYLHVGGARTAIFNFLLAKHFNGEFIIRIEDTDTERNVEGGIESQLENLRWLGIIPDESIYNPGNYGPYIQSQKLATYKKLAYELVGKGLAYRCFCTKEKLEHERQLALEHHQTPKYLGTCRNLHSKHIQTNLDNQVPFTIRLKINQDAEFAWNDQVRGKITIPGNSLTDIVLLKANGIATYNFAVVIDDHDMEITDVLRGAEHISNTAYQLAINQALGYQRIPRFGHLSVIVDKSGKKLSKRDTKTIQFIEQFKQEGYLPEAVVNFLALLGWNSDFNREFFTINQLIESFTVNRVVGAPAFFDIKKLQWINAHYIKELSDNAYFNFIDNYLTIDFDYLKNKRKEVSLLFKNQLAFGIEINQLIKETFAPKLGVQHLSVKHRELFKELQSALQQLSEQLQALPDWTKDNVKSTLTQIGEQFNLKGKKLFMPLRLIFTNKEHGPDLAGIMVLHGKTQVLALLQEFIHATNLF

SEQ ID NO: 64123 - protein, 169 aa, Mycoplasma pneumoniae
MQFRVGLGKKKYRIKPRAEQKNKFWIGGVEIEDSKYIYDHDASDDASDVIQLAVADALFGATALGDGQIVFNKEKTQIPLKGNPRKEAPRILARTYNFIRKNWYINNIDITLEIPSQQKMDDYKHAIFDFICTALRITELTINLKVREPLNPNEISCLAVVLVERQRLK

SEQ ID NO: 64124 - protein, 709 aa, Mycoplasma pneumoniae
MKKNKGLNEATTSEKPQFPKRTAWKIFWWVVILAIIIGILVYILMPRATTAVIEKWELSGTTLSAQIKGLSGKHTFQRINNSTYVTDDILQVSISFQGINPIVVTAHKATNGSGETIFNIANLSINQSTGKAIVNGMMTQDQKSNNGTELASIKGLHDIGTFVAPDTRARDVLNIFFGLLPIIIFVIFFLLFWRSARGISGGGRSEEDNIFSIGKTQAKLAKSSVRFDNIAGLQEEKHELLEIVDYLKNPLKYAQMGARSPRGVILYGPPGTGKTLLAKAVAGEAGVPFFQSTGSGFEDMLVGVGAKRVRDLFNKAKKAAPCIIFIDEIDSVGSKRGRVELSSYSVVEQTLNQLLAEMDGFTSRTGVVVMAATNRLDVLDDALLRPGRFDRHIQINLPDIKEREGILQVHAKNKNLSSKISLLDVAKRTPGFSGAQLENVINEATLLAVRDNRTTINMNDIDEAIDRVIAGPAKKSRVVSDADRKLVAYHEAGHALVGLHVHSNDEVQKITIIPRGQAGGYTLSTPKSGDLNLKRKSDLLAMIATAMGGRAAEEEIYGPLEITTGASSDFYKATNIARAMVTQLGMSKLGQVQYVPSQGTVPPGTKLFSEQTAKDIDFEINAIIEEQYKKARTIIKTNRKELELLVEALLIAETILKSDIDYIHEHTKLPPEILAQKQEQQAKQKAEAKEAKLNKKTEKDTEKDSETNS

SEQ ID NO: 64125 - protein, 399 aa, Mycoplasma pneumoniae
MTKDLLALLKERGLFVQANFEKELKQLLNQGSFAFYVGFDPTAPSLHIGNYVLLHVAQIFQAMGHIPHVLLGSGTALIGDPTGRMELRQMMSRETIAENTRNIKKQIRRFLGSNVVFCQNETWLKKLNYIEVIRELGPCFSVNKMLATDAFSARWERGLTLMELNYMVLQAYDFYYLNQKYGVQLQIGGSDQWANILAGADLIRRKTQKQVYGMTTNLLVKANGEKMGKSASGALWLDPQKTSPYDFYQYWINLDDASLQKVFLMLTKLDTKAIETLCNLKGAAIKEAKAKLAFELTDAIHGTKAALVAQAKSARIFAFQPDTETKTVRAGTRLVDVIVDLGLVVSRSEARRVIQQGGLTINQEKVTDVEMVLQASSQPLVIGKGKKRFVTVQVIANTK

SEQ ID NO: 64126 - protein, 291 aa, Mycoplasma pneumoniae
MPKIRKAVIPAAGLGTRLLPATKAIPKEMLPLVNKPTIQYIVEEAVASGIKEILVIVSSKKEAIIDHFDYDFILENALLQKHKDQEHQEIKDIANLAHIYFVRQKHQHGLGDAILHAKSFVGNEDFAVLLGDDVVFGEQPALAQCIQAYEQTDCQVIGVQEVPHDQVNKYGIVTPEANWQKQALVKILGMVEKPAVNEAKSNLAILSRYILKPSIFTALKQVPFGVGGELQLTDGLNYCLQQGEPFFAKHFGGTRFDVGTKNGFIKANLYTALKTDAITKDEVLAILKEFA

SEQ ID NO: 64127 - protein, 394 aa, Mycoplasma pneumoniae
MAREKFDRSKPHVNVGTIGHIDHGKTTLTAAICTVLAKEGKSAATRYDQIDKAPEEKARGITINSAHVEYSSDKRHYAHVDCPGHADYIKNMITGAAQMDGAILVVSATDSVMPQTREHILLARQVGVPRMVVFLNKCDIATDEEVQELVAEEVRDLLTSYGFDGKNTPIIYGSALKALEGDPKWEAKIHDLMNAVDEWIPTPEREVDKPFLLAIEDTMTITGRGTVVTGRVERGELKVGQEIEIVGLRPIRKAVVTGIEMFKKELDSAMAGDNAGVLLRGVDRKEVERGQVLAKPGSIKPHKKFKAEIYALKKEEGGRHTGFLNGYRPQFYFRTTDVTGSISLPENTEMVLPGDNTSITVELIAPIACEKGSKFSIREGGRTVGAGSVTEVLE

SEQ ID NO: 64128 - protein, 234 aa, Mycoplasma pneumoniae
MRYGFFDISQDFITIFCPKKTLKNCMFGLIGSRTQATLRQEKNQNFSFFVNEANEIAGFNFFDIKKSFRRGLISHHFTAGLNYPSLKLVKKISELLNYDLTPLAKKVPFVVCEVISAIPIPNTHLKRCKVNTGSNKSLDVVCGADNVRVGLKTVLVHVGGVLPDGTIIKKAKIAGYDSMGMLCSEKELNLKPKNQGIIEIKSHIKIGKSFLDVYLNNSEKFSAWVSTKKRVTGN

SEQ ID NO: 64129 - protein, 88 aa, Mycoplasma pneumoniae
MRMGRVHYPTYRIVAVDSRVKRDGKYIALIGHLNPALKENKCKIDEAVALEWLNKGAKPTDTVRSLFSQTGLWKKFVESKKKPVAKSK

SEQ ID NO: 64130 - protein, 210 aa, Mycoplasma pneumoniae
MAQAQKAKLVEFEVINWRQYCKDKHQTVDDMAYGGGGGMVLKAEPILKALKACRTPQSKVVLLSPEGQQFSQPMAQALTQTEHLILICGHYEGFDYRLYKHVDQIISLGDFVLSGGELVALSVIDATVRLIKGVINDQSLIHESFNNYLLDFPAYTRPYDLDGDKVPEILLSGDHKKIEAYRKEQQLLRTAQYRPDLYKQYLAKKDEKNK

SEQ ID NO: 64131 - protein, 119 aa, Mycoplasma pneumoniae
MKKINKQALIDLVEQKQLKAYVPEFSAGDEVNVAIKLKEKEKVRIQNFTGTVLRRRGKGISETFIVRKTTDGIPIEKNFQIHNPNISIELKRRGKVRRAYISYMRERSGKAAKIKERKQ

SEQ ID NO: 64132 - protein, 271 aa, Mycoplasma pneumoniae
MDTFTSAVKINWFPGHMKKTHDQLKKLASSLDGVIEVVDARAPTLTQNPEITAYFTNKPKLTLALKADLAQTVANSNILWGTLKQGLQLKRLVIKKLQTLFQAKKNQLKAKGLLVHQFRLAVIGMPNVGKSSLINLLLNKNHLQVANRAGVTKSMSWNQISSEFYLSDTPGVFFKRIDEMAVGYKLVLTNVIKREVVPLEDVGAFAFCYLSKHYPQLLPYEGTDFTEFLHKFAISRKLLQKSNQLNINLACELFVSELINGKYGKLSFELD

SEQ ID NO: 64133 - protein, 143 aa, Mycoplasma pneumoniae
MKLLKNNIYINVYLKNKQEIFEFVFKKFKEDGAVLDSFLPAIVERDKAASVAIGNYLFLPHPVYDEIANIQKEKMVFIGLKDVINIDGQPIKFICGLALKGEHQMDALQSLAIAFSDPEEVEKLVKDKDLTQDKVLEFLAKHN

SEQ ID NO: 64134 - protein, 364 aa, Mycoplasma pneumoniae
MKRINVLHFGAGNIGRGVILPIYQQNDFSIDLVELNQNTVNELQKQKQYQVHYLDCDQSQLVNDFNTWNLKDEAKIIELMERADVISTSIGAKNLASLKTLFDKAKFHKRAIVLCFENGFRISSNFKNILQLNNTQVNFVDVVIDTIAPNFEKKANFLDIYCEKYSEIYAETFPLEIKGVNQKNSLDRFIIKKLLLVNALHSVIGLLGFQQKLKYVHETLQVKSNLTFVEKLAQQIIDALCAEYPEFNKNNLLSYGKNNLVRFANPKIQDLNTRLIREPLRKLNQNERFYAIYKLFKKNKIALNNILQVYLMVLKTNITDDTESQQIAKLINEKAWTELAKLSSLEESEWNLIKQELSREITKK

SEQ ID NO: 64135 - protein, 395 aa, Mycoplasma pneumoniae
MDLKDNSFAKKRSTVFVVLLIVFCFFLMFSAFADGFNFWSPWSTDFNSRVIHIKSDGNIETTSIVSHELHPDFKAVRFAFGLVIVLFISVIAVLMNWELSNSIFKNYEKLNLSLSLLSGIMVSGGMIPTFFVIYFREWNATVNWIWTASFAGMIVFLWAVYMISTSFIKIRPSLQVIYSLGAVICFIACIGTIYFSVIRGWTTIFLLIAIGVCTDTFAYLFGKRFGKNPLIKISPSKTWEGAFFGVTGTVLTISIICVLYSIPNYVRQPSIKDASKTALQTPQNYDVHNLITNVFLISFISGGSTFYIYWWVSTLALIFTASIFAIGGDLFFSYIKRLTKIKDFSKLLGKHGGILDRFDSSSFLISFFFIYHVIAGISSNQRLLMEPNTYFSAVS

SEQ ID NO: 64136 - protein, 184 aa, Mycoplasma pneumoniae
MSPEKYLNFFKETADKKFQWLKEELSKIRTGRPNPKLFDNLLVESYGDRMPMVALAQIAVNPPREIVIKPFDVKNNINAIYSEIQRANLGVQPVIDGDKIRINFPPMTQESRLESIKQAKKVVEQIHQELRSVRRDTLQMIKKDDHKDEDFEEFLKEEVEKVNKQYIAQLETIQKQKEKELLVV

SEQ ID NO: 64137 - protein, 235 aa, Mycoplasma pneumoniae
MRLKILIKLSGAGMSADSSEPFSNQFLETVIAQLKQLVPNYQIGIVIGGGNIMRGKSCSDYNITEIAGHHLGIMATVINGAFLKAKFDSHKLNSTLLSAVSCPSLATHIVSQTTIDDAFKNHDIVIFAGGTGNPYFSTDTAVALRATQMQADIILIGKNGVDGVYTADPKKDKHAKFLASLTYAEAIKNDLQIMDITAFTMCKENNLKVIIFNINAEHAIIKALSKQGKYTLIEK

SEQ ID NO: 64138 - protein, 298 aa, Mycoplasma pneumoniae
MATKIELIKELRKTTQASMMDCKKALEQNNDDLEKAIKWLRENGIVKSAKKLGKVAADGCIVLHSDHHKAVMVEINSQTDFVARSQELTDFAQLMISEVFKKATPTTTIEEVTQYELQGKEKVAERLALVASKTDEKIVLRRLMVFESKTNHIFSYLHANKRIGVILEVEGKFDEQDGKHLAMHIAANSPQFIDQDNVDQTWLANETSIIKSQAKLEVQDNPKKAAFLDKTIAGRVNKLLIDICLVNQKYLVDESKTVGQFLKEKNSKVIHFVRFEVGEGIVKEAVDFASEVSAQMKK

SEQ ID NO: 64139 - protein, 572 aa, Mycoplasma pneumoniae
MKKLSGIGVSDGMALAKAFLVKTPEFAVNKYLKHQLTKAQAKRLLDSAFKKAVKDLEEIKEITVNNINTEAGMIFDAHIQMLNDPTITEQLEQQLAQNVHPVIAVDTVFSQTATMFSQMQDKYFQERAADILDLRQRLLAYLTGQKPHDLVKIKSDVIIVAHDLTPSQTATLNKKYVKGFLTEIGGRTSHAAIMARSLEIPAVVGIKGITTKVKDGQIVGVDGRKGIAGLDLNSKDTTEWKKQKALEEKYQQELKQYTNKETVTLDGHAVVVAANIGNVKDMELACQYNTNGVGLFRTEFLYMNSQEWPDEETQYQAYKAVLEQAHGDLVIIRTLDIGGDKKLNYYEFPHEDNPFLGYRALRLTLDKQDIFKTQLRALLRAADHGQLGIMFPMVATLDELLQAKQLLNQVHQELGGNKQFKLGIMIEIPAAVLAANTLSHHVDFFSIGTNDLIQYSFAADRMNKNVSYLYQPLNPALLKLIYLTIEGGKVNDIWTGMCGEMAGEPLAIPLLLGLGLKEFSMSASSMFKARMIIAKLNYTECQTLAQKALTLANAKEVEKLVEKFFKKKDIFI

SEQ ID NO: 64140 - protein, 65 aa, Mycoplasma pneumoniae
MAKKDQLTLRGPLYGNNRSHSKTITRRKWNVNLQPCKVKTADGKTTRILVSTRTLRTLKKHNRLS

SEQ ID NO: 64141 - protein, 450 aa, Mycoplasma pneumoniae
MDSTFNELGVSPALIATLKDNNINQPTTIQQLAIPQFLQHQNLIVHSPTGTGKTAVFGIPVIETLLKKPSKGTTQTLVVAPTRELAEQIKTTFINFAKHTHLKVVSLIGGIPIWQQLKQLENQPEIVVGTMGRVMDLLERGVIKFEHLEHLIIDEVDLMLDRGFKRKLFDLLSRIEKFEQIAVYSASYNEETIETAKQITKNGIFLAAPELKQNAPEPDNKLIDQFVCYLFSNRKKQALYSLVSQTRAKSIIVFCDTKKLVDELCIFLRKNDVKTYPLHGDKAQFIRERNLKLFANTTAPIVLVTTDLIGRGIHVEGVDMVVNYSACVNFETYLHRMGRTGRNNHKGSCITFCTSHEKQAFLKLLEQVNDKRISPLRPMRLRLIPLKCKTQPKKGKLSLQSVQKIYVNPRSNGTFKRVPLAGDLFKSRMRQPERDMQKNKLHDSDWQSNM

SEQ ID NO: 64142 - protein, 86 aa, Mycoplasma pneumoniae
MQIDKNGIIKSAQLHDKDVGSIQVQVSLLTSQIKQLTDHLLANKKDFISKRGLYAKVSKRKRLLKYLKHNDLEAYRNLVKTLNLRG

SEQ ID NO: 64143 - protein, 948 aa, Mycoplasma pneumoniae
MKPELKTNDFIRVKGARENNLKNVNIDIPKNQFVVITGLSGSGKSSLAFNTIYAEGRRRYLESLSSYARQFLGNSDKPDVDSIEGLSPAISIDQKTTSHNPRSTVGTVTEIYDYLRLLWARIGIPFCPNGHGAIQTQTVNQIANQIFNLPVKSRIQILAPTIKNQRGTFANEFAKYQQLGFLRVWVDGQVYTLDEEIKLDKNTKHNLSVVVDRIVINQDKQTLGRIVDAIEGVIKLTEGRIEVLLEDGKILSFNKNHGCDQCGFSISELEPRLFSFNSPLGSCEYCKGLGFSYEPDVEKIIPNPLLSINEGGIDIFKNIVHGTSLDWQRFLSLINHYQIPLDQPLGQMDTDLVRMILEGSDEPIEIKTVSNSGAKNVRFEHYEGVAHLIKRRHLETSSQASREWYSAYMSEITCKKCQGKKLTTNSLSVKLGGLDIISFTELSIDKAIEFLLQIELNQEQKKIGELALKEIINRLSFLKNVGLEYLNLARRASTLSGGEAQRIRLATQIGSQLTGVLYVLDEPSIGLHQKDNDRLINTMMVMRDLGNTLLVVEHDSETMLAADYLIDIGPKAGNQGGEVVAAGTPLEVMENPDSLTGQYLSGKKQIEVPKTRHAGNGRTLTLKGAKGNNLKNINVTIPLNKLVLVTGVSGSGKSTLINQTLVPILERLVNYKNVKPAPYKEIIGVNHIDKVVVVSQDPIGRTPRSNPATYVSVFDDIRELFANTKEAKARGYTNSRFSFNVAGGRCDKCFGDGVIRIEMHFLPDVYVTCEMCDGKKYNPQTLEVKYLGKSIFDVLQMSCQEAYDFFKAIPNIARKLKLLCDVGLEYLQLGLNVTFLSGGEAQRIKLAKFLQKKATGKTLYVLDEPSTGLHIEDINKLLTVIQRIIKNGDSVIIIEHNLDIIKMADYIIDLGPEGGEKGGQIIAQGTPEQLLNQVDKSYTAQYLAKILK

SEQ ID NO: 64144 - protein, 681 aa, Mycoplasma pneumoniae
MRKVLYQKYRPTKFSDTVGQDSIKRIIVNAITQDQLPHGYIFAGERGTGKTTFAKIIAKAINCLNWNGDVCNQCEACQAINSNSAIDVFEIDAASKNGINDIRELAENVFNLPFKFKKKVYILDEAHMLTPQSWSGLLKTLEEAPDYVLFIFATTEFNKIPITILSRCQSFFFKQITNDLIQQRLAEVAAKESIKITTDALVKLADLAQGSLRDGLSLLDQISNFSESKTISLADVEKTFNLLDKEQKFGFIEAVLSGDLKQSFHLIDNFESQGINFVHFLRELFALTVDLYGYVKTGQIAVVKPSDQTMAAKLRFHPKQYALLVQAIEANTGYGPSQLSLSDQIKAIVIHYNNAVSKEPHIPAYTPVVQTQSPAKEHVPSKTVEEAKPQLPAKEPVLYKVIEEPKVSSFVKDPVASKLIEQPQTIVQPEAQQEITEVEQPTETSPAPATDLFGLAIKPEVVRKRGRRPLSVENTDFFQPAVKKLIQPVSKPAPIKLIEPSDNNPVSIPIKLNRAVIAVSVYGHNDPKLVAHFQQLLDSFKREFTQAEKTKDSSYLKQFSDKFTASDLSKVIKVLAASPFGLVLIFEDKEIATRLWKEALTEATAQATLLEIFQQNLFLSSFTLSEYETKVLAKVEQLTHKPQVLQLQQLEQLSSTVVKKAQKTAAQEIADTFFKGLYEEK

SEQ ID NO: 64145 - protein, 146 aa, Mycoplasma pneumoniae
MQKTSMLTKEQANKRRQWYIVDAAGLVLGKLAVKAADLIRGKNKVDFTPNQDCGDYLIIINSDQVVLTGNKKENEFWYHHSQYIGGIKKVSGRDMLKKQSDKLVYNAVKGMLPDNRLSRRWITKVHVFKGDKHNMEAQKPTTLNWS

SEQ ID NO: 64146 - protein, 132 aa, Mycoplasma pneumoniae
MEKQSYYGLGRRKSSSAKVYLTPTQDKGKITVNRRDPSEYFPNKLVIQDMEQPLDLTDLKKNFDINVVVKGGGFTGQAGAIRLGIVRALLQFNPELKKILKSKKLTTRDKRVKERKKFGLYGARRAPQFTKR

SEQ ID NO: 64147 - protein, 329 aa, Mycoplasma pneumoniae
MKKGLKTIWHNFIQKREKVKQYRALYEKQIKQYQQKVAKLDPTTKAEEIANLQSEIDVLQRLIKIKNTKDDVVKQDFDKKNVFEIENLNFWYNKDKQVLFDINLKIKRNKITALIGKSGCGKSTFIRCLNKLNDLNENVRWNGKIFFLGKNINSGIINDLTLRTRVGMVFQQLTPFNFSIFENIAYGLRAHGIHNKQAIHEIVEQALKSTALWDEVKDNLHRNANTLSGGQQQRLCIARAIALQPDVLLMDEPTSALDSIATNSIELLIQQLKEKYTIIIVTHSMAQTIRITDETIFFANGRVVEQGTTKQIFTRPKQKETNRYISGRN

SEQ ID NO: 64148 - protein, 456 aa, Mycoplasma pneumoniae [sequence omitted]

SEQ ID NO: 64149 - protein, 293 aa, Mycoplasma pneumoniae
MSPRAIVLKEPNGVNLVPHEGIFDISPVAGWKPLLPTDQVFGIFVVFIVLLTLFLVYWIKLRKADPLRNHSSFVLLMQMLFVWAQDTTADLIGEENKKFTPYFLMLLLYLVSSNLIGLLGGISPPTSSLTFTFSLGLATFLGIVIMGIRYQRWSFFKSFTFNITIKGKKYSTLIPNPLSFLGEFAPLFSISLRLWGNILGGTLILALFYNFWFFAFSTLSNKPLALSLGAIFAGILTPALHVYFDVVVGTLQGYVFVMLTYNYWAKMRNIGLEESQEAAQRLQNLEVAKEIIN

SEQ ID NO: 64150 - protein, 207 aa, Mycoplasma pneumoniae
MKLRATFVFKTTLVALSFALFALFLVSCTENVKEIKSESVINELFPNLWVFLAHLLAFVILLFLLLFLFWKPTQKFLNQRKALLEEQVNQANSLEQQAQALLQQANQRHENSLVVAKEIVDQANYEALQLKSEIEKKANRQANLMIFQARQEIEKEKRLIQEQSLKESVELAMLAAKELIIKKVDVKADKAFIEEFIRELEAEDDHD

SEQ ID NO: 64151 - protein, 178 aa, Mycoplasma pneumoniae
MINAQAFGMALFQLSEEEKKVKKVYDQSHDFLKLARNFKDGSLAALLNAYTLTKKEKLKLIDKLFKNHFCDLFVDFLKTIVLKGYFNLVEQALKYFFDCVENEKHVQFIRIITAFELSAPQLKRIVAAMEKKLNSKIVYKTEIDKSLISGIRIESSAQLFEKNIRDQLSRLMEQFKGN

SEQ ID NO: 64152 - protein, 518 aa, Mycoplasma pneumoniae
MADKLNEYVALIKNEIKKYSKQIFNSEIGKVISVADGIAKVSGLENALLNELIEFENNVQGIALNLEQNTVGVALFGDYSKIREGSTAKRTHNVMQTPVGDVMLGRIVNALGEPVDGRGPIKAEEFDQVEKIAPGVMTRKTVNQPLETGILTIDALFPIGKGQRELIVGDRQTGKTSIAIDTIINQRGKDVYCVYVAMGQKNSSVAQIVHQLEVTDSMKYTTVVCATASDPASMIYLTPFTGITIAEYWLKQGKDVLIVFDDLSKHAIAYRTLSLLLRRPPGREAFPGDVFYLHSRLLERACRLNEEHGGGSITALPIIETQAGDISAYIPTNVISITDGQLFMVSNLFNSGQRPAIHVGLSVSRVGSAAQIKAIKQQTGSLKLELAQYSELDSFSQFGSDLDENTKQILERGKRVMEMIKQPNGKPYSQTHEALFLFAIAKSFIKFIPLDYIAKFKQRIMEEFDKEHPIYKEIATQKSFSEALEAQTNTAFKALVKRFVSALPDYDITKYGTMEELE

SEQ ID NO: 64153 - protein, 152 aa, Mycoplasma pneumoniae
MQMNHPIYIASDHTGLELKSLVIKHLEQQKLQVIDLGPTELDPLDDYPDYAFLLAQTMQANPNSLGILICGTGVGVCMAANKAKGILAALVVDSKTAALARQHDDANVLCLSSRFVVPEENIKIVDEFLQAQFEGGRHSKRVGKIIAYEREK

SEQ ID NO: 64154 - protein, 347 aa, Mycoplasma pneumoniae
MRQTIYLTVNLMQNWVERWILDWANILTWKTLCHQTKIGLPNGAQAFVSAQTSTIPKTAFTAHDFVDYTLPQEQKGKEQKEQQWMKNSQTKDTDVHPYADFAVLEILLFPDSSTDRKIFNHFIQPAIRAYKQLGDSLNIFANQTLDQPKHNRYYLLGYPFLRNKAASLFLNQTEQRKEHMDKTTQILHEKPFVVLTDPAKPTLIRNKGANFTGNTWTSNYDLSKKSGLYHKFLGKKYQIYGKSIVISDLNLSSGSSGSLLLNDRKQIVGIYFGVDGPKDELGFSQLLRWQAKNNDEEKDSVAYDLIFGNKNTTKYYAQFAKEHKTHLYEQIDRSNDQQFTFVKNQKC

SEQ ID NO: 64155 - protein, 406 aa, Mycoplasma pneumoniae
MEPKIRRILNKELQRQRDCICLIASENYVSRDILEVTGSILTNKYAEGYPTRRFYEGCEVVDESESLAINTCKELFGAKWANVQPHSGSSANYAVYLALLKPGDAILGLDLNCGGHLTHGNKFNFSGKQYQPYSYTINPETEMLDYDEVLRVAREVKPKLIICGFSNYSRTVDFERFSAIAKEVGAYLLADIAHIAGLVAAGLHPNPLPYTDVVTSTTHKTLRGPRGGLIMSNNEAIIRKLDSGVFPGCQGGPLQHVIAAKYVCFKEALQPKYKQYIQNVKTNAASMASWFKQQGYRVISNGTDTHLFSLDVGKGKDVSQWLQQANIVLNMNTVPFDKNPAINPSGIRIGTPAMTTRGFKEKHFLYVAALIDKIIKSDGNKKVIKEVKKAVLKLLERFPLYKGLEY

SEQ ID NO: 64156 - protein, 543 aa, Mycoplasma pneumoniae
MAKELVFGKNARNKLLAGINKLADAVKVTVGPKGQNVILGRKFSNPLITNDGVTIAKEIELTDPLENIGAKVISVAAVSTNDIAGDGTTTATILAQEMTNRGVEAVNNGANPVNVRRGIEDASQLIITELDKRSKKINTNEEIEQVAAISSGSKEIGKLIAQAMALVGKNGVITTDDAKTINTTLETTEGIEFKGTYASPYMVSDQEKMEVVLDQPKILVSAMKINTIKEILPLLEGSMENGNPLLIVAPDFAEEVVTTLAVNKLRGTINVVAVKCNEYGERQKAALEDLAISTGTLAYNNELGGGFKDVTVNHLGEARRVQVAKEKTTVIGGKGSKETIQKHLDLLNGRLKQTTEKYDTDLLKERIAHLSQGVAVVRVGGATELAQKELKLRIEDALNSTKAAVEEGIISGGGIALLNVSTILNDSKLADKYKAETSAENLKEILVGYEIVRKSLEAPVRQIIENSGVNPVKVFAELRSEADGVGFDAETKKKVDMIRSGIIDPTKVTKTALEKAASVASSLITTSVAVYDIKENKEGSFQE

SEQ ID NO: 64157 - protein, 445 aa, Mycoplasma pneumoniae
MKLNKLFDSKTVVFKKSDKYGKSDCCKTKCVEGQIEFGVKIPTDFPAFNRALVTFLKTQKNQLNVDLDSFVELYKAENLCYKTALKVVVASITFCETTPFTMKTEPQKNVEVAVKCDSEHTSLIKEYEVVGNYVNMARQLQDTPSDQLYPEEFVKRFEKAATGLGVKITVLKQADLIKKKMGLLLGVNKGSEREARLLVISYNNNKKSSETLALVGKGITYDSGGMNIKTGDYMRGMKYDMSGAAIVCSTVLALAKNKVKTNVVAVAALTENLPGPHAQRPDDIQTAYNGKTVEIDNTDAEGRLVLADAISYAAKDLKATQIIDVATLTGLMSYILSTTYTGIFSTCDMAWDAFKKAACCAGEPVWRLPMHPDYLKPLESKLADLQNSTSVKGAGSSRAACFLAEFREGVPLIHCDIASTASIQDLGQGVLVRTLYERAAQQAKE

SEQ ID NO: 64158 - protein, 291 aa, Mycoplasma pneumoniae
MESIRIGVLGLTNAGKSTLVNQLHKANNLLVSPMNNTTLLAVSTNTITHEKQNITFIDVPGFSEKRHSSYELISQEIRKALSGIDVLLLVVRSDQQQKLPLLQTQLQPLKRYRDLTRVLLINNFFDVVLQAEDKQAIVLDFKPQAVLETDLLHFDATSFWNQFNEVKLQANEFRKDVEFLDADTDNFKILEALREQIIKYCSEEIPHVVRLEIVDKSFDQAKNLLKLHLSISVPKLSQKKIIIGRNAQMVKKIGMQMRQKLLEYYDCNVFVELFVRTYDPKQKKSPYGSLI

SEQ ID NO: 64159 - protein, 1036 aa, Mycoplasma pneumoniae
MPKTIKKQNPSNTTLQYKKYLEQSKEKTAKAKNKDVSIDDLLKKPFLEEIKTNVLKKNKTTRASTATRGTSKVKKQIVESSIDFFDEKKRGVFIVPPAGTSVINDDRDDNKAVEETVSKTAISQNQLAHYANSELVETEQFELKPVALEHNQVLTSTRHSQERESIFEKAQLFWQIFVGDVRFGFWKNHTWIWLGFFDQHQNWYYFEVVETVELPQEHTAFIKRKQIDSCFWKPLVGNPNYGYIQNNIWVWKGFFDTKLNWIPDPVRFTLPMVEKATTTTPVVQIELPAPPTVTVVDQTSPPTAAVTVSTSQPVIEEQTTVFNQTTQLEQLSVSAPLLDQSEVETEMVEVPFVAPSTTTTQPQVVTVQAQPASSSIQFQEPIIKVEFVNESFDFKKPSQTAAAASQAPSQAINIALNEADLIDELVAVGTTATTALPQSELIQEVVVIDNGQPQQAGFHYVVDFLTSTAPLTVAEIELQEQELVNEFVTTTSRETTTFASTPVFEPVVIPTVESEEQLLENEFVESTVVSATSNEPNVASTPVVETVELTETPVSLEPLETVQLETAPVVTETVTVTEKAVEPEVLAVVEEAPLAVEPIVETSTTLAAETVEEAQVEQESTAVAVEPAIETESKATSEAQAELDWEALIGNSEYGYFDAEQNWIWTGYFDEDNKWVSTATAQTEANAEEVVLTADAETSELNTESDPSFEPEVEIQPEPEPNFDLETIPEPESIETTEPEPNFEPEVELEPEIEPNFESETEVQQELAQESSFESEPEPNFETEVEVQPESEIESKFEAEVQSEPKVSLNSDFETKPEAQAEVTPETLEVEATSEAPELQPETEATKVVDDVEEEQLDWELLIGNSNYGHYEPSGEWVWAGYFDDNQIWTPDASVEWARESDYTDLIGDEIYGRYNRKGEWIWYGYYDETGEWVLVDEHYQNHQPRISEAPRFWEQLIGNEDYGYYEDNEWKWYDGEFDSEGNWLVFHSSNAEDAKNIDIAKDIPVFESFDVDSIDADEWLDQFSDSDAKEVFGED

SEQ ID NO: 64160 - protein, 351 aa, Mycoplasma pneumoniae
MKAYAMLKIGATGWIEKPRPVCGPNDAIIRPLAVAPCTSDVHTVWEGGIGERHNMVLGHEGCGVVDEVGSEVKSFKVGDRVLVAAITPEWNSVNAQAGYPMHSGGMLGGWKFSNVKDGMFAEYFHVNDAEGNLALMPEGMDLADACMLSDMIPTGFHANELADIQYGVALSFFCAGPVGLMAIAGAALKGAGRIIVVDSRPDIVEIAKAYGATDYIDFKKVSVVDEILKWTNNEGVEKVLISGGGSTILETAIKVLRPGGKIGNVNYFGAGEFLTIPRVEWGVGMAHKAIHGGLMLGGRLRLEKLARLIMTKKLDPSKMITHRFKGFEHIEEALFLMKDKPKDLIKSVVIF

SEQ ID NO: 64161 - protein, 433 aa, Mycoplasma pneumoniae
MGLTDYCECRFSAGNGGNGIIAWRREAHYDKGGPGGGNGGNGGNVVLQADHNCDSLFFLKNKKHLFAESGGNGKPDLAHGKNGEDLVIKVPVGTTVRDLDTNQILMDFVHDQQSFILCYGGKGGKGNAAFKSPIMRAPNLYENGDKGQSLHVSLEIKYLANVGIVGFPNTGKSTLISKLSNAKPKIANYRFTTLVPVLGVVKHNDQSLVFADIPGLIENASEGSGLGHYFLRHIERCEILIHLISLDPVDHDDPCQAYEQIMRELSKYSQLLVKKKMLVVANKTDVDLDGTRFQKLAQYLENKGIPLFKISALKQELGDLVAQVFALHQKTLAQFGANKFHLPMEMEKHYVFEQASETDHDPLNIERDALGRWHVECKRLHYWFDKIPQTTLDNIRRLGNKIKEVGIEDQLKVAGAKKGDVIVFAGQEFVIND

SEQ ID NO: 64162 - protein, 248 aa, Mycoplasma pneumoniae
MTKNLLNYLNELEAWLTNYVNEAHAQGVVVGLSGGVDSAVVAAMTKKLFPQNHLTLVMHINNSELDHKATTALVEQLQLNNKQVDLEPPYRAMLQALTIDPQKELMVAGNLKARLRMACLYTHAQKHNYLVLGTGNFIEYSLGYFTKWGDGACDVAPLAFLLKSDVYALSQHFNVPELVIERAPTASLFAGQTDEAEMGLTYKELDQYFQGHLQLSATKQQRVDHLRQSSQHKRSLPKTFKPLYSFQI

SEQ ID NO: 64163 - protein, 191 aa, Mycoplasma pneumoniae
MNNSKLKQYVQLVQTANQNFNLTGLKTEGEIYEHLVQEIIELFNEYDSYFDHKKVADLGSGNGCPGVILKLLFPQIKTLDLIDSKHKKVNFLKEVIQTLELNNTQALCARIENHTEQYDTLCSRGLGSIIEVNAFALKLLKPNGIIFHIKQSLDQYLEFEDSEQKDQFKPLFFKFFHGKRQQILIAMKKNV

SEQ ID NO: 64164 - protein, 612 aa, Mycoplasma pneumoniae
MSFTLTVIGGGHAGLEAAFIASKLGLKVNLLVLDPNHVGSCPCNPAIGGPAKGIVTREIDVLGGMQGKAADATALQYKLLNSSKGPAVQAIRAQIDKIAYQKWFRQQIDQTPNIELIAGEAVDILESNGKVKGVVLADGSELASDAVIVTTGTYLKAKTYCGSLSKEEGPDRAKRSEYLSTNLIKRGFKTLRLKTGTPPRILRESLDFSQMAVEANTTPHLAFSFTTKNYLPLEQQVICHLIHTNPQIHQLILANLKQSAVFNGSIKANGPLYCPSIEDKVFRFQDKERHQIFVEPESLSLETVYLAGFSTSFPPEVQEHIVRLLPGFKNARFQKYGYAIEYDAFSSIQLKSTLETKLIQNLYFAGQINGTSGYEEAAGQGLIAGINAALKLQRKPEFVLQRNEAYLGVMINDLVTKEISDPYRLLTSRAEHRLWLRNDNLQERLIEKSRALGLVEADVYANYLEQQQKKKQLIDYLQTTTVGQIAALKLNFKNTAQTLFDFTKRAEIKLVDLVQLLPKRFDLDVQSLNQIDIDIKYAGYIKKSEKYFKSLNNLSSVKIPLKLNYHKVPNLASEAIVKLSKIRPTDLSVASQVAGINFNDILAIKHFLDNHE

SEQ ID NO: 64165 - protein, 537 aa, Mycoplasma pneumoniae
MLFINTDLQECLNALNLEFDEHKELVKLVKNNSFSGFASTVVFHLKGVNQKETAQQIAAWLLKHKKAHYRRVFVANNNFINFEISPQKYLDFLKTKPTFAPKPTKVLIEWVSANPTGELHLGHVRNAFFGHVLNNLMVFLGFQTVREYWVNDYGQQARVFGFSVYQALHLQQNIKVTPHPDGYEGELVDSIAKTITGIPLDKLSFEEFLQQPFLDQLLADCTAKVLEVIKQDLATIHIHFDSWKFESQVVKETDYKKLLTQFKDEAHYEKDGAIWLKTTLYGDDKDRVLVRQDNRPSYFGTDVAYHLDKAARGFDLLYDIWGSDHEGHIKRMHCVYEGLKIHQKCQLKITALQLVMLYKNKEIVRLSKRAGNVITIKQMLQMLSEDAARWFMLSQTNNSIIKIDLDTANLQNSSNPVYYVQYAYARMCSVLKVVDQAALAQVNDCSLLTHEKEIALLDQLVYFKSLLEKVQVSHELHLLTNYLYETATLFHSWYKACKINDPAQYNLTQQRLLLLQSLHHVFGQLLQILNITAPQQM

SEQ ID NO: 64166 - protein, 564 aa, Mycoplasma pneumoniae
MLAGVLLLQSWLKANYPQVQFGSYGVQEGEFYLDFKVEKSFSIKEFEQLEQDLNAYFNQLNNVVQTKIDKTKSLKFFQADPFTTTLIESIESNSLVVTTVNEQTFWVHDLVLPLPKQGFVKLLNVSANYFLGDPTKPQLQRLVGIFAASKEQLKSLIAANEQKYQNDHRAIGKRLEIFTFDPLVGAGFPIWLEKGAVLKKIIGDFVHYQQLMFGFKTVSSPVLANLELYKISGHYVHYSEDMFPSVKLENQMMMLRPMTCPHHCLIFKHKRRSYKELPQRFCEDSILHRFEASGGLTGLERVRCMTLLDNHIFCRTDQIKAEIKNAFKLIQTVNNKFGFSFDRIDLALHDPNNKAKFIDNDQLWANSESQIESVFKELNVPYKIDVGAAAFYGPKIDFQFKTALNKMITIATIQLDFLLPERFELRYFDEQSNAQTPVIIHVGIVGTYERFIAALLEKTHGNLPLWMAPVQVVVIPVNIDKHEKAAKKLYQKLLKENIRVSLDESEDRLGKKVRTAIVNKIPLQIIVGDKEMQDLTRITCRGFKGEKVQKLYWANFVKKVRKDG

SEQ ID NO: 64167 - protein, 87 aa, Mycoplasma pneumoniae
MANIKSNEKRLRQNIKRNLNNKGQKTKLKTNVKNFHKEINLDNLGNVYSQADRLARKGIISTNRARRLKSRNVAVLNKTQVTAVEGK

SEQ ID NO: 64168 - protein, 122 aa, Mycoplasma pneumoniae
MAKLDKNQLIESLKEMTIMEIDEIIKAVEEAFGVSATPVVAAGAVGGTQEAASEVTVKVTGYTDNAKLAVLKLYREIAGVGLMEAKTAVEKLPCVVKQDIKPEEAEELKKRFVEVGATVEIK

SEQ ID NO: 64169 - protein, 161 aa, Mycoplasma pneumoniae
MEAKKDKAQQVADVSHLLSTSAGFVIFDYTSMSAIEATSIRKKLFKNGSKIKVIKNNILRRALKAGKFEGIDETAIKGKLAVAVGVNEIVETLKAVDGVVKAKEAMNFVCGYFDNRAFNSADLEKIAKLPGRNELYGMFLSVLQAPLRKFLYALEAVKAAK

SEQ ID NO: 64170 - protein, 715 aa, Mycoplasma pneumoniae
MDFSFTPTPDKRDFLKEMGRSINDEVLKNKVDPIIGRDNEIRRLIEILSRKNKNNPVLIGEPGVGKTAIVEGFVRRVVNNDVPLNLRDVEIYELSLSGLIAGTQYQGEFEKRVNGILKQVKESNGKIILFIDEIHQIVGLGRNSSSGAMDIANILKPMLARGEIKVIGATTLKEYREYVEKDGALERRFQKILVSEPSQQEALTIMRGLKTRWELFHNLTIFDSALVAAVEMSARYIPDRNLPDKAIDLIDEASAKIKTEMASEPVVIDTLKREIINLETEYAALKQDKENADNKKKQGHLDNLKQQLDELKKKRDSLTAEWKKEKTNFESINKLKKEIEDLQTRLELYQTEGNYEAASKILYYDIPKLKNQLEQAQKKYVDSKHDLFKTEVSENEVAEVVSQATGIPLKKLLETEKEKLLHLGDEIKKRVKGQDAAVETVVNTVMRGRVNLNDPNRPIGSFIFLGSTGVGKTELAKSLAEVLFDNEKAMIRFDMSEYMEKHSVAKLIGAPPGYVGYEQSGLLTEAVRRKPYCVLLFDEIEKAHPDVTNILLQVLDDGTLKDSQGRLVNFKNTMIIMTSNLGSNYIMENKRDLAMEALKKHFRAEFINRIDEIVFFSVLQKTTVLEIITNLLDQLNQRLAKQNLKFTFDPKLNEFIYKSSFDEQFGARPIKRFIDRQIATLIAKQILEGIITKDVSYNVIVEKDKVAIVANKVKS

SEQ ID NO: 64171 - protein, 166 aa, Mycoplasma pneumoniae
MYKSAINIVLFCPEIPNNTGNIVRSCTAFKANLHLIKPYGFFLNDKRMVRAGLNCWDKVQMFEHKSWEHFIETTPPNKAIWLLTKSGTTTPDQINMQTDNREQLYFVFGQETKGLPQTLMEQYSQNQVRIPIWNPVRSINLSNTVACVLYEYAKQNHYFNLDKQCA

SEQ ID NO: 64172 - protein, 861 aa, Mycoplasma pneumoniae
MNLKKTLLMPQTAFEMQGKLTTKEQQFQAFWQSKRIYQKLHRQNKDKPQKILHDGPPYANGNIHVGHALNKILKDFVLRSWNLQGFGTVFIPGWDCHGLPIEHAVSKKDPQHYASLSLSEKRDLCKQFALSQIAIQKAQFQRLGLLNDFSKYYKTIDESFQQNELDLFLQAVKKDLIFQALKPTYWSPVSRTSLAEAEIEYKEVKTIGLYLTFTVVQSAVLNSGTKLLVWTTTPWTLPTNQAIAVHPQFEYLLFTYNNEQYVVLASLFESLKTKFGWTDAIQVQTISGSQLQNTTYKHCLYDKVNPVLLGNHVLCNEGTGLVHTSPAYGLDDFYLCKQNKLNEALVSLDEKGVFNDTLNDPVLTGLFYLKANDVIIERLKQHHNFVFSESFLHREPHDWRSKTPVIYRASKQLFIKTKSIQSKLKRQIKRVKFVNNKNKERLQEMLLQRAEWCISRQRVWGLPIPLIYADNQPLLDVTTIKYTIQQLKKYGIDSWFEKDINFFLNPKKIQPGVEYKKETDTLEVWFDSGSTYNVLISNKLNFPADLYLEGSDQYRGWFNSSASCGIIQTDQLPFKSLISHGFTLDEHGNKMSKSLGNVVDPLKLCDQYGADILRLWVTNVDWQVDNRIGDNIIKQIVEQYRRIRNSLLRFILGNLNHFNFGEMKDYRFALEDKIVIHKTNALVQELHQWLKQYNFLNCLKAINKFVLWLSGWYFEIIKDTLYCDAKTNPNRVAKQAVLNYIFTQLIGFLNIFIPHTAEDAWQNYLLPKKPVSVNLFAGPAMFKVANVKGLDRLHESFSAIKDRAYAAIEQARQNGVITKNNQVVLTLGVDSTSAIDPTSCKTFSSLAKRKPGKYNEWPQRN

SEQ ID NO: 64173 - protein, 272 aa, Mycoplasma pneumoniae
MRDKVNINTVDISQLEVFFQPAKKPAKQTIVFAHGFSVHHSYFKSFSETLVDYDYYAPLWPGHNHHGFTDKELSPIHYAHLLVAWIEKQDLENIVLIGHSMGGAVASYALQFLKPQRVEKLVLLAPLSYSNLLNYYKIKKAFKKKDEKLSYFKRMFQPKFPDLQNDGQWQMELDKHTAMCKKLTFQIFKELSRLNSAYKTITIPAFLLLAQHDDFMPTKATLNYFNRFLIKKGNLQSGVILHSQHQMFNSKHESFCKAMHDILKHNKLSKIY

SEQ ID NO: 64174 - protein, 1391 aa, Mycoplasma pneumoniae
MSQKPSFFQKKYSPTATRRYYGKIATDFVQPNLADIQIRSYQTFLDHDLENLIAAYFPIKSPNDRYTINFKGLRRTAPERNEAQSRSESKTYEIGIYADLELIDSATGTIKKPRKSKKNSATSSVDGVFLTNLPLITRDGVFIVNGIEKFVIAQITRSPGIYMLTKSQLKLSSSRKRVQEGYVCEVLPANGSVMLIYISNKKKIEDAFVQILLRDAVREGAKIFPITTLLKAFGMSGKEILKVFKNNEFITRSLEAEVYNAKDFLNNVDPEIKNLLREFRDGKTDLRRKGIASDQKIRSLVSDYVLLEKEHKALSEAKPNDPKVGQLEADMDELMDKIITERAAKHIVHELSISLRGLENTDECPENSYHALLCSRFFRQRRYNLSAAGRYKVSRKLRITERIYQKTLACDLHLKNGELLLKKGTLLVKEEIDKIKQAAQNNQIDFVQKIKLTTDGSAVNLSPESLLYESLDVYVNNDNFDVSVPVVGIHNDNDLNKAITLSDFIASISYVINIPSAIGKYDDIDHLGNKRVKLINELISSRLESGITRMERFLKEKLTIADGVNRGQQINEEGQVIEQAEKKELTIKSLINSKPIQIVIRDFFNTHQLTQFLDHQNPLSELSNKRRISAMGPGGISREDPNLDIRDVHYSQYGRICPIETPEGMNIGLIMSLASFAKIDENGFLMAPYRKIKNGVITDEVEYLTALREDEHIIAEISSLVNIDENNKILDKEIIGRYRSMQGLYDPSKIDYIDVAPHQVVSIGSSLIPFLENDDSARALMGTNMQRQAYPLIKPYAPVVGTGQEYKIARDSGLTMLAPCSGTVKYVDNSKITIESDSGEQHTLDLIKFERSNQNTCYNHVPLVEKGQRVTKDEVIADGPAVNKSELSLGQNVLVAFTTWNGYNYEDAIVISERLVKDDVLTSLTINEYVAQCLSTKNGDEQITRDIPNVSDANKRYLDENGIIMVGAEVKEGDVLVGKVSPKGQVEVSPEEKLFKAIFPESVQNVRDSSLKLPHGGDGIVSCVKRFSIANGNELNDGVIEMIKVYVVQKRKIQIGDKLAGRHGNKGVISKVVPVADMPHLEDGTPVDILLNPLGVPSRMNIGQIFEMHLGYAAHNLAKRMLISACFDDKKAQALSTEINQPQYKLDRLITGLKAQITNRGLKDEQAALAQLNNGDIALVLKEIGMSFDDLHFKVATPIFQGVNFQDLQDIMDEAGLKPAETHGKFKLIDGRTGLPFEKPISLGIMYIMKLNHMVDDKIHARAVGPYSKITQQPLGGKSQNGGQRFGEMEVWALEAYGAAYNLQELLTIKSDDVQGRNKAYAAIVKGAAFPEPGIPESFKLLTKELQGLALSVSFIYDDNTQQDSNNVSILQADGEQDDLFNDFEFDTEGY

SEQ ID NO: 64175 - protein, 1290 aa, Mycoplasma pneumoniae
MTKRNKKNNKLYKNIKAIKLSIASNDTILNWSEGEVTKAETINYKSLKPEPGGLFDEAIFGPVKDYECACGKFKKIKYRGVRCDRCGVWVTESIVRRERMGHIALVSPVAHIWMSKELPSPSKISLVLNISYKEVEQVLYFVNYIVLDTGKIKDPKIMPFKFKEVLDLAGKGSLTTRQKMRRVIGYIFRNLIKNRSSEDYRKGKIFYESLKNSSLPFSLNDAFNYIKKYTGFRVGIGAEAILELLNKIDLNYEFSKLNDALRKAKKDSVEDAKVKKILRQLETISWFRNSKLHPKNMILHTVPVIPPDIRPIIQLDGAKFTTSDINNFYRRVIIRNDRLRRILEDGTVPAIVVNNEKRLLQESVDALFDNSSRHKPALSKDKRSLKSLTDRLKGKQGLFRHNLLGKRVDYSGRSVIVVGPELKMYEVGIPALMILKLFKPFIIHGLINKFDSNGNEIRPIASSIRQAEDMIKNQDDLIWGIVYDVIKDRPVLLNRAPTLHRLGIQAFEPRIVDGKAIRLHPLVTTAFNADFDGDQMAVHVPLSENAVNEARAILLASKHILGLKDGRPIVTPTQDMVLGNYYLTTERKGQTGEGIIFGTVHEARAAYEAGKVHLHAIVGISTKAFPNKHFEAQGTLITTVGKIIFNDVLGDNIPYINEGEFDEHACPQKFIVPPSGDVRAAIAAHQVLPAFGKKVISKLIDLLYTVVEFKDLPRILENIKALGFKYSTHSSTTVSVFDIPKYSNKQQYFDEADQQVLKYKQFYNKGLLTDDERYKRVVKLWNGVKEKVSSEIQDLIKREEYRDNSIVVMADSGARGNISNFTQLFGMRGLMSKSFNYERNNQSKIIKDTIEVPIKHSFLEGLTINEYFNSSYGARKGMTDTAMKTAKSGYMTRKLVDATHELIINHDDCGTRKGIVVEAIVETKTRSLVESLFDRIVNRYTIGPILDPETKAEIVPANSLITQELAKQICATSIKQVLVRSVIYCERENGVCQYCFGVDLSTGKLVELGTAVGVIAAQSIGEPGTQLTMRTFHTGGVSTENNLAQGFERLKQIFEVVAPKDYERCVISEVKGVVKSITTTQNAQEVLIESSVDERTYSIPFSAQLRVKVGDAVELGSKITEGSIDIRQLLRVAGIQRVRQYMIVEIQKVYRIQGIEIADKYVEIIIRQLTSLLQVTDAGSSNLFVGQLVHSHHLNELNKSLLLSGKMPVIAINQVFGIDEAASKSNSFLSAASFQDTKKILTDAAVKTQVDYLLGLKENVIIGGKIPAGTGFLTDEELAYLGAKTVQEEY

SEQ ID NO: 64176 - protein, 143 aa, Mycoplasma pneumoniae
MDPPNVGRDVKRMVAIAEQLKGKLNIIMATGFHKAAFYDKGSSWLAQVPVNEIVPMLVAEIEEGMDLYNYSGPVVKRGKAKAGIIKAGTGYAAIDRLELKALEAVAITSITTGAPVLVHTQLGTMAYEAAQHLIDFGVNPRKI

SEQ ID NO: 64177 - protein, 660 aa, Mycoplasma pneumoniae
MLNKIKLQQKRKLIIGWSVFALINLVVILLTVLLRAGLPNLVSKGVTPFSAQAFGDAFIFLITRVYLDNFLRQPALLLGVITLIGYLALGRGGVQSVVGALKTVIGFILLSIGSGVLVSTARPVFDTIKGLGGTGVVLLDPYFSLASANDFFTNSFLNNDYVSLIAFSLLVGFIVNIIFVGLKRWTNTNSIMVTGHVMLQQAAVVTTLFYIVLFRQIPLLGTGIAYGAQAGLVIISGIFLGVYWSTASTGTYLVTNKVTNNAGFSIGHQQMLGIMTVAKLGKYFGDKNDSAEHKKLPKALKIFEDNIFTQTIIILSLFVVLFIVILASYKGDKPLLINWDKFGAINGLEIWNTTFGGANFTLNIIGGALKMVASLIAIMTGVRMFITELQQAFQGISEKVVPGAVVAVDIAAVYGFSINSVTFGFLSGVIGQFLAVAIMAGISYIPGNQFSFVAIPLFITLFFNSGAFGVYANAEGGWKAALLLPGIIGFLEIIVISFALRTVSNAYQASALLDAKQSFDLKALMGNSLDNNNGSALKTAVEKVVNATGVNRITEAQSFVKSDSFNSLKAVNSTLAQAIEWISKSASPVDNGFIGMADWNLYFGLLVWIGAYNVIGGWILVILATVGLILLAQIIDNGKQTKVTKLQQLLKINPQLDLNN

SEQ ID NO: 64178 - protein, 159 aa, Mycoplasma pneumoniae
MTKLDFKAVLKQHHTVRLHQTAQDWKQAIQLCIHPLIAAKLVQPAYFDDILKSVAQYGPYFIIAENVAMPHAQNNGTVQQNCFSLVTLKEPVYFDNDPRPVRLLIGLAATSAAIHTTEALPQIAALVEDTQVVKDLLDCCDETSLFAVIDRVNLHKYLT

SEQ ID NO: 64179 - protein, 336 aa, Mycoplasma pneumoniae
MVQKEMINKKISQDNSFIQNNNLADFDFLDAKKNSEIKTVSTGSLHLDEALGTGGLPLGRIVELYGNESSGKTTVALHAVASFQKAGKVACYIDAEGALDLSYAKAIGIDLGKLLVAHPKHGENAFALMESLIKTNKVALIVVDSVAALIPKQELEGNMDDQTIGLHARMMSKGLRRVQSLLPESDTCLLFINQLREKPGVMFGNGEVTTGGRALKFYASMRMEAKRSELLKDRFGNYVGIKSKLTVSKNKVARPFGVAFLEIMFNRGIVYEHEVIELALKHNVVVRSDNAYSFKSQNIAIGKEKLFSVLAEKPELFEQIKQLTIKQIHSPPPPAS

SEQ ID NO: 64180 - protein, 140 aa, Mycoplasma pneumoniae
MDRKIREQIIAIYSNLQHKQDLTQFAHCLTTKADDNCEDFFNLGLQFQNNQLTALGFNGEGCIISTIASELTLSALEGKTIKEAIVLLEQFMEAVQTGSLSTPLPQALQLLWDFQIDQKRLNCLLLTPQNLLQWLKDFSH

SEQ ID NO: 64181 - protein, 838 aa, Mycoplasma pneumoniae
MDKQFSFQGQYDFKTVSTGLYDSWSSASFFKPQKNKVPFTAILPPPNLTGTLHIGHAFEVSITDQIMRFKRLRGYGVNWIPGFDHAGIATQTKYEKLARETNPEYFQAPRKQKVKMIMDWALTQGDTIQSQIKSLGASLNWNQVNFTLSKKASQIVNDSFIQLFEQGFIYQAETLVNWDTKLNTAISNIEVINKPVDQQLYYIAYKLANNPKKRLVVATTRPETIFVDVCLFVHPKDKHYHSFVKQKVVNPLTGALMPVFTDSYVDKKFGTGVLKCTPAHDFNDFALNEKYRLPFVSCIDHNGLLNEHAKQFTGLTVSAARQQVVEFLQTQKLLVKTMPLTSNVGFSERSDTVVEPLLSKQWFVDLPKLKKALAIKKYPELIPKRFNKQVTRWLSQLKPWCISRQLIWGHPIPVWTHKQSGALHVGSTAPTDKQNYTQSTDVLDTWFSSSLWPLICLDWHKNKHFVPTDLLVTGYDILFFWVLRMTFNSYFQTKQLPFKQVLIHGLVRDAQNRKMSKSLNNGINPMDLIRDYGADATRLFLTSNHTPGDDLIFNEQKLKSAANFLNKLWNVTKYVLQLGEQAKTVPSTHLPSTLSERWIWAKLKQLIVQTTKLLDKYQLALANQALVNFIWNDFCNTFIETIKQEDTALLPQLYTTAKTVLSTAVVMLSTVTPFLAERIYQQFHSGSVMQASWPTAKAVKPPKLFADVVEAVSSLRHYKANNQLVANQNLAVVLSGKAAPVVQNYFHFNWVDLRIEVNKTPGFQIKIVDNAANNLAHLEKQRSFYLAEVQRSQAITTNPAFLKKAPPHKVKAELLKLEEYQKKLAEVNHLIAKLTKAE

SEQ ID NO: 64182 - protein, 217 aa, Mycoplasma pneumoniae
MYFQIAIDGPSSSGKSSVAKTVARQLGFEYFSTGKMYRAFAYVMQVNRLDVNLLLKVINQINWRFEHEKVFYNNADISEVILNQEIAQLASNLATNPEVRKMAVLRQQALAKNTNIVMDGRDIGTVVLKDAQLKYFLDAKPEIRAQRRAQDLGIAYDSDKAFQELVAEIKHRDAVDTSRTADPLVQAPDAIYIDSSNLTFQQVVELMVQQARTVFKL

SEQ ID NO: 64183 - protein, 292 aa, Mycoplasma pneumoniae
MDRLVKDNQLPPYHGSSETNPEVRFCVIGKPNVGKSSLINQLVQQNRVLVSDESGTTRDAIDIPLRVNGQNYLLIDTAGIRRKGKIAPGIEAASYGKTQLAIARSNIILLMVDGSKPLSEQDEIIGGLAQAALIPVIILVNKWDLVQKDSNTMAKFKKQLQSQFQHLSFAPIVFISVKNNKRLHTIFEQLQIIQEQLTKKISTSLLNDVIQQAQLFNQAPLFKGGRLQVTYAVQTHSQTPHFVLFCNDPKFVHFSYARFLENKIRESFGFSAVPITLYFKSKNARIRGVAKT

SEQ ID NO: 64184 - protein, 1033 aa, Mycoplasma pneumoniae
MEFLEQEGQEVLTKEIKAGFCEITPSSITEQTTKPQLDETQLVDEYVHTKELETTPIPISFATKEVLFEEVFNTPSTQQVDESVLVNEYIELTQQIKNASEQVSSNHTHKFSVATEPAATKAVSETMLLDDYVEMVEQDVQAQTALPQAALDPTVSLTFSSPIDSNAILVYPEMKVPHVFDTVAPTTTTVPLDQTQLLDELVEVPVLTHTVTPAPLQPKAAPTNFALDQTQLVDELVTVPLTHTLVNESAPVTPVVVTSPAAEHSFSITTVDKANLTNALSQTVVIKPAEDSAHQSAVLDKEIATKQAQLQQLQAQIELRQAQLETPPVTYMGVEEYKLLPVQDVVPVQPTVSFEMTLLQEQLDKALKHNAALQIQLEEQLAKPLQYDQSPVLQERIELLQNQNTNLTQELNELQQKLFKSQNNSLLLARLEEENRTLKQHLQNNLPEANQLNFVLEKQLEQLQQDKHSLTLQIEQYKFDSKKHQEQLALIPSLRSEINSLETEVISLKQTNQRLSLIERENNFLKTEIKQLRETKLNDENTKYRNLLKQYELMRADSDAKLKELEHEQHLAHQHHQEQLAQLQRHNEALVKELDQVKATNFELGLAAQGFEQQKVVLEQKNSSLLASLQAAEENVQALGITNSELQNQLNVLEFTHKEKTAFDSKTLTLTKQQLEQTQFDLSLTQEQLATFKQQNQSLTDKLMASETQLNHLQQSDENLTQLQTQHELLQESYNKLQDEANHTQQQFHQAQNELDAAHQQLALFKQNNEELTDKCSNIQNELHDLNRVKTNWENLNTEHNLLQDKYAQQKEQMQHEHSNLAQIQAEHELLQESYNKVKAELNEIQITNLNEANAQYQDLLSAYELLQSNHNKLKQELQVLNQVNLEKQQLAQKLHNTHQSLSQTHAELTQLQAAYNNLQATPPVSDELLEQFNQVQLEKQRLLQQNLALVHELQYFNELNSSQTHEIKTKQDETVKEVIIVEKEIPVPPEKKPRLKKRDIVIENKEDALGKLSKKERIQAYAERLAKINGKQ

SEQ ID NO: 64185 - protein, 268 aa, Mycoplasma pneumoniae
MASSKSDPFQSIFAFKPHRKRHNFIFLHGFGSEYSSFKHVFKLFEKKRWSFFAFNFPGHGNNQSNSVDELKLKHYVELVCDFIIQKRLKKVVLVGHSMGGAIAVLVNAVLRERIKALVLVAPMNQTSFVVSKKRILDTLFTRSPKNQQDFIEHTDDKKSIVNFFVGAFKKRVNFKTLYSDMVQNAKYGNDYLEAGYNAIKDKPTLVVLGSNDIVTPTKASVEYLAKHSETIIFKIIDGVGHSPHYYAPKLFFDYIGEFLDNIKRNKDK

SEQ ID NO: 64186 - protein, 53 aa, Mycoplasma pneumoniae
MAVKRSTRLGCNDCREINYLTFKNVKKNPEKLALNKFCSRCRKVVVHKEVKRK

SEQ ID NO: 64187 - protein, 274 aa, Mycoplasma pneumoniae
MKLPPRRKLKLFLLAWMLVLFSALIVLATLILVQHNNTELTEVKSELSPLNVVLHAEEDTVQIQGKPITEQAWFIPTVAGCFGFSALAIILGLAIGLPIVKRKEKRLLEEKERQEQLAEQLQRISAQQEEQQALEQQAAAEAHAEAEVEPAPQPVPVPPQPQVQINFGPRTGFPPQPGMAPRPGMPPHPGMAPRPGFPPQPGMAPRPGMPPHPGMAPRPGFPPQPGMAPRPGMPPHPGMAPRPGFPPQPGMAPRPGMQPPRPGMPPQPGFPPKR

SEQ ID NO: 64188 - protein, 205 aa, Mycoplasma pneumoniae
MKYTGSIFKRSRRLGFSLLENNKEFSKGKKRKTIPGQHGNRFRSSTMSGYAQQLQEKQRMQYMYGITDKQFRRLFRLVLKQRGNLAVNLFRVLESRLDNIVYRMGFAPTRRSARQLVNHGHVLLNDRTVDTPSIILNPGDKVRLKAKTIKIPIVKAASESGVVSPFVETNNKTFEGTYVRFPERSELPAGINESYVVEWYKRLVK

SEQ ID NO: 64189 - protein, 1325 aa, Mycoplasma pneumoniae
MHTFTRKVKWPFMFTAIGLTFGIVAVACAQPTASTVEGLFKPSSAFADRTDFSLSSILQKSLINRESFNQYLAMRLAPVLRTFYEDNYDTDIKERLNGFTADTDNAFVSQEQNLRNQFRENYLVHLQTDIFDNTGGNQAAWKLRDVNNKIIDDFISRIFAKNFVEYVQDGVGPLTKPTKSLIENTSNFKNIKLQPKFVNKNAKLKINNDAVYAAIQDKLLDQFITNENPNLVSRVVFTNETPVDGFDNYFNTKVIQSPTPSYQFQVFNKYNQQSGGTKGANGFNLLASNLKSYKNDQSKGIDIPNKFSSDSGGKLLLKASDMFDTFDPSFSAAFIQGYLALQKKSKGADSKEVDSLIKDKSIIENFFVDNNTQAAAAARAASSSSEGTIQLKTASDGGGTTQSTVHKTDLVKIFGDKDVFAGEYKQQIGNTNANQTGGGGSGGGGGTSTGSSTGSSTETTTGNSSKAVVDLIEVKKDSSSQPDYILSRGKDGIHLMAVDGGSHYLTESGRDVAKQKKFLLFRALQTKYGLVDTDTTYDFKLFDEVKKYFDTNRILFLFEALLDLSSDTNNKDNFLSYPQFKKFADSIKSIEKDLKELVQAHYKQAVFNETAVAENKVTLKLAERNQPFIDNERNNQIEQNGLAAKLPYEQDAKTGHYNDLGNYYKDIIDNVDKKGTSTVKTTSSNTGQTKNFSEEVVSKLKDNKKKVEEAAKKHVEALKVFTIPSPLYSQVILVQTKLSFTPESTSLGLNLALNNYLTSTELQNSIKLSYFQEDEAFKKIIDITNLTFSQQSGGTGGTNGNNNLTADNWKIFKETYLLDLFESQAQKSIFGHVGSSDKNSSTKTGIEGVLDTLYSSLNLEERLDSDDVIDYLSYLYTAHWLLKDNLKNYKQSLQSKLSRTSNAFLVWSVDSEKNKNDSQSTLSSTASSTSNTGLIQLRSVVSLAQNQAAGQGGDNNSDITQTEVKNPNFVFGSSVYDWTNSKTPEVNRAADDTSSFFYTKSSSSSTGAAQSSATVLRSLNQASGMTTKTAKNRYGFRGIVTSSTSGSLPEAVSRRLFKQFVNQTEKGVKVGGQMLITTAKSGKATLVLKQQADDAESTTNNAYKGALFSFGSMDNLKNIINGIQTQTEFDALYNHLTSDLNIDVTGVDKNKTLTEQKTSLTSFVDSNFKQSTQSAQRGDTSARSARSATVQIKKTQEDNQNTNYKDVFSRFDGYIGDNKVEEKNYTSYQFLSDGGKYHATFVKQVNLDDVEKIGTDSLKQEDSSKDKRLNLSLEEFLAAIALEALDPNNQTQAINALISGNKKGLVKVGDFRIFSSISAQWVRRF

SEQ ID NO: 64190 - protein, 595 aa, Mycoplasma pneumoniae
MSTDNGLIIGIDLGTTNSCVSVMENGRPVVLENPEGKRTTPSIVSYKNNEIIVGDAAKRQMVTNPNTIVSIKRLMGTSNKVTVKNPDGSTKELTPEEVSAQILSYLKDYAEKKIGKTISRAVITVPAYFNDAERNATKTAGKIAGLNVERIINEPTAAALAYGIDKSNREMKVLVYDLGGGTFDVSLLDIAEGTFEVLATAGDNRLGGDDWDNKIIEFILAHIAQEHNGLNLSNDKMAMQRLKEAAERAKIELSAQLEAIISLPFLTVTEKGPVNVELKLTRAKFEEITKQLLERTRNPISDVLREAKIKPEEINEILLVGGSTRMPAVQKLVESMVPGHSPNRSINPDEVVAIGAAIQGGVLRGDVKDVLLLDVTPLTLSIETLGGVATPLIKRNTTIPVSKSQIFSTAQDNQESVDVVVCQGERPMARDNKSLGRFNLGGIQPAPKGKPQIEITFSLDANGILNVKAKDLTTQKENSITISDNGNLSEEEIQKMIRDAEANKERDNVIRERIELRNEGESIVSTIKEILQSPEAKDFPKEEKEKLDKITGGIDAAIKANDYTKLKAEIENFKKWREEMAKKYNPNGDQGQPAQ

SEQ ID NO: 64191 - protein, 337 aa, Mycoplasma pneumoniae
MLAKSKTIRVAINGFGRIGRLVFRALLSQKNIEIVAVNDLTHPDTLAHLLKYDSAHGEFKKKVVAKDNTLMIDKKKVLVFSEKDPANLPWAEHNIDIVVESTGRFVSEEGASLHLQAGAKRVIISAPAKQKTIKTVVYNVNHKIINAEDKIISAASCTTNCLAPMVHVLEKNFGILHGTMVTVHAYTADQRLQDAPHSDLRRARAAACNIVPTTTGAAKAIGLVVPEATGKLNGMALRVPVLTGSIVELCVALEKDATVEQINQAMKKAASASFRYCEDEIVSSDIVGSEHGSIFDSKLTNIIEVDGNKLYKVYAWYDNESSYVNQLVRVVNYCAKL

SEQ ID NO: 64192 - protein, 409 aa, Mycoplasma pneumoniae
MVDFKTVQAFDFQGKTVVLRADLNVPMKDGVITDNERILASLDTIKYLLGHNCKIVLLSHLSRVKSLDDKKGKKSLQPVASALQNLLKNTKVHFCPENTGDKVKVAVNQLPLGEILVLENTRYCDVNEAGEVVKHESKNNAELAQFWASLGDIFVNDAFGTAHRRHASNAGIAKYIKNSCIGLLMERELINLYRLINNPPKPFVVVLGGAKVSDKLQVVNNLFKIADHILIGGGMVNTFLKALGNEVGTSLVEEDLVQTAKQILDSDKDKKIVLGVDQMLHASFKDEPGVECVVAPQWPAELQGFMSLDVGSKTVALFSSYLAKAKTIFWNGPMGVFEFSNYAQGTLAIGKAIAQNQQAFSVIGGGDSAAAAKQLQIADQFSFISTGGGASLALIGGEELVGISDIQKK

SEQ ID NO: 64193 - protein, 320 aa, Mycoplasma pneumoniae
MSVIDLLKQRVQSAGKKPVIIFPEGWSPTVMEAVNQLQQAGILTPPVIFRTRSEVPAGFNTAIKHYVIEEMDLTKYANFVYEKRKHKGMEMREAQKFVRDASSLAATLVALNEVDGEVCGKEYATKDTLRPALQLLGTGNFVSSVFIMEKNEERLYFTDCAFAVYPSPQELAVVAENTFKFAQSMGEPELKMVFLSYSTLGSGKGEAVDKVVSATQIFLEKHPELKANVCGELQFDSAFVEKVRKQKAPNLTWNGSANIYVFPNLDAGNIGYKIAQRLGGYEAIGPIVLGLARPFNDLSRGASVSDVFNVGIITAAQTLK

SEQ ID NO: 64194 - protein, 290 aa, Mycoplasma pneumoniae
MTKTSKASGLSWFFCDLDGTLLRYQNNQHLIEPTTKRAVAQLVESGANFVVATGRKPSDVRNIYKELGIEQASPYLIANNGAVVWDLKRNSYLNKQTLSLSDFDLIDHINQTLNQLNHEYGCILYGLNDQVYFYHIHAPDSQAFKQYFAFYEGEFVQNQYLEIDGLKTEYNLVKAIWFFKEVHQQKAVIAQHFTNQERLVITSAHSFELVPLNVSKGHAINLIKQQVKITDNQIMVLGDSYNDLPMFQHGVVKVTNHLAPDNLKQLATRVYELPASLFVGQALNDYFKFD

SEQ ID NO: 64195 - protein, 982 aa, Mycoplasma pneumoniae
MVFLKRFRAYGFKSYADEITINFTHSMTGIVGPNGSGKSNVVDALKWVLGERSMKHLRSKSGDDMIFFGSKDKPASKLAEVELTFDNSQKLLHDPRPEISVMRRIYRGSGQSEYYINGELVTLKEISGIFADIGLEKGSLGIISQGSVSWFVEAKPEERRKIFEDASGIGRYTKRKEEVTNQLARTVQNLKQVSIVLNELKKDLKKLTIQADKAQRFVKLKEELKELELSVLVADYLKSQGELDRFNHQIGYIEQDFKLHEPQLQLLEDQLNIFNQRFRDADEQSIKLQQELQAVYQTINELEQRKAVIDVQLKNELSKKDEKHKIQALKKLIRVDQAQLESLQAQVLKTTSEITLLTNELSTVQTELDTTKLNLNQNSAALVYQQAQQEFLKAQNEEWVKTNPAHVLVKNVKALTGLLNTLNTFLKFEKQYEKALLKALGKSIGYLVVNNNLAALKAIDFLLTNQIGQVTFLPIDDIAFDTKIAPEHMEILQQLDGFLGVGSDHVSCDESLQPIVNALLGQVIIASDLQAALKLSSYTYKLYRVVTLNGETVYAGGIIQGGYVKDNLSLYNLQEKLASSEANITQLEHNEKQLRTNLTSLETKLNELNKKLKYEEILLEKFNERVNHTNKAILSYKIEYEQLTNESFDGTPHSFDETRLVESLNRAWAERDELNSQLKLNQELKETLAKSIKLAEAKTADLRALLDEQRSQLVLAREGKIRFENTIHNITDKINGGYKLTMEFAIANYNKPIKLSTMQAQNKIARMQSQLDEMGPINLESIAEIADKQKRFDDINGEYESLQTAIKDLQTAIGEIDELACKEFDELIQKVNAELPKTFNYLFGGGSCQIRYTDTDNVLLSGIEVFANPPGKNVANLMLLSGGEKTLVALSVLFSILRVSAFPLVILDEAESALDPANVERFANIIGNSSNNTQFLIITHRQGTMMKCDMLLGAAMQTKGVTKTFAVSLEKAEQYISKDKQN

SEQ ID NO: 64196 - protein, 348 aa, Mycoplasma pneumoniae
MSFIHKLIQKFKPKKKLVDQVQQAVQEKSFFQANQKSYYQGLNKSANSFANTINKLAANYVTVNEQFQESLFEELVLLDIGYHAATKICDAIVQELKLQRVSDPQLIQEIIVDKLIVYYIQDKLFETDLTVEANKTNVYLFVGVNGVGKTTSLAKLADQLTKQNKRVLMVAGDTFRAGAVAQLAEWAQRIGCDIVLPNPKEETPAVIFRGVQQGIQNEYDFVLCDTSGRLQNKTNLMNELKKIYQIVQKVSSAKPQETLLVLDGTTGQSGLAQAKVFNEFTELTGIILTKMDSSSKGGIILAIKDLFNLPVKLIGFGETTADLAAFDLEQYVLGLTKNLSLNHEPNQT

SEQ ID NO: 64197 - protein, 102 aa, Mycoplasma pneumoniae
MNQTKLNQRLKQQQLFDIYGELLTKRQACYFNEYINLDLSMQEIADKYQVKKSSIHQHIKTCNLIFNRFEAKLQLFKKQQLRLKLYEKITDPQLREQLIKLR

SEQ ID NO: 64198 - protein, 370 aa, Mycoplasma pneumoniae
MQNKTVFVGISGGVDSAVSALLLKQQYREVIGIFMECWDNTLNNDQLGHRAFNEHKSGCSSKEDFREAQAIAQLLGIKLIKQNLVEPYWKQVFLPTIDAFKNGLTPNPDMLCNRLIKFGLMRDYCKQLDPNSDFATGHYAALSWDNNQPLLAIPKDKHKDQTYFLAHVKPAQLQDVVFPLAHLLKTEVRQIALAHHFSVATKKDSTGICFIGERHFSDFLKNYLPVKPGVIYDWKTQRQLGSHEGVWFYTTGQRSGLNLGGQAARNFVVEKDLKTNTLYVSSDPEDLQRRGITLSHFNWLYQPNPLTQTVLVRIRHAQPLVQGHITVQPNNVVQVQLDQPIDRVTNGQYGVLYTQNGICLGSGIITASQI

SEQ ID NO: 64199 - protein, 475 aa, Mycoplasma pneumoniae
METKLSLKKRLQQFSKKQLIALIILGAADVFVIAAPYYIKNVVPNLHLYLGITEDEVATLTSIIGYVTLATQLPGGFLANRFSSRKLLFLSEISTGVITFWLATNILTRESQKSNALFVQYCVIWGLWGITSTLIFWTPLWKLASQQATQENQALGFGIQGAANGVWGFIFIFLIALIITAVAYPAGGESSANNPAPFAIYAFIIGGMLLVTGFTVLFFVPEKPIEKYDSHTSLKTAKKNFEQILITLKNWKLWLLSFFLMGMYVFQSTFAYYLLQMMQNAFLAPVILGTVLGGVRTYVLRSAVSVYLGRLADKFRSYILFLMLCTGLGIIFVLMFILLGFGQVGQQQNYALIIVSAILYILTGVLSWGMVTVRYNQVAEIEIGKNNYASSVGLLSFIGFSTDGWLYTVTSVVGKAYTPDGQKNTSIQGYQIIAAICLGIALFGLLCGTIVFLVNTWELKRLGKTDYRWRTLDNA

SEQ ID NO: 64200 - protein, 241 aa, Mycoplasma pneumoniae
MLKRQLLLAHRGYSDIAPENTQLAFELAFQYRFDGVELDVHLTKDGELVIIHDETTTRTALVDKTIELETLASLKQDDHSAFFKFKTQPQPIMTLKEFFDQYLDKFQLINVEIKTDQKEYPGIEAKIDALAQQYGKKVIEKVVFSSFNFASLQRLYDINPNYQIAFLFWTKKQFQAVDALKIKQVCQYLHPWTNIYEKFPDMVLSLQLPLGLWTLNSEVKFHQFRQDRMVYAQIANKKFEV

SEQ ID NO: 64201 - protein, 900 aa, Mycoplasma pneumoniae
MKWTTDKVRQTWLDYFTAKGHLALPSKSLIPVNDPSLLWINSGVATLKDYFSAKKTPPSKRLANAQICLRVNDIENVGFTSRHQTLFEMLGNFSIGDYFKEEAIGFANDLLVNHYHLDPKRFYITVYQDDELTFNTWLKHGIPASRIIKCDRDRNFWDLGLGPCGPCTEIYYDRGERFDPHKVGEKLFFEDIENDRYVEVWNIVFSQFNNDGNGNYSELAQKNIDTGAGIERLVAILQDAPTNFDTDIFLKLIGIIEQHCKHKYDTNLYFKFDQKLNEAQSAFRIISDHFKAITFTIAEGVLPGPNERSYIVRRLLRRALLACKKLDLDLKFIDPMVDAIISVYGSYYQQLQGKNQVVQQAIWKEVTAFDKTINLGLMLFEKSIAHNALQPQVAFQLYETYGFPIEMIKELVDKRQLQVDWKAVEQLMEQHRLISKQNSNTLSFEKQNEHLVNFKTASEFLYEANEITAKVIGLFDEQYQPVQKLHNQSGYVVFDQTVLYATSGGQRYDEGYCINHSQNDQRVSFQGVFKGPNKQHFHFFLTGSFQLGDKVILVHDGKWRQLVKNNHSLEHLLHAALQNEIDPLIKQDGAFKSAQKATIDFNFSRALTWAELERVEHRIRQIIQQDIQREEIFTDLEGSQKLNAIAYFEEEYSNHELLRVIRFGDFSVELCGGTHVEHTGLIENCFITDYYARGTGRWRIEIISSNETIAAYLNEQNGKLSETINSLHNTLNNIANPALNKQKTALTKQLNHFHLPQVITDLRKCQALLNELKITVNELKTEDFKWKQKQLAEKIKQELLELAKQDKAYVLASFAAVDPKLLSQVAQAVLNQHKNKLFVLLNQFNNSPSFMLLGQDVSKCIQLLKAHFELKGGGSNNFFRGSFNESVDVSKLQAILDTLQ

SEQ ID NO: 64202 - protein, 252 aa, Mycoplasma pneumoniae
MRKKKFLSRFAFGSLFLLCGTILSACTGIQADLRNLIKEATGKDIDLSKSIKTTDGKKNIITSSKKSYEVNPKDTTKLLLEAWKQSFEEGKLGIAELAFDQATNPTKNSDFKMERKVEYFNMEYKSFSDFSVNARLSYIFNWYGSYFGEKSFTANNGGKHNFDLFLSIKSHSKKQFTEKSFIVKDENFQDQDKSQQIITEWIQLDLSLIWSLKGQDELSRKSLDKIFLKDYITYSANEKQINLFTYLQHLIK

SEQ ID NO: 64203 - protein, 760 aa, Mycoplasma pneumoniae
MVIKKGFFALSSCTLGLGLILTACGARGKFDQVDDGVIKLATSIQNKDSIAALNTIYKKYKERHPGSYPVQNFQVPGGYSGLRNDIRTRLSAKDGNNFYNIVLNYPDVVSSLATSDMQLILDNVDTKLLSKNFLSFNERIGGVRQKGIYAIPISLSTELMVLNGPVLHYILNSAKKKENGAQMIKRSGSFSTVQKGTMAIDMNDQKTKDLWQKIENAAKANGKTTSTQTSPQPKNAVSSLQLKQAAEGTSTDNSQDAENSDNEIKKTWGEYKEEGNHTLKGYTFKASVFENWNELLDFSTRVANSFPDKIKNQASKKATELQGVFGVDSVSGALFSATFAAGGGDYDKFFFNVKNGRGNFRNLLEKGSSYNNLQKVFNDYKQLISSNGLYINKGGAYSSNFLKFHQLAFSVGSSSGYHFAFAGESAKRLEFGQKAIEYPRDTYEIKAPTNSQNGNGTLLGSFTKSKSNGKEQSGQDEDNQTSETIELYKSSVPSGKEAGKNALAITNQQLISALENAAKDNKTSQPQARSLTASDQVQITQSSDKVIGYITTSNLDIDNNNTFDVGKLNGDKSTSKIIVNATLKTLNKINTLQSEEGIILPHPQKYKSTDPQAVATVQGPSIIGVHANAKENAETQKFINWFINQKETWPENSKGNKNGQNGQMTAAQYFAKSSGYVLPYSETFTKQSEDEHSTTKDAYKILKDVNDGKLVGYSDPSDFRSGKFRDTIVAAFSGAVSSKADFNKFFKGFEQQLGQEYRRG

SEQ ID NO: 64204 - protein, 84 aa, Mycoplasma pneumoniae
MQERDILLKIKEIAKAKNFKTELDESVLQKPFRELKIDSLDMFSVIVSLEKEFDIMFEDEKLMQLNNLAELIAEVKHLISQKGV

SEQ ID NO: 64205 - protein, 483 aa, Mycoplasma pneumoniae
MANKDQNLTLWYDQLLSKAQLVSYGDVKGTNCFLPNSWNLWLQIQRLYNNATALIKLKDKVILKQFIPIEPLPYTVEQVQLPTLSFYSEYQKEKRHVEGFNPELFLIEQIGTKKLHDPLVLRPTSEIAFCNLWKKQSFSYQNLPVIYNQWTCVFRAEKNTRPFLRNSEFYWQETHGLFSDGVNSESAAIAFWKLYQDIIVNQLCIPAFVGLKSPNERFAGAQNTWTVESIMPDGQALQCATSHDLGQTFTKPFGLTFQNQANQQAIPYSFSCGISTRILGALLLTHSDDFGLVLPWKVAPIQVKLYLFDKKGDTKTVELAQKVQTLLEQLAIRFQFIKVENQLGKQLGQGEVNGIPFQLIVDNPQTVNIFNRLTRVKTAYSFEQLASRFVELVQQYHQAMYDKAKAVVQQKVVQATTLKQIEQAFNDKKAVLCAVRLTDTLEQQLKERYQVTVRCCLEQLQKPQICPFSGESAQDYVLIARAY

SEQ ID NO: 64206 - protein, 733 aa, Mycoplasma pneumoniae
MFYNWLKLYKFSKMATLVEIERDFLQKTAQKFAPEVVALITKALDYSKKWHGEQKRLSGEPFFIHPLRTALRLVEWNMDSNTVCAGLLHDIIEDTQVTEADLTAIFGKEITDLVVKVTKITSESKKQRQLNRKKEDLNLKSLVNIAMSSQQEVNALVLKLADRLDNISSIEFLAVEKQKIIAKETLELYAKIAGRIGMYPVKTQLADLSFKVLDPKNFNNTLSKINQQKVFYDNEWGNFKKQLEEMLEQNQIEYRLESRIKGIYSTYQKLTFHEQNIAKIHDLFAIRLIVKSELDCYHLLGLIHLNFTVLMKHFKDYIASPKQNFYQSIHTTVRLKGLNVEIQIRTQRMDHVSKYGFASHWIYKEKKEGLLASALQVNYLNSKQMHSRDFFKRIFGTDIIKVNVSSDNEPNIVKKLNVESNSKLLDIAYELYPKQFNKLEKIKLDGVEVMSFDVTAENEMVIEFCFGKTNNLKRRWLRYMNNHVFRERVKKDLNKLKKAVKYSELPLYEKALEELHLKLADETQIKQRLNALGIKKLTEFLELIEYPHFPKNEHLYFLASNNQKWRELIKPIKFALSQAVFQNSYFEQIEGIYITKIVIETCCTKIPDMPEQVIGILMKNILRVHLHDCRELANQKQPKIIPLYWNAHQLKMRPRKFRCQINIRGVWSETTVNKIVQTIIEGDSYLERIIPKIDKQKDEFELNITMFIDNYHQLITIMEQITTKNISYVWKYL

SEQ ID NO: 64207 - protein, 358 aa, Mycoplasma pneumoniae
MAILIKNKVPTTLYQVYDNEGKLMDPNHKITLSNEQLKHAFYLMNLSRIMDKKMLVWQRAGKMLNFAPNLGEEALQVGMGMGLNENDWFCPTFRSGALMLYRGVKPEQLLLYWNGNENGSKIEAKYKTLPINITIGAQYSHAAGLGYMLHYKKLPNVAVTMIGDGGTAEGEFYEAMNIASIHKWNSVFCINNNQFAISTRTKLESAVSDLSTKAIAVNIPRIRVDGNDLIASYEAMHEAANYARSGNGPVLIEFFSWRQGPHTTSDDPSIYRTKEEEAEAMKSDPVKRLRNFLFDRGILTPQQEEEMVAKIEQEVQAAYEVMVSKTPVTLDEVFDYNYEKLTPDLARQKAEAKKYFKD

SEQ ID NO: 64208 - protein, 327 aa, Mycoplasma pneumoniae
MSKTIQANNIEALGNAMDLALERDPNVVLYGQDAGFEGGVFRATKGLQKKYGEERVWDCPIAEAAMAGIGVGAAIGGLKPIVEIQFSGFSFPAMFQIFTHAARIRNRSRGVYTCPIIVRMPMGGGIKALEHHSETLEAIYGQIAGLKTVMPSNPYDTKGLFLAAVESPDPVVFFEPKKLYRAFRQEIPADYYTVPIGQANLISQGNNLTIVSYGPTMFDLINMVYGGELKDKGIELIDLRTISPWDKETVFNSVKKTGRLLVVTEAAKTFTTSGEIIASVTEELFSYLKAAPQRVTGWDIVVPLARGEHYQFNLNARILEAVNQLLK

SEQ ID NO: 64209 - protein, 402 aa, Mycoplasma pneumoniae
MANEFKFTDVGEGLHEGKVTEILKKVGDTIKVDEALFVVETDKVTTELPSPYAGVITAITTNVGDVVHIGQVMAVIDDGAGAAAPAAPQPVSAPAPAPTPTFTPTPAPVTTEPVVEEAGASVVGEIKVSNSVFPIFGVQPSAPQPTPAPVVQPTSAPTPTPAPASAAAPSGEETIAITTMRKAIAEAMVKSHENIPATILTFYVNATKLKQYRESVNGLALSKYNMKISFFAFFVKAIVNALKKFPVFNGRYDKERNLIVLNKDVNVGIAVDTPDGLIVPNIKQAQTKSVVDIAKDIVDLANRARSKQIKLPDLSKGTISVTNFGSLGAAFGTPIIKHPEMCIVATGNMEERVVRAEGGVAVHTILPLTIAADHRWVDGADVGRFGKEIAKQIEELIDLEVA

SEQ ID NO: 64210 - protein, 457 aa, Mycoplasma pneumoniae
MNYDLIIIGAGPAGYVAAEYAGKHKLKTLVVEKEYFGGVCLNVGCIPTKTLLKRAKIVDYLRHAQDYGISINGQVALNWNQLLEQKGKVVSKLVGGVKAIIASAKAETVMGEAKVLDPNTVEVAGKTYTTKSIVVATGSRPRYLTLPGFAEARQNGFVIDSTQALSLEGVPRKLVVVGGGVIGIEFAFLYASLGSEVTILQGVDRILEIFDTEVSDLVAKLLQTKNVKIITNAQVTRANNNEVFYSQNGQEGSVVGDRILVSIGRIPNTECLDGLNLQRDERNRIVLNQDLQTSIPNIYIVGDANAQLMLAHFAYQQGRYAVNHILNKKQVKPAQKLTCPSCIYTNPEVASVGYTEMELKKQGIPYVKTNLVLAHCGKAIADNETNGFVKMMFDPQTGKILGCCIIAATASDMIAELALAMGAGLTVFDIANSISPHPTINEMIADVCKKALFDHFK

SEQ ID NO: 64211 - protein, 793 aa, Mycoplasma pneumoniae
MYNHNLLEEKWLQLWKTKQVNRFFDDKTKPKYYILDMFPYPSAAGLHLGHVRAYTITDVLSRYHKAKGFNVIHPIGFDAFGLPAEQYAIASNKHPGDWTDKNITNFIEQLTAFGFDYDYQLSLKTTDPRYYQYTQWIFGQLFEAGLAEVKEIDVNWCAELGTVLANEEVLIDSNGNAVSERGEFPVTKRKMKQWVLKITAFAESLLNGLAELDWHQSIKEMQTNWIGKSEGVEVTFDIENSKETITIFTTKVQTIFGVTFLALSNSHPLVKEVAKTNPKIAQFLQKQAQKTTTVKQPETLHDGVDLKLKAINPATNTAIPLYVANYVVEGYGTDAVMGVPAHNENDNFFARKQKLPIITVIDKQERLQHSGQFSGLNSQTANTQITQMLVERQKAKKTTVYKLRDWIFSRQRYWGEPFPILFDENNQPHLVKELPVTLPALANYQPDGSTNPPLWRNQEWAKVKQGNQTFTRETSTMPQWAGSCWYYLGYLMLINNENFWPIDSREAKDLFERYLPVDLYVGGAEHAVLHLLYARFWHQFLYQKGIVTTKEPFKKLINQGMVLGPDGKKMSKSKGNTINPTPLIDSHGADALRLYLMFMGPISAALTWLDDGLNGMRRWLDRVHNFFHKENIIKETVDQETVYGYNLFLKRSFEHLEKQELNLVISQMMIFLNLLYKTKQLTLAYAKGFLTVLSFFAPYLAEELNAKLGMEPFIVHAQLPNVDNSVLETDKVKIILSVNGRFKGTKEFAKGVDEQTVLKAFKTDPEFQALFDQPLARVVFVPNRIINVLLKSE

SEQ ID NO: 64212 - protein, 277 aa, Mycoplasma pneumoniae
MPELPEVATVITELKSCVLNKPVKQVKVHLDKVLKNTNVKQLNDALVNHSFVDIKRRGKYIIFCLSNGLFLVSHLRMEGKYFFEAKGSQFDLNHVLVEFLFQDGDQLNYHDTRQFGTFHLFNRYQFENARELNKLALDPLDQEFNHQAIFNKGHKSNKKIKTFILDQTNISGIGNIYADEILFASKIHPETLAKNLNLSQYQLICQNATDILKKAVEMKGTTIGTFTFKKDHTGGYQHFLKIHGKKGKQCQSCNTTIIKKKINGRGSYICEKCQIQR

SEQ ID NO: 64213 - protein, 291 aa, Mycoplasma pneumoniae
MKNAILIDGNSLAYRAYFATWQQVEFAKLHNLPFNNAIRTMLMMCWNLLQSKQYDYGVISFDTKAPTFRDQLYSEYKSKRSKTPSELLVQIPVVKESLRHLGFLVCEQDGFEADDLIGSYARLMTQNNVAVDIYSSDRDLLQLVDSMTSVWLCVKGTKEMKEYNTDNFAEQFFGLTPKQVIEYKGLVGDNSDNLTGIKGIGPKKGIDLLKQYGTIDNIFANFDKLSKALQTILQGQIDTAKKFSFLASIKTDIKLNDDIVHAALKPIDKQALLELLDKYGIKALAQKFSQL

SEQ ID NO: 64214 - protein, 872 aa, Mycoplasma pneumoniae
MFVNLHTNSYYNFLNSTLSPQKLVDLAVQDQQVAVCLTDPNLFGATEFFLACQKAHIKPLIGLSVTVRHYEQNVNLLVIAQTNRGYQNLMCLALVKDQPDLQLEPFLDGNVVIICTQTELRLNTANPVYLAHGLSGRYPKIAVTQKPVKCQNTNKDLTLLLTLKQISQINSEHFQPLEWKLSRSLNEIQLDPPLLQQLRHQPFLSQKAAQQIFSEEELGNLQKLVEQSQWDLTKLKASSLQVSHNDAQMLSEQCQLALTEFLKLNPQLNKQLYEERLAKELEIINSLHFASYFLVVSDLVQFAHNNDILIGPGRGSAVGSLVAFLLKITQIDPVANNLIFERFISRHRQGLPDIDIDIMETKRDLVIDYVMQKYGREQCAQIVTFQKFKTRSALRDVGKVFNHIEGAEDLLGKLPKDKSLLELDVNGVTDPVLQLSLKSFRLLWEVAREIINFPRQPSIHASGVVIVTEPLITTIPLMVGNNNNYVTQVSMDWLEWYNLNKFDLLGLINLTMIHEVVQAVKPKEVSVQQFLQQIPLDDEATFTNLTNQATLGVFQLESFGMKKVLKQIKPHNLHDLAIVLALYRPGPQDNINTFIANRNLGFDTSDIDPRILPILKETYGVLIFQEQVINIAKTVANYSLETADSFRRAISKKNLQVIQDNMRSFYEGALANNFSLKAATTIFNYIQRFAGYGFNLSHALGYALLSYWTAWLKTHYFEQFNLWWLNHEQGKKEKQKQLLNEFISSGYEICPPLINKAKSDFSVQDKKLYLGFKLINGIGDKQAHALEHVQEVLKQNPNLSLIATVNLCLSKTVGGLELKDITLLQQAGCFNCFNYTVDFNLAKSFWVQSNHELFPKIPLDQPPVINWKSFGF

SEQ ID NO: 64215 - protein, 359 aa, Mycoplasma pneumoniae
MEFDKQFFSSVEKIVELAEQLEKDLNKPDLTFEQIKAINKELKHKQPLVVKFKEFKRLIDQALEAEAILENNELKELHDEAKKELERVRSVVPEYEEALKLLLLPIDENNQKNVIVELRPAAGGDESCIFLADLFNMYRNFCSNKGWKLQINEMIPSSVGLNFVSFEVNGVDVFAKLKFESGVHRVQRVPATESKGRVHTSTVTVAVLPQLEAVEVHINPADLRVDTYRASGAGGQHVNRTESAVRITHLPTGIVVSCQEGKSQFTNRDTAMKMLRAKLWEKAQNEQLSTQAGLRKSQVGSGDRAEKIRTYNYPQNRVTDHRIKLTVNKLNTIILGDLDEIIEALQADEKKQQLENFFS

SEQ ID NO: 64216 - protein, 97 aa, Mycoplasma pneumoniae
MKKDFHFPSQSVSFKCASCSNSFTIESTLKQKEITIDICGKCHPFYIGELTKQTVHGRAEKLSGKFNAGKAFLENKTPKKAKGKTEEYTKHRSLNEL

SEQ ID NO: 64217 - protein, 658 aa, Mycoplasma pneumoniae
MAKVAQIRAIVEQLKRYDYHYYVLDDPLVSDFEYDQLYKQLQALEQAHPELIQPDSPTQRVGGIVVEAFNKFPHQNPMLSLDNAFDTATIASFIANINNLTGVQNRFVVEPKIDGVSISLTYENGLLTRALTRGDGLVGEDVLSNVKTIKSIPLTIPFHKQVEIRGEIFVDKKTFAQINENLAKPFANARNLAAGTLRNLNSEVSAKRKLKAFFYFVPNALTLGCRSQSAVLAQLKQWNFPVSKAVASFDRPEALIEYLEQFDQTRDQLNFQVDGLVVKLDNFHFYDQLGFTSKFPRWALAYKFKPKFVQTKLRGVLVTVGRTGKINYTAQLDPVNLEGTVVSAATLHNFDYIKEKDIRLNDTVIIYKAGEIIPKVLEVCLPLRTAANQPIPEQTHCPACQAPLVQYKDEVDQYCTNERCDQRNLEAINYFVSKTAMDIQGLSIQTISKLYENNLVRSVVDLYHLKEHKAAVLALELKIGEVLFNKLISSIEQSKTKGMARLLTGLGIKHVGQVLAKSLTKHFENIDALQSASMETLLELPDVGPTVAESLFNWFHNDNNLQLLAALKAVGVQMDALKSNTNFDTASIYFQKSFVITGSFPISRDTIKNLLVNKYDCRFTNNVTSKVDFVLAGIKATPRKLEQAKALNIPIINEPIWT

SEQ ID NO: 64218 - protein, 437 aa, Mycoplasma pneumoniae
MNQFEPKFTLIDTVSNQSVVLEQKQINIYLCGPTVYNDLHLGNTRPLIVFDVLQRVLQAAQYKVQFVQNITDIDDKIIKIAQQQEISEAQLCKQQITAYKSLLKKLNILPIKHLQVTDKIDKMPGYIARLVKKGFAYVSPLGNTYFSVSQLPQYGILANRVVETIEDEATDKRNKLDFVLWKQTTAGVKWNSPWGWGRPGWHVECAFLIDYSFKDQLTIHGGGVDLKFPHHENENAMHMALYDKPLTQHWMHIGHLMFENQKMSKSLQNFLLAVDFLTIHDFRILRWLFYQKHYYHPLDLSQSLIEQACSDIKRIQKAVNVCRTWFVYSEQSAIPAPKQFEPVFKALLNNLNFANAITHIWKLVKQINHDVSKQNLSGLKEHLSHLEWALNILGIGFKSIHTKLNVQLIKKWASLRKNGQLDKADEVRQKLIKKGLL

SEQ ID NO: 64219 - protein, 449 aa, Mycoplasma pneumoniae
MAQVYSQEVYVQYLKRYGFVFQSSELYNGLANSWDFGPLGAVLKQQIKTALYNFFIKNKRDVLLIDTPIILNEQIWKASGHLANFTDALVDCKSCKLRFRVDHLDEQIKSATQWNPKQVNCPNCKANNWSEVRDFNLLFQTEIGVVNSEKRLVYLRPETAQGIFINFKQLLQLKKRPLPFGVAQFGKSFRNEVTPGNFLFRVREFEQFEMEWFCNPQASLSVFESQQQAIAHFLFKVLQLNPALVKQYEYDKNELAHYANKTVDFLFQFPHGLRELWGLADRGTFDLEQHQKYAKKPLDFFDGENNEHFIPAVVEPSVGIERLFYALIVSSYQQEQLEGEMREVLRLPFHLCPEQIVVLPLVNKLKETAQTLFEALSQTHWRIGFESAGSIGKRYRKADAIGTKFAITFDFESLEDQAVTIRERDSLKQVRVPIKELKAWFAQHDDQSH

SEQ ID NO: 64220 - protein, 620 aa, Mycoplasma pneumoniae
MTSPTSLDQLKQQIKIAPIVEHYAIKLKKKGKDFVALCPFHADQNPSMTVSVAKNIFKCFSCQVGGDGIAFIQKIDQVDWKTALNKALSILNLDSQYAVNFYLKEVDPKLKRYWDLHSALVDYYQTRLKLEPKEQGLTYLTETRKLSPQVIERFQLGLAFTLEDQYFLPSLLNYPWISPAIEKAELCFATEKFPEALGFFNQQTHYATFKSRIMIPIHDLKGNPVGFSGRALQKTEKIKYKNSAEHQWFKKSELLFNFHRIDKNTLKLYLVEGYFDVFALTSAGIGDVVGLMGLALSESHIIAFQQQLKALETVVLALDNDTAGHDATFKLLQELNAHGIIVEVVDWNQAAYKDWDELFLAEGSDAVKAKTHRVLNLVEYLVAYFKTKGFDERITVNKVIDIIAQNQKVTADTSFSRFLCQKLQQLLQYSDVETLFTQLQQQKLKVKVNKTTTFTQRAPIYESVVGVVDNSFRNESQPVAITKEFLVENNWKETKERVFHAEIFAYVLLDKQFLVELKQSDLDELFASLQTPLFDVALFIDKARLYWAKVQEPDWAVFNSILGEQQAMFPTTFLAQIKEFFLNKSLSYDPEDYEEDLQFFRQLIVKQKELLKYFKSMVEH

SEQ ID NO: 64221 - protein, 499 aa, Mycoplasma pneumoniae
MSSPKKNFKKPQPKTENQKQALNEERIAELKKSRILGKNRPFKKMIYVDTKAQRKQKHENVAFLKTLQENKESDVPKKRRGRKPKHAPLKEKNNLKLFDILEGSLKSHTENDDTNKVISLLVEVWEKKNKKKDNNSLSNKDIVNVLSKFELPDDEIIFVLDELRDKGIELPHDVEEHIHEFRANQDLSIIDEDIEELTTKNISNRDKVDDNVRFFLGSLDSSKMLDFESEQRIAKVLNSTDEESRKYAINQLVTSNLRLVVSIAKKHLERGLDFNDLIQEGNLGLLKAISKFNWSLGNKFSTYATWWIKQAITRAIADQARTVRIPVHMVETINRLAKAERALNQELGREPTAEELAEKMGGQAEGFTVKKIAEIKRLSLDPVSLDKTVGHDEESQFGDFVRDTDAQMPDEFTESRSNYEKIDELLNNCLSEQEELIVRMRIGMPPYNETKTLDEVSQKIKIPREKIRQIETKAIRKLRQAVRNNHMSLSFMRGNEKKD

SEQ ID NO: 64222 - protein, 239 aa, Mycoplasma pneumoniae
MNAASAIALLIVFSLVIGYLMGSVMFADVFGKILNKDVRKLGSKNPGATNSIRVFGLKIGFLVGLCDALKGFLAFVFSFLIFSFWLQQYLNVNQYQKVYYLTYLSCFAATIGHIFPLYFKFKGGKAIATTGGSLLAISLWWFVICLVLWLLVTLITKYVSLASLVTFFILAIIILVPWLDYLYFFKPNPINAISYQNDWYIILFFVLWYWPLTIAVFWLHRKNIHRLLNKTENKVTQLN

SEQ ID NO: 64223 - protein, 281 aa, Mycoplasma pneumoniae
MMNSIKFIFLGDVYGKAGRNIIKNNLAQLKSKYQADLVIVNAENTTHGKGLSLKHYEFLKEAGVNYITMGNHTWFQKLDLAVVINKKDLVRPLNLDTSFAFHNLGQGSLVFEFNKAKIRITNLLGTSVPLPFKTTNPFKVLKELILKRDCDLHIVDFHAETTSEKNAFCMAFDGYVTTIFGTHTHVPSADLRITPKGSAYITDVGMCGPGFGSVIGANPEQSIRLFCAGSREHFEVSKCGAQLNGVFFEVDVNTKKVIKTEAIRIVEDDPRYLKQDYFNLI

SEQ ID NO: 64224 - protein, 164 aa, Mycoplasma pneumoniae
MDKNALRKQILQKRMALSTIEKSHLDQKINQKLVAFLTPKPCIKTIALYEPIKNEVTFVDFFFEFLKINQIRAVYPKVISDTEIIFIDQETNTFEPNQIDCFLIPLVGFNKDNYRLGFGKGYYDRYLMQLTRQQPKIGIAYSFQKGDFLADPWDVQLDLIINDE

SEQ ID NO: 64225 - protein, 206 aa, Mycoplasma pneumoniae
MRWSDSENNKIDYIEDFATHFLNKNALLNVICKFCVFRSNSDLWVMRPYQICATERILEKIKEDNRNSKNSKNASKGGCIWHSTGSGKTLTSFKAVQLASEIDFVDKVLFVVDRKDLDNQTIEEYEKFQAGSVSETENTNDLKEKILDDSTATRAIVTTIHKLKRLIDQRSKLKDEDLKKKNIVLIFDECHRSQFGKMKQEIDEFF

SEQ ID NO: 64226 - protein, 543 aa, Mycoplasma pneumoniae
MEKKRTEQRNGVEKKIWEIADKLRGTIDGWDFKSYVLIGLFYRFLSENLCKYFNDSERRNNPDFSYENLTDDYEAIDALKDAAIASKGFFIKPSQLFQNVVKSIRENKNNEDLNTTLRDIFDDIEKSTELGDGRSKESFKGLFKDFNVSEVKLGSTLTIRTEKLKELLTSIDTMELDEFEKNSIDAFGDAYEFLISMYAQNAGKSGGEFFTPQDISELLARIAIGKKDTVDDVYDMACGSGSLLLQVIKVLGKEKTSLVSYYGQEINHTTYNLCRMNMILHNIDYANFNIINADTLTTKEWEKHYVNCSNENGFEVVVSNPPYSISWAGDKKSNLVSDVRFKDAGTLAPNSKADLAFVLHALYVLGQEGTAAIVCFPGILYREGKEQTIRKYLVDQNFVDAVIQLPSNLFSTTSIATSILVLKKNRDKKDPIFFIDGSNEFVREKKNNRLSPKNIEKIVDCFNSKKEEANFAKSVERDKIRESNYDLTVGKYVNSEAEKEELDIKVLNHSIDEIVDKQKDLRTKIKDIIQDIKVDFDNIDINN

SEQ ID NO: 64227 - protein, 715 aa, Mycoplasma pneumoniae
MAFNISTQLNKEQRAAVTCGKGVNIVYSGAGTGKTTIISQRFAYLFNQKRINPSNILALTYTRKAASEMKQRILELLPEKYHKDVNIYTFHSFCSRFLREEGQKNFVIDDDLSNFLKDFLKESELKSQKVLQIIDGFKNAYFDFDTNSLKDDERLVELCEFHLDPQERNFQLFKETAIAAFVEYEKGKQQNNKIDFADLLIKTCTLLSKDHKLLRKWSKKFQYILGDEFQDTNQIQYELIKMLASHHQNLFLVGDNNQMIYRWRGAVSDIIDSLKSDFKVRPENEFYITQNYRCDQNILTVANSILGTIYAKENQPDSTKGFLFSAIKSNRLPVYFQASSVEGQHSWIINKIKNLHKNHGIQYKDMAILFRTNRNMDSMTEALEADGSIPLKQNKGFFKQLETFKKVLVALITRSNYDIKLALKSLRVWPNVLNKSLTVNEQVNLDKILQNLEQAIFLDEHTRGELTEAAKVFTRLIKFVEEQQFEALLAFTFEALNTDQFVCNFIFRTLQKLQTENKNFTITDFINELRFQQDELKQSKDNVINLITVHSAKGLEFEAVFIYGINQDNFPLKSKNQIIDLQRELDELRLFYVALTRAKKYLFLLSVYQMSGEIIYPSKFIRFINKEDRLEIATINHKVHQDDEFFDSSKTEDYQKKYLTENTDFVNGDSVSHRTYGKGVVVEVREDAVCVAFKNSKYGQRWIVKNHRDLVKAVY

SEQ ID NO: 64228 - protein, 529 aa, Mycoplasma pneumoniae
MEHLNQEQKAAVTCDNGVNVVYSGAGTGKTTVIAERFAYLVNEKGVNPQSILAFTFTDKAASEMRQRIIKLIPQKSLQDLHIYTFHSFANRFLQKHGKSDFAILSDSNRFFSDYEMGDQLQTVVEIYKNKVVDLELDNLEYNSAFRDACTDTFNEDFSTISNGQFRKRAATALRAYQNYLITNNLFDFSDLIIETCHLLKGNSELLQAFTESVHYILVDEFQDTNLAQYELVKLLATTHPNLFLVGDSNQMIYGWRGAVVEIFELLKNDFQAVKEFYTTQNYRSIQAVLAVANDVLTAIARKERKALVLLHSSIDSKAVPVHYKANSLKNQDQWIIYQMKQLHLNNGVPYDQMAVLFRKNKHLDAFSQTVLEDGDLPLAKLNLLTIHAAKGLEFEAVFVYGLVERAFPSLHWDGSDKHKLLEEMKLFYVAITRAKQFLFLVSVSVESFNAYYEPSRFLKLIEKEHLQTQKAAYFKEQLKTQPKPVNLYTETENAENLQKATDSKKWIILGAILLIIVIITAVLKLFVEN

SEQ ID NO: 64229 - protein, 291 aa, Mycoplasma pneumoniae
MLRVALKALPQMAVSNFDIKAQNGFSFNTVQHFKQRFPNAELYFLIGSDKLSELAKWHNIEQLQKLCRFVCYERFGYPIDEQLVQQFNVRLLGKCPLDLASSEMFGSHKFRQIPAKVLHYIHQHNIYLKTILQTLLDEPRMQHCLRVGQLAKTLAVANKLDGKTAYTAGAYHDLAKQLPQAQLEKLAKVAGVNDYPSWKVLHSYAGAYILKHWYGLNNSAVFSAIWNHTVPPQKMSQLDMIIYLADKLEPMRVHEEWAKGIDITALVKLAKKDLKLAYQITLKYVRSLQKN

SEQ ID NO: 64230 - protein, 326 aa, Mycoplasma pneumoniae
MSVTPIVEVKHLEKEFGFWRKNRILKDVNFAIMPGEFHAFIGQNGAGKTTTIKCLISSYQRFKDEINIDGISNKNAKSKGVISYIPEYAVFPKHLNTHEYLYTLGKLSGCSLQTIKEKVDYWLARFQIEHLRFKKPNDFSSGQKKKVLLIQALFNDPKLLIMDEPTANLDPKTRNEFMDVCYELNVRNKMAVFVSSHILAELENYCDSLTVIHEGEILFNGKTKNIAKDNFGYRLKVNNSDSLRKWLKAQKIAYKYFPATDDFQVDLKQKQSNKFAVELYQQPDFEVFIFARQGNSLQNIYNNLIEQYEYDQVQRAVAIREQDEAV

SEQ ID NO: 64231 - protein, 795 aa, Mycoplasma pneumoniae
MPAVKKPQILVVRNQVIFPYNGFELDVGRERSKKLIKALKNLKTKRLVLVTQKNSDQLNPEFDDIYHCGTLCDIDEIIEVPSEDGKTADYKIKGKGLQRVAITSFSDADLTKYDHHFLNSTLTENKALDKLLERIFPDKEDFAEILDSLNSFLELQELKKLSKVPKDIKRYDIITFKLASLIFKDITLQQAILEENDIEKRLQKIIGSGIEDLGHISEEARAKQRESEFDKIDNRITRKVNEQLSRQQRDFYLREKLRVIREEIGMTSKKEDEVSNIRKKLEENPYPEHIKKRILSELDHFENSSSSSQESTLTKTYIDTLMNLPWWQESKDNADVKNLIKILNKNHSGLDKVKERVVEYLAVQLRTKKLKGPIMCLVGPPGVGKSSLAKSIAEALNKCFVKVSLGGVHDESEIRGHRKTYLGSMPGRILKGMVRAKVINPLFLLDEIDKMTSSNQGYPSGALLEVLDPELNNKFSDNYVEEDYDLSKVMFVATANYIEDIPEALLDRMEVIELTSYTEQEKLQITKSHLVKRCLDDAEIKTDDLKFTDEGISYIIKFYTREAGVRQLERLIQQIVRKYIVNLQKTGEQQVVVDVDLVKKYLKKEIFDYTVRDEDALPGIVNGMAYTPTGGDLLPIEVTHVAGKGDLILTGNLKQTMRESASVALGYVKANAQSFNINPNLFKKVDINIHVPGGGIPKDGPSAGAALVTAIISSLTGKKVDPKIAMTGEITLRGKVMTIGGVKEKTISAYRGGVRTIFMPEKNERYLDEVPKDIVKDLEIILVKEYKDIYNKIFN

SEQ ID NO: 64232 - protein, 286 aa, Mycoplasma pneumoniae
MPKLLGSFISFKSPHYLVGSVRDAVSIKAQAFMIFLGAPHTALRVDPNRMQIDEGHTLMEQHNLSKSGMVVHAPYIINCASKDPVKQTFAIDVLTREVKLCHAVGAKLIVLHPGSAVEQTQTQALDHLIKVLNTVIANTKEVIICLETMAGKGNEIGRDLDQLKYVINHIEQQERIGVCLDTCHFHDSGNDFNNTAEIMETIDTKLGFEFLKVIHLNESKNVCGSKKDRHANLGEGMIGFDNLMRFIAQPQIKQIPIVLETPSDKHNYPAVYGAEIERIRAWFGAR

SEQ ID NO: 64233 - protein, 104 aa, Mycoplasma pneumoniae
MNNKYFLTKIDLQFFASKKGVGSTKNGRDSHAKRLGAKKADGQMIRTGQIIYRQRGTRVYPGVNVGLGSDDTLFALSDGLVKYQKFGPKQGKTRVSVVKHKLDA

SEQ ID NO: 64234 - protein, 100 aa, Mycoplasma pneumoniae
MIKLTVSHHKLTASGHALFAKKGQDIVCAAVSGIIFGALPWFETNSIAVQEDATVPSLSLELVQPTAKLITGLSVVIMQLKTLAHSYPQFISFEDQRKDE

SEQ ID NO: 64235 - protein, 100 aa, Mycoplasma pneumoniae
MHAIVVCGSKQYLVHENDTFFVEKLEAPVGKEIQLDKVLMLDEKIGAPYLEKARVVCVVEKHGLQRKVNVIKHISQKHHLKKYGHRQPYTKLKVVRFVHD

SEQ ID NO: 64236 - protein, 721 aa, Mycoplasma pneumoniae
MSVKEKIPAFNTQEDLESYISLNAYTKVYGDFKMDLHAVEAYIQEHVKPKTKVFHSTKERLDFLVKNDYYDENIINMYSFEQFEEITRKAYAYRFRYANFMGAFKFYNAYALKTFDGKWYLENYEDRVVMNVLFLANGNYNKALKLLKQIITNRFQPATPTFLNAGRKKRGEFVSCYLLRIEDNMESIGRAITTTLQLSKRDGGVALLLTNIRESGAPIKKIENQSSGIIPIMKLLEDSFSYANQLGQRQGAGAVYLHAHHPDVMQFLDTKRENADEKIRIKSLSLGLVIPDITFTLAKNNEEMALFSPYDVYEEYGKPLSDISVTEMYYELLANQRIKKTFINARKFFQTVAELHFESGYPYILFDDTVNRRNAHPNRIVMSNLCSEIVQPSTPSEFHHDLAFKKVGNDISCNLGSLNIAKAMESGPEFSELVKLAIESLDLVSRVSNLETAPSIQKGNSENHALGLGAMNLHGFLATNQIYYNSPEAIDFTNIFFYTVAYHAFKASSELALEKGKFKNFENTKFADGSYFDKYIKVEPDFWTPKTERVKALFQKYQVEIPTRENWKELALNIQKNGLANSHLLAIAPTGSISYLSSCTPSLQPVVSPVEVRKEGRLGRIYVPAYQLNKDSYPFYKDGAYELGPEPIINIAAAAQQHVDQAISLTLFMTDKATTRDLNKAYIYAFKKGCSSIYYVRVRQEVLEDSEDHTIQMQQCEACVI

SEQ ID NO: 64237 - protein, 153 aa, Mycoplasma pneumoniae
MHKDIKIVDASAIVKPTGTPYVVYFSSISNNTHRFIEKLEFEHTRIPVNLDEQIEVNQEYVLFCPTYSGGGEYTSGAVPKQVIHFLNNKHNRDLCRGVISSGNTNFGNTFAIAGPILSKKLNVPLLYQFELLGTKNDVEQVQTIITNFFGKAK

SEQ ID NO: 64238 - protein, 339 aa, Mycoplasma pneumoniae
MANTKKYFLESVSPLEYAQKKFQGNLRSVNWNLVDDEKDLEVWNRITQNFWLPEKIPVSNDIPSWKQLSKEWQDLITKTFTGLTLLDTIQATIGDIKQIDYALTDHEQVIYANFAFMVGVHARSYGTIFSTLCTSEQITEAHEWVVKTESLQKRAKALIPYYTGKDPLKSKVAAALMPGFLLYGGFYLPFYLSSRKQLPNTSDIIRLILRDKVIHNYYSGYKFQRKVEKMSKEKQAEMKRFVFDLMYELIELEKAYLKELYEGFGIVEDAIKFSIYNAGKFLQNLGYDSPFTEEETRIKPEIFAQLSARADENHDFFSGNGSSYVMGISEETEDKDWDF

SEQ ID NO: 64239 - protein, 160 aa, Mycoplasma pneumoniae
MVKAIWAMDQNGLIGNGNSLPWRIKAELQHFRQTTLHQDVLMGSATYLSLPPVFSERNVYILTRNLNFNPPDKGCLTKVIHEYENFIQPYLHHPDKHLYICGGAQVYEQLIPRCDALIVSTIFGKYTGDKYLKVDFSPFELTKEISFAEFKVAYYHKIAR

SEQ ID NO: 64240 - protein, 328 aa, Mycoplasma pneumoniae
MSFKITVLSYCKNSFKKVIRLFCKLKKRFLYNATPSKFRRVMQQYLDLARYVLEHGKYRPNRTDTAGIGVFGYQMHFDISKHFPLLTTKKVHWKSIVHELLWFIKGDTNIKYLVDNKVNIWNEWPYESFKKSPHFNGESQKEFIERIRQDAKFAQQFGNLGPVYGKQWRDFNGVDQLKKVIAQIKVNPFSRRLIVSSWNPNEVDQMLLPPCHSLYQFYVQDGQLSCQLYQRSGDIFLGIPFNIASYSLLVYLVAKETNLKPGSFVHTIGDAHIYENHLEQIKLQLTRQPKPLPKVVLKSDKSIFDYQFDDIELVDYDHHPTIKGEVAV

SEQ ID NO: 64241 - protein, 503 aa, Mycoplasma pneumoniae
MSHQEQLHKPNRQQFSEKQFIAFAFNYVAGFGFISVVLTMFKLGPFSYLILGLAALGILGVMLSFSRLSIICGSKAYGGSYLIAKKALGVKTITARFFTFLSGWNVSLTGPFNGLIVPAVLVLSFADIKAVKDNNGALIGLLVGGFVLFGALNFISLFGLKMNKNAILFFAIVKWVVVLGGLILGIYLIGTNHGHGFVENNTLGEHIEDLSFLKVISTTVGMLVAFAGTEDLTAITPDVKSKNIRKCFLLMFGAVTLLYLIGFVIISGISGLNGYGLDGKEKNEKAINTFGSIYFQAGGKYLGIPLLVIFGLGFLLNSLASRLGMTITTARKYVALAQDGFLPSFINEQNKHHEYHKAVWASNIMTLAVMVLMIIVPFLPNDENPGKQLVMFDAISVLVEVAIELAVLISLIQYFITYIFFFMILAKKEGSASVSWWEIASYGVSFAIITVLLFVNLFPITAWKNTNTFKLSILAAFFALGIGFFIHSEIKHKGQLVKSVECN

SEQ ID NO: 64242 - protein, 380 aa, Mycoplasma pneumoniae
MDWIQTAGAGTQLPENNIKIAVFGIGGAGNNIIDDMLRMHPELQTANVQFFALNTDLQHLKTKRYVQNKAVIQFEESKGLGVGGDPQKGAVLAHHFLEQFHKLSDSFDFCILVAGFGKGTGTGATPVFSKFLSNKGVLNLSIVSYPAMCEGLKAREKAAKGLERLNQATDSFMLFRNDRCTDGIYQLANVAIVKTIKNIIELINLPLQQNIDFEDIRSFFKKPAQRLENEANLFRVTNTFTFSFDAHNTIEHFSHKLKNFEYEGFFDHKVEGAQKVILKVLVNQGLYPLDLTQIQEIIWAKIDNHNLEVQLGVDFTDANPSVQLFFLMEKKQAVSSDFIQKPAFISVKEVNQKPAKPFQVLNDLKELGLKYVKQQTGFNY

SEQ ID NO: 64243 - protein, 308 aa, Mycoplasma pneumoniae
MLSNQPHKSVLLDEVIHNLNIKGDGNYLDLTVGFGGHSQHILEQLTTGTLTGNDMDKDSITFCTELFKDKKNVVLVHDNFANFFNHLKQLKVTKFDGILIDLGVSSYQLDKPERGFSFKHAGPFDMRMHQSDRVPTALDILERLSEEELTHVLKKFGEIAHPKPIAKALKTLINNTKNPTTVEVAETVKAAASNFEKYKSRNYLAKVFQAIRIYLNRELESLEIVLQHIPKLLNNKGRFLVIVFHSLEEKLVRNYIFKLTHFVQPPELPVKLTPPFELITKKPILPTEQEIKTNPRVRSAKLFVIEKK

SEQ ID NO: 64244 - protein, 141 aa, Mycoplasma pneumoniae
MLLGTFNITLDAKNRISLPAKLRAFFEGSIVINRGFENCLEVRKPQDFQKYFEQFNSFPSTQKDTRTLKRLIFANANFVDVDTAGRVLIPNNLINDAKLDKEIVLIGQFDHLEIWDKKLYEDYLANSESLETVAERMKDVK

SEQ ID NO: 64245 - protein, 1818 aa, Mycoplasma pneumoniae
MNDTDKKFPLQPVYDTGFDDGYLQRDYEKCLESAAANDAQTVELQTQLLAEIKNLENEIKALKAQESRQPDPHNNARIQSLEASLNRLVNEYNNFEFQKNYMVDRVAELNNKARFFKDELKRLQQENAAFVNSRYANWADFQSNYQLKLDQFQALIDQQNQTIKQLNEQIAANQGLIDQNVQRLQQNHSLDQQERDALLYEVDHLYNELYELENQKRLVGIEYEATYQDLVSADAELQNVYETIAQNQANFQKQCDAYWAQLKQVEQQIQTTKQELVDEESTLKVRLNDADFYINSRLAELDDLTSKINERDFVSKEQAQDVKASLANLTKEKERLSAEKDSFERLRNTALNDINRMEQENALFAKHLEQQQYEFERKQQESLLKLETEHKQLQKRIGEFKIESEAKSEALLIQERELLEKRREIDDLLTQASLEYEQQRRTNQVLKEKHRQVQQHFQNLVHAKKKLDQKRHYLAEQKRIDEEQIFKLKEKIATERRELEKLYLVKKQKQDQKENDLLIFEKQLRQYQADFENEIEEKQNELFASQKSLQKSFTQLKNKEAELNQKAQKIAEDWAHLKQNKHHHADLEIFLEGEFNHLQQEKHKLLEARTQFDNRVSLLSARFKQKQAELVKQKQSLEQLTAAFNKEQEAVERDWKDRLANLEKQKEMLGDKVHQFDENSLNISKKLAERELAIKFKEKELEAAQKQLSLDNNNNAGLKLQLDKLSESLKTERLELEASKERILDFYDESSRRIADYESDLQARLAEVKTLEKNQQETAAKSERELKVALEKLNQAKKAFLQIRKQQLLEIASVKQQLAQKANLLKNQQAELDKQTEELEAAFLEQDTDKKELEKALHSVKSKQELLERERSFLLQKQREFAEHVAGFKRQVHFKTTQMQRLSEFNKQQQSEQIKRETELKIAFADLKKDYQLFELQKNQEFQQIEQKHKELELLAQKQAELKQELEQKATALASQDQDTVQAKLDLARQQHELELRQNAFNQASLSLNKQREQLTNQVKVLHGELKKRHEKLTLKDRLLAEKEKDQHKKDAEINQRFKQFENEYADFDQAKKRELQELNQIRRNLEQSNASLLKKRNQLTLDFALLRKVQHNTQTNRVQLNTQIKEFLLEKKNFQKASDEAALQKALLIKRLRSFASKLQLQREALAIQKLEFDKRDEQQKSEINNAKLQLEQFKLEKQNFDEAKQKQLIEFKDQCQRLDVEKRLLKQKLVQLKNLSKSYLTYKNRADLSQQQLQHKYANLLELKEKLQTAKRALDKKHRAIYGKMAQFVSELRQEKKQLLSAQKQVDDKSRLLEQNQRHLQNLSSETKKKRQSLEHDINKFDQRRKEAVSSILNSHKKLKQKEGELQGILQKLSLKKTQIEQEFSKLYQQREKLDRQRTTLSKLHRELKAQNEATAHKNREVLEIENYYKKELQRLTTEKSEFDNNKNRLFEYFRKIRNEIEKKEAHIKTVLEETQKKRHLVETEAVKLHLQKQSIISKGQELKEIKERVSRDISHTNKQREELNSLLHQNKLLQKNLAEREREINNKDSLLTQKIQTAKQKLSEKEARILKLLEKMRAVEQQYQAEITRLKTRNADLEKNDNKHLFPPLFKINGNDMNYPYPYPWFYPQQKQEDSSNQIRHLFEQQLQFMQQRYENELTELRRQRALLEKKLDQIQLESQLSAKKNDFEKVEQMMQKLLEKTEQKLSAFDQKINALAEQINTQKAEHADSEKQQLLLRIEQLEKQNLAQAVQTPQPVQPVVQAPAVVPQVIQPQVVQSQPAFLATQQSISKQQQIAQLNAEINSIKKLIAQKAAK

SEQ ID NO: 64246 - protein, 565 aa, Mycoplasma pneumoniae
MKQQKPKISFIAAMLIVIGSSIGAGIFFKSSTVLENSQASLVLAIFNWLVASVAVIAMALALIEIASVRNDNLSIISWVKVFNRRWLYHGCKNFMTYLYLPLTFFFMPLYFICSIQDGFRGLLGLETGAHFNTSVDWLIWLALALIITTYFLTIPPLYAKVGNIQNMVVSAVKFIPLVFVPIIGFIVAGTGNGELKNVKALVQPPQINGATASFTQLVQAGYGITRFTGIGAGMGSFISIAAIFFAYDGFYVTAGLQSEMREPKKTPWALFLGLLITTLFYLILAVALSINGGLFSGMEESMGKLFNNKRAGQIVFGVVNLMIGIGVLGIINGFALWAPRFVEDLLAQGDLPFWKQVQGRLNPNKPVVGVIYCLVLSLTVQVLFTVIGALAYLPTVADYKNYVNTEIDKLNSMQWLYSFSDLMATWTSLFTFAFIACAIFGAIVNRKTKKITIANPKRYFLPAAWIAVVVNCISVFVTIIEPFINLFLLFGYDETVAHTVLGNDFIELNELVIGRVMLIVVLVFFAIISFLPVYVEDQYHKRKFGSLANYQQYVQQHLAHSTING

SEQ ID NO: 64247 - protein, 309 aa, Mycoplasma pneumoniae
MQKIVIALGGNALGNNPTEQKDLVQLPARQAVALLKQGYQILLGHGNGPQVGMIYNAFSAAKQVNPNTPTVPFAESGAMSQGYIGLHLLTALYNELLHQKLPHQAVYFLTQTLVEASDPAFQNPNKPVGPFYNTEETARSANPNSTVVEDAGRGWRKVVASPKPVDVLGIDAIKSSFNQGNLVIVGGGGGVPTIKTKSGYATVDGVIDKDLALSEIAIKVEADLFVILTAVDFVYINYGQPNEQKLTCINTKEAKTLMAANQFAKGSMLPKVEACLNFVQSGTNKTAIIAQLDQLAAAIAGKIGTKIVK

SEQ ID NO: 64248 - protein, 273 aa, Mycoplasma pneumoniae
MGCTYIGPSGSNFGKKESIEDTAKVLGSMYDGIEFRGFKQSDVDALVKYSGVPVWNGLTDAEHPTQMLADYMTIKELKGDLKGRKIVFAGDIKNNVARSLMIGAAFVGMDIVLVGPKAQHELVQNGAGYKEVFEQCQALFQLNGGSVSFSTDKLQAAKNADVIYTDVWLSLGEDFSLFEERIQELGQFQVDMAMIKAAKSDVIFLHCLPAFHDDHTSFSLEIKQKLGKKYPVVKTGAMEVTDTVFQSKHNMAFIQAENRLHTIKAVILATLGY

SEQ ID NO: 64249 - protein, 508 aa, Mycoplasma pneumoniae
MIHHLKRTKIIATCGPALTKKLWTLAMLDDPAYAAMKAEAYANIENIIKNGVTVIRLNFSHGNHEEQAVRIKIVRDVAKKLNLPVSIMLDTNGPEIRVFETAPEGLKILKDSEVVINTTTKEVAKNNQFSVSDASGTYNMVNDVKVGQKILVDDGKLSLVVKRIDTKNNQVICVAQNDHTIFTKKRLNLPNADYSIPFLSAKDLRDIDFGLTHQIDYIAASFVNTTENIKQLRDYLASKNAKHVKLIAKIESNHALNNIDGIIKASDGIMVARGDLGLEIPYYKVPYWQRYMIKACRFFNKRVITATQMLDSLEKNIQPTRAEVTDVYFAVDRGNDATMLSGETANGAFPLNAVYVMKMIDKQSETFFDYQYNLNYYMANSKARHSEFWKQVVLPLAQKTAPKRKLINSDFKYDFVVHATNNLNEIYALSNARLAAAVIILTNDPQVYTGHGVDYGIFPYLIDQKPQSLSKAEFKSLANVAIKHYQQHGEISQLKQCLGVFHNKIISL

SEQ ID NO: 64250 - protein, 328 aa, Mycoplasma pneumoniae
MSPKTTKKIAILTSGGDAPGMNATLVYLTRYATSSEIEVFFVKNGYYGLYHDELVPAHQLDLSNSLFSAGTVIGSKRFVEFKELKVREQAAQNLKKRQIDYLVVIGGDGSYMGAKLLSELGVNCYCLPGTIDNDINSSEFTIGFLTALESIKVNVQAVYHTTKSHERVAIVEVMGRHCGDLAIFGALATNADFVVTPSNKMDLKQLESAVKKILQHQNHCVVIVSENIYGFDGYPSLTAIKQHFDANNMKCNLVSLGHTQRGFAPTSLELVQISLMAQHTINLIGQNKVNQVIGNKANVPVNYDFDQAFNMPPVDRSALIAVINKNII

SEQ ID NO: 64251 - protein, 266 aa, Mycoplasma pneumoniae
MKKLTQAFLRFCLRFLQLLSLVLVLPVFVLMLISSLISAKNYESIPENYPPEIRFKKVYRLVSLFLYIKGVKVVIVNPENVPKKAVLVVANHKSNLDPLILIKAFGKTEGVPPLTFIAKIELQDTWLFKIMKLIDCVFIDRKNLRQMAASLEQQQQIIRQGTALCVFPEGTRVLSRQIGEFKSGALKVAYNAFVPIVPLTIVGSMGHMESKKRLQKAQVERDRGYKIQVIFNTPINPINFNQIDSQNVANNVWREISQTYAQYCQD

SEQ ID NO: 64252 - protein, 119 aa, Mycoplasma pneumoniae
MILGIGIDLVEIKRFEQLARQTDNCFAKRLLTSTEYAHYAKLRKDSEKSSFLAVHWSLKEAIYKAVNHIKPLFSQLEITKKNQRYNCQIDPKIELLLSVSYSSNNITAICLAQQTPWKN

SEQ ID NO: 64253 - protein, 377 aa, Mycoplasma pneumoniae
MKFKYGTVVLGSFLGLSVVLAACGARGKFDQFDDGKIKLASSLTSKAAANALQTIIEKYNIVKSGKDYPIEITQIAGGYDGGRTDLQTRVSVKDKTNFYNLILNYPDLVSVLARSGMELLFDKVNVDKLEPNFLKFNEQISGVAKSGNYGIPVSLSTDILVLNGPVLHYILNSAKKEEANSQVKSQIKTSQIQAKGSLTIDTDENTKSLWEKIQNSAKANGETNQKGRKAAKSNKTALVQLKNGADTTTNEENKDTKTSDDKVKQTWGDYVEKDDGLKNYTFRASVFENWHDFLDFSTRVAKSFTEKVSNITNKKGTDIQGVLGVDSSPNVLFASVFAAGGGNYENFFYKLKDGRADFSNFKNKGSSYQNLQSVFKD

SEQ ID NO: 64254 - protein, 569 aa, Mycoplasma pneumoniae
MIKDFDPSEFVGKTPTKIFAFGGIQEVGKNMYGIEYDDEIIIIDCGIKFASDDLLGIDGIIPSFEYLIENQAKVKALFITHGHEDHIGGVPYLLKQVDVPVIYAPRIAASLILKKVNEHKDAKLNKVVVYDDFSNFETKHFKIDFYRVNHSIPDAFGVCVQTPNGNIVESGDFRFDFAAGGEMLDVHKVVKIAERNVHVFMCETTNAEIPGFSQSEKLIYRNINKIIKEARGRVILTTFASNITRINEIIEIAVNNKRKVCLLGKSMDVNVNISRKIGLMDIDSNDIVEVRDIKNYPDRSILILCTGSQGEDSAALNTMARGKHNWVSLKSTDTIIMSSNPIPGNYAAVENLLNELSKYGVTIFENSPNMKLHASGHATQQELQLMLNLVFPRYLIPIHGEYKMMRTIKNIAQECGINGDDVGLLANGQVMYLIDGKLYYSGEVINADPIYIESRNSSPDLARVIKQRQILSREGMFAVIVVFDKNNNILGMPTLITRGCFFALDSSPLMTKITHSIKRGLENVIQNKRFNTREQMIKELKRVCKETVSYFIWKNKSRNPLISTVLSWV

SEQ ID NO: 64255 - protein, 399 aa, Mycoplasma pneumoniae
MTLFSFPNYVNWNKFDFIVLGAGISGIVLSHVLAQHGKSVLLLEKRNQLGGNCYDKLDETTGLLFHQYGPHIFHTDNQKVMDFIQPFFELNNYQHRVGLQLDNNLDLTLPFDFSQMRKLLDTKTASSLINFFQQHFPAEKHLTLMQLQTINFAPVQQLYQFLKIKVYGPYSVKMWGMPLEQIDPSVLGRVKISLSENSSYFPTATIQGLPKGGYTKAFTKMVDHPLIDLRLNCPANLISVNNNQLLFANQPITKPVVYCGLIDQLFGYCFGRLQYRSLHFEWKRYAVKQHQAYPVMNWPLHPTITRQVEYKQLTQEGLESNQTIVSCETPGAFREGDPRFMEPYYPLNDVSNNALFARYLKLANAIPNIHLLGRLALYQYIDMDRAIAQSLAKAEQLLQ

SEQ ID NO: 64256 - protein, 489 aa, Mycoplasma pneumoniae
MSDRLNDQAQNRLQKLLNLKQTGNDPYLITKIENTHSAASFQKAFANQSDAELKQYQVILTGRIIALRQTFIIIQDFSGKMQLYINKKTAPELFEYFNNYIDLGDQIVATGHPMMTKTGVLTLNVERLQIVAKCLQTPPEKWHGLTDPEARARKRYLDLTYNRAQVEVFLKRTQIITAIRTFLNEAGFLEVETPILQAVLGGANAKPFKTHYNALKGDFYLRIANEIALKKLIVGGLPKVYEMGRMFRNEGVDTTHNPEFTSIEMYQANADYAVMMDLTENLIKFVCKTLNQWSFNWNGQTLDLAKPFKKVKMVDLICQVTGVNFDDVKDDQTAIALAKQHKVELKKHEQNKQHIINRFFEQFCEHTLIQPTFVTHYPKAVSPLAKQDPHNPEFTERFELFINTKELANAYSELNDPLEQRARFEQQLQEKRMGNDEASELDESFLDALSFGLPPTGGLGIGVDRLVMLLCECSSIRDVVFFPQLRELK

SEQ ID NO: 64257 - protein, 100 aa, Mycoplasma pneumoniae
MSFKKITEMMRQAERQSKQKALDFEQKLFEYSYKNAAIKIIIFGNLTIKSITIDPALIDPEDKVTLEEMITEAVNEAVGDVKAKYDQLMEEAMPQMPGLF

SEQ ID NO: 64258 - protein, 493 aa, Mycoplasma pneumoniae
MSAKLTLESIAKTFAETSIFAILFLIIVILNLGLLVFLAYQYRVYKKKQRANLTKQTYNNDYGQIVNLKQQNGAKIKELANLKDQLSELGQKFNTTLSEIINKPLVNVIDEYLDEQFKQAANFREAELNAVLDSNDQKTVFHKRLFNKFHFGVDKLANINVKNPLNLCWVDSASFTVIESDFRKLNGVGGINKKLLIEKLRIEDIIFTNIDKKYYEVQILSDSPVKVQKTVLTIRNILINDYVDNEKIESYAREANGYFNDHCKLIGKQVLERLNIFEISPKLHKFFGLLAFRYSFGQNVLSHCLETGFLTAYLALLVNFKPDVALKCGLYHDIGKADDENGKKNHTVTGAKIGDEFYFENDVKYTIANHHNKNVDNVYCRLTQIGDKLSAGRLGARSDSSVLFSQLKQELKQIVEETLAQFKTTILLGQSGRRLVIWLETNQHNNIIDNQQLTDLATTIKSKIVQNNITNRFPIKVVLRYNFEHSFDTKDKN

SEQ ID NO: 64259 - protein, 259 aa, Mycoplasma pneumoniae
MKYKIFASTTPQTEPVLQKLKQVLKGCEAVEKGFDYLFVLGGDGFFVSTVANYNCHNCRVVGINTGHLGFYTSFNEKDLDDNFLQKLQQCHFQRISLLEVSVNGQQHLVLNELAVYTNTAYPINIFIDGEAWEFYRGSGLLIGPRTGSTALAKSAKGAVIFPGIDVLQIIEMNPLLHPNQVTIQSPIILPKETQVEFVVKKAFNPQQFPTFYCDGRKLELPNADTTLALKLVQSTPMFNISLKTQDFINKLKSTFIKQS

SEQ ID NO: 64260 - protein, 346 aa, Mycoplasma pneumoniae
MMKRALTGIQASGKQHLGNYLGVMQSLIELQEQCQLFVFVADLHSITVDFQPQALKQNNFDLVRTLLAVGLDPQKACLFLQSDLLEHSMMGYLMMVQSNLGELQRMTQFKAKKAEQTRNPNGTLNIPTGLLTYPALMAGDILLYQPDIVPVGNDQKQHLELTRDLAQRIQKKFKLKLRLPQFVQNKDTNRIMDLFDPTKKMSKSSKNQNGVIYLDDPKEVVVKKIRQATTDSFNKIRFAPKTQPGVTNMLTILKALLKEPVNQSLTNQLGNDLEAYFSTKSYLDLKNALTEATVNLLVNIQRKREQISREQVFNCLQAGKNQAQATARTTLALFYDGFGLGSQNIK

SEQ ID NO: 64261 - protein, 711 aa, Mycoplasma pneumoniae
MSKNLVVIESPNKVKTLQKYLPNDFEIVSTIGHIREMVHKNFGFNEADYSPVWEDWTKSKKKFSSLSFKGNLKGKKLLSKYDIIKSIKEKASKATNIYLATDPDREGEAISWHVYDVLDEKDKSKCQRITFNEITKNAVLDALKNPREIDQSWVQSQFARQILDRMIGFRLSRLLNNYLSAKSAGRVQSVALRFLEEREQEIRSFVPRFWWTLDVLLNPKAEGVREACANRSIPIVLREINPALRAGLKFEEEKSVSGIDFLDEASAKKFGEQLKGVFEVYNIDETKHYSSSPNSAYTTASLQKDAINKLGWSSKKVTLIAQHLYEGVSINGEQTALISYPRTDSTRLSAQFQQSCKEYILNHYGEKYLSNRIVSAKGKKGEKIIQDAHEAIHPTDINITPEMVKNAIKKDEFLLYRLIWIRTVASLMADCKKSHTHIRFINDGNKFYASSKSLVFDGYRKIYEHFENKESNDLYIDLDKIRVGDRFMAKDIKITARQTHPAARYTQASLIEALEKSNIGRPSTYNTMASVNLDRGYASLNKHAFHVTQLGEQVNEELSKHFGKIINKEFTKNMEKSLDEIAENKKNYQEFLRDFWSNFKEEVKLAEGSIQRVKKEKEFVGRDCPSCASPLLYRYTKRGNEKFVGCSNFPNCKYNEFSQNKPNLTLEKLEELCPECNSQLVKRRTKFNPNKTFVGCSNFPRCRYIKKDNAS

SEQ ID NO: 64262 - protein, 251 aa, Mycoplasma pneumoniae
MQRTLNVGVILCESFISNAQNPVNSYIKIYENVRMFEFAIKLLQESRINFQKILLYVLEEQIPLVEKVVAKYENCWVFRSKHNEVEDIYEAKGFIEDKYKIGLKSSKNQASSYYDNCCFVVLEACRPLTSKKVVKNVYEKAMIDGAAVAVLPFERQLVCGDNTKAVRQLKDKGNMNYWRQSSTWELQFPQAYTLNKLNQYHKNLFMKARNMLDLMNISAKNPLSIVDGSAYSFRVVTSLDFEILLGILRNG

SEQ ID NO: 64263 - protein, 227 aa, Mycoplasma pneumoniae
MRSPFPVPMVPLTIKTWQKKLPNWLTIYRIFIAVPTIIFLGLNHLLGSVASFTVLGNVTIHLQVSLFIGGVLFITAVISDYLDGYWARKWRVVSNFGKLWDPLADKVIINGVLIALVAYGYFHFSFLIVIVLRDLVLDGLRFYAQEKQLIIPANQWGKWKTTWQMIAILMSCFVFSFSLKETNSANTKIFYWAIVHLPYYLATAFSLVSFGIYAQQIYKTIKVKVKL

SEQ ID NO: 64264 - protein, 455 aa, Mycoplasma pneumoniae
MSATAISDLFEKPAQFKNKKIKLTGWLKNKRTSANIIFLEVNDGSTLLNLQAVVKQDQPELFALAESISLASAVSVSGTVALTPKSKQPLELVVKQINVLSTARADYPLQKKEHSLEFFRNNAYLRVRARTYFAIMKVRSLLSQAIFDYFFKNDFVLVHSPILTSNDCEGAGETFELKQGKEFFNKTTYLTVSGQFGAECYAQAFKKVFTFGPTFRAEKSHTSRHLSEFWMIEPEVAFANLKDLIKLIESTVKTVIKQVMQKAKQELDFLEKQFDVKLMERLKQITSTKNFHVLEYTKALEILKTAQASGQANFEVQDFNFGLDLKTEHERFLCEQHFHNQPVFVINYPKDFKAFYMKQNADGRTVGAVDLLFPQIGEICGGSEREGNLEKLVERCQAMQIDTQTLNWYLDMRKWGYFASAGFGLGFDRLLAYICGLENIRDAIPFPRAHGSINY

SEQ ID NO: 64265 - protein, 430 aa, Mycoplasma pneumoniae
MESKWLTVDTKHLYGFDEAIFIQKYQKKVNQIHQQFLNQQLPDGHMNGWYSQPDQDHKGLLKQINTIAKQFNALKVTDIVYLGIGGSYTGIRAILDFLKPEQKANIKVHFVPDISAFNIAAVARAIKGKSWALVVTSKSGRTLEPAVTFRYFRNLLHKQYKQKHALRTVVITDAVKGLLVGMSNQYGYAHLTIPSNIGGRFSTLSPAGLLLAKLCGHDPKQLLLGTLTAKQELANSDLNTNSAYYYAALRHWLYTTKKLKIEVTVAYHSAYEYLLLQHRQLFGESEGKGGKSLFPTFSLFTTDLHSMGQLYQEGEKNFFETVIQVQTQFHDLELPPSDFNNDDQLDYLLAKSMNEISNTALEAVVEAHFQSNVNIIKLTLKERTTFMFGYFYFWLSMATMMSGSLLGHNVFDQPGVEVYKQLMFAKLGRE

SEQ ID NO: 64266 - protein, 389 aa, Mycoplasma pneumoniae
MALNLKIGDIVQNKYRIEKLINRGGMNSYLFLASNLHVQEFGPLQKRQFTRLVLKVVQRTDKINDNNWKKFLDGTITTTRVSHKNLVQTFDVVSPRLSVLSENQVIVLEDTVMIVMEYVDGPSLREMLNQKGYFSVQEVVYYFTKLVKVINYLHSFEHQIIHRDLKPENILFTSNLTDIKLLDFGIASAVIRNAEKTEVLTDENSLFGTVSYMTPEVLESTVNKEGKRIRKPPTVQYDIYSLGVILFEMLVGRVPFNKSIDPKKERETIQKARNFDVPLMGNLRSDVPVSLENIVFKCTAVKRENSKWMYSDTKQLLADLAQWQTEQTLIKPVHERILEGQNEMRELMVSNYLPWYLRKGVLIFFSVVLLALLIAVVSFFIITGVVVHS

SEQ ID NO: 64267 - protein, 280 aa, Mycoplasma pneumoniae
MSFSVQIKHELATNPLIKTEWSSFLAGYFQNGLKLLATGQWSFKTSTATLKALFSNALQFSFQIHETSTHCEFSFRASQTEVDQLLAFDATQSDLPLQKAYVIGAFLSGGSVSDLLHSSNFHLQISTNNELQIKQLMKLFHPFKQTTKRHQLLVYVKSYQAICDFFKLVEAFDGYLAFEENQLQKNFALEQVRKSNLEIANLMRTLKTSTSTAEQLKILINSADFKKQSLNFQRFCLVKLDHPDWSLEQIAQFFERKYKVQITRSGIQHLNAKLKKLNQN

SEQ ID NO: 64268 - protein, 478 aa, Mycoplasma pneumoniae
MMINFEAIIGIEVHVVLNTATKMFSPAPNQAQNATPNQFINAIDLGLPGTMPQVNEQAVQKALILADALNMQRVQPVLVFDRKHYFYQDLPKGFQITQQNFPIAQNGYVEIVENNKAQRIIIERFHLEEDTAKQHFVDGQILLDFNRCGAPLIEVVTAPVIKSAKQSKAYLQKLRQILIVNNISNAKLEDGSMRSDCNVSVRLKGQTAFGTKVEIKNINSLNNVEKAIDLEIARQVKALIKGEPVQQVTLTYDDKTNTNVFMRKKDNSVDYRYFIEPNIMSSNIDELLQKPNKAFNLTEFFTKLKEAGVNEQLNQLVVDDLTLFNAYTKINSVINSPQDTIRWLCIELMGQLNKLQKPLKDKTIDHLIILIQMVQKGTVNQKQAKQLIELMLDNGQDPQSLAKLHNLEQITDEKQLTQIIQQIFKENEGEILKNLDRVERIQKLIIGQVMQRTHNRANPQQVFIIVEKLLHDFSERAS

SEQ ID NO: 64269 - protein, 478 aa, Mycoplasma pneumoniae
MKSQILKLQQTLTKKPASINPLLQQIDGAINEHWSSNFLLKNTVEWAQAQAPKNRSKSPLNNIPFVLKDNIATKGIVTTGGSRFLEDYIPPFSATVFELLNNSGALLVGKANLDEFGLGGTGLHSGFGFVHHPWNETLIPGGSSSGSAYAVARGIVPFSIGTDTGDSVRRPASICNIVGFKPTYGLISRNGVYPYAPSLDHVGIFARYVYDVALVSDEIIKHDKADFSAQKSPDAGKFTRSLKESFNKQIKIGYLKPLEEWFDIELSKKWNSLKERITLEGCELIPFHFPLELLEVIDPVYKLISYSEAVSCYSNLTGIVFGQKLFEPNQASDFSKTITANRDRFFGEQLKRRFIIGAFGTDKNNFTKYFEKAQKIRRVMVDAYLNLFKEADFIVSPSASGFTKTIAAVQKGESFTNLVDDFLQLANFAGNPSITIPWLVKQKDQTIGLSVNANCFHDKQLLQVAAWLEELFQIEHDD

SEQ ID NO: 64270 - protein, 473 aa, Mycoplasma pneumoniae
MVSNKLEQTFKFANDKNIERAERVLMQALVQDAVGVDLILTKLEPKDFFGFPFNFIFQTAQENYSEGNKLFGSALLEAVKFKLDTDSKTQREIEGLFEDVLLKGLPFLERDIKVFVDVVKKASIFRQLKQFAKKVEKEEFKVKDDRFEGYLQAIQNDFTKIIHSAFVSIPGLSYDEIVREEEELIPKVYRGELTVKGLKSGFYPLDQLTSGWKEGELIVVAARPGRGKTALLINFLQGAVNDSEKFDKNKDVLLFFSLEMRNREIYQRHLMLESQVNYTLTSRQRLANVYDDLIKASEVLRDLPIKIFDYSTITLDEIRAQITEVSKTNNVKLVVIDYLQLVNAFKNSYNISRQQEVTMISKSLKSFAKEFNVPIIAAAQLSRRIEERKDSRPILSDLRESGSIEQDADMVLFIHRVKDEDSENQEAIGHNNIFQVELILEKNRSGPTGKVQFDFQSDVSTFRVREYNPDGYS

SEQ ID NO: 64271 - protein, 149 aa, Mycoplasma pneumoniae
MKVILKQDVSNLGKRFDVVDVKDGYAIHFLFPKKLAAPLTKKSLQDRDLFLKKQQEHYEINKALSHKLKEVIEQTELHFSLKEHNGRPYGSIITKQIINQAHTKGMALQKFMFKDNVRLGFGDHEITLHIFEDTTAVLKVKVTPDNGVK

SEQ ID NO: 64272 - protein, 104 aa, Mycoplasma pneumoniae
MMNNEHDNFQKEVETTTETTFNREEGKRMVRPLFKRSKKYCRFCAIGQLRIDLIDDLEALKRFLSPYAKINPRRITGNCQMHQRHVAKALKRARYLALVPFVKD

SEQ ID NO: 64273 - protein, 166 aa, Mycoplasma pneumoniae
MNRVFLFGKLSFDPNKLQTRTNNIGASFSLACIDSSGFNDSKSYIRITAWGKVASFVLTLKPGDSVFVEGRLSTYKMNNRSDDPNSKATYALQVIADKVYRPDEENSLEQPVDKATVIDSPFLAAKTNATENELAQAFPISLDDEDDDINPILNNDSQLEEESDDE

SEQ ID NO: 64274 - protein, 215 aa, Mycoplasma pneumoniae
MQYNIILLVDGSLSLEQANQVNEKQQQTLTNVEGLQTEYLGLKELAYPIKKQLSAHYYRWKFSGDNQSTKDFKRTANINKQVLRELIINLEREYGYLASINPKKQQLALQKRAKYDEIIARENNPENPDVPVTSGLASTQPRLSRTEKAQKPKEELWDVVQKMGNFDSVQANPYRPRFKRFNAEHVNQRQNQQNNNNNRFDRNRNRQHNRFKDKQ

SEQ ID NO: 64275 - protein, 688 aa, Mycoplasma pneumoniae
MARTVDLINFRNFGIMAHIDAGKTTTSERILFHSGRIHKIGETHDGESVMDWMEQEKERGITITSAATSVSWKNCSLNLIDTPGHVDFTVEVERSLRVLDGAIAVLDAQMGVEPQTETVWRQASRYEVPRIIFVNKMDKTGANFERSVQSIQQRLGVKAVPIQLPIGAENDFNGIIDLIEEKVYFFDGGKEEKAEEKPIPDQFKDQVKQMRAHLVEEVANFDDQLMADYLEGKEISIADIKRCIRKGVIGCQFFPVLCGSAFKNKGIKLLLDAVVDFLPSPVDVPQAKAYGEDGNEVLISASDDAPFVGLAFKVATDPFVGRLTFVRVYSGVLKSGSYVKNVRKNKKERVSRLVKMHAQNRNEIEEIRAGDICAIIGLKDTTTGETLVDDKIDVQLEAMQFAQPVISLAVEPKTKADQEKMSIALSKLAEEDPTFKTFTDPETGQTIIAGMGELHLDILVDRMRREFKVEVNVGAPQVSFRETFNKESEVEGKYIKQSGGRGQYGHVKIRFEPNKDKGFEFVDKIVGGRIPREYIKPVQAGLENAMASGPLAGYPMIDIKATLFDGSFHEVDSSEMAFKIAASLALKEAGKVCSPVLLEPIMAIEVTVPEQYFGDTMGDISSRRGLIEGTEQRDNVQVIKAKVPLKEMFGYATDLRSFSQGRGNYVMQFSHYAETPKSVVNEIIATKK

SEQ ID NO: 64276 - protein, 155 aa, Mycoplasma pneumoniae
MRKNRAPKRTVLPDPVFNNTLVTRIINVIMEDGKKGLAQRILYGAFDLIEQRTKEKPLTVFERAVGNVMPRLELRVRRIAGSNYQVPTEVPQDRKIALALRWIAMFARKRHEKTMLEKIANEIIDASNNTGAAIKKKDDTHKMAEANKAFAHMRW

SEQ ID NO: 64277 - protein, 139 aa, Mycoplasma pneumoniae
MATIAQLIRKPRKKKKVKSKSPALHYNLNLLNKKVTNVYSPLKRGVCTRVGTMTPKKPNSALRKYAKVRLTNGFEVLTYIPGEGHNLQEHSVTLLRGGRVKDLPGVRYHIVRGTLDTVGVEKRRQQRSAYGAKKPKAKS

SEQ ID NO: 64278 - protein, 312 aa, Mycoplasma pneumoniae
MKKLLVKELIEQFQDCVNLIDGHTNTSNVIRVPGLKRVVFEMLGLFSSQIGSVAILGKREFGFLSQKTLVEQQQILHNLLKLNPPAIILTKSFTDPTVLLQVNQTYQVPILKTDFFSTELSFTVETYINEQFATVAQIHGVLLEVFGVGVLLTGRSGIGKSECALDLINKNHLFVGDDAIEIYRLGNRLFGRAQEVAKKFMEIRGLGIINVERFYGLQITKQRTEIQLMVNLLSLEKQTTVTFERLGTELKKQRLLGVDLSFYEIPISPGRKTSEIIESAVIDFKLKHSGYNSALDFIENQKAILKRKKDES

SEQ ID NO: 64279 - protein, 289 aa, Mycoplasma pneumoniae
MPKTQYIAGVSGGPDSMLLLKLYHKKIACVVHVNYNKRTTALRDQKMVEEYCKQLKVPLIVHTVPEDTVWKKNFQAQARKIRFEQFQKAASLYKVDKLLLAHHRDDFIEQAKMQLDARKRAMYYGIKTRGELYGMKVYRPFIKYWKNEILALCEEHKVPYGIDETNAQPIYKRNQVRQEIANWSKEEKEEFYIGVCAMNRVIGQKLFSLMKRAKQWLAHPDVRELKRYPLPDQRQLVYSFLITHHIDVTGDKIDAILDFIQPFQQKHYRLKDEIFLSIKDERLTLLYKS

SEQ ID NO: 64280 - protein, 226 aa, Mycoplasma pneumoniae
MAKLSKKMKIAVGLVDKTKLYPLQEAVDLVKKTSITKFNGSVDIAVSLNLDTTKAEQQLRGAIAFPHSVGKPIRILAITDDEKAALEAGADFVGGIDKINDIKNGWLDFDLIITSPKFMAALGKLGKLLGTKGLMPNPKTETVTDDVPAAVRAYKKGKKEYRADSFGNIHMSLGRVDSASNHLVENALALLDLIKSRKPATVKGIYIKNIALTTTMGPSLKVKLPD

SEQ ID NO: 64281 - protein, 137 aa, Mycoplasma pneumoniae
MAKKTITRIAKINLLGGQAKPGPALASVGINMGEFTKQFNEKTKDKQGEMIPCVITAYNDKSFDFILKTTPVSILLKQAAKLEKGAKNAKTIVGKITMAKAKEIAQYKLVDLNANTVEAALKMVLGTAKQMGIEVIE

SEQ ID NO: 64282 - protein, 423 aa, Mycoplasma pneumoniae
MALKATNFFTEPEYKLQDDLILDIRDLHVSFKVKDGIMQAVRGVDLKVKKGSIVGIVGESGSGKSVCVKSIIGFNDGAKTTAKLMNFKNIDISKMKKHQWQYYRGTYVSYISQDPLFSLNPTMTIGRQVKEAIYVSCKRRYYQTKSDLKYDLQTERIDLDTYKEKLAQAKETYKAKTTKAAVHAKTLEILNFIGIDQAEKRLKAFPSEFSGGMRQRIVIAIAVATEPDLIIADEPTTALDVTIQAKALNLIKQLRDLLNITIIFISHNISLIANFCDFVYVMYAGRLVEKGLVEEIFTNPVHPYTWALMASIPEGTDKNAPLTSIPGYIPNMLSPPKGDAFAARNQFALAIDFEHQPPFFDVTETHKAATWLLHPQAPKVEMPADVKEKIAITRKALAIKMPSQPVKQPKSNGNKKTKTKSAR

SEQ ID NO: 64283 - protein, 808 aa, Mycoplasma pneumoniae
MGLFNFLKLVSPRHRIYHKASKIANEVEGHKNYYRNLTDVQLLEESNKLVDLVTKQNYTILDVAVAALALIREVVYRETGEFAYRVQIIGAYIVLIGDFAEMMTGEGKTLTIVLAAYVSALEKRGVHVVTVNEYLAQRDATNATKILKRVGMTVGCNFANLAPHLKQAAFACDVTYTTNSELGFDYLRDNMVHRFEDKKIRELHFAIVDEGDSVLIDEARTPLIISGPAKNEFAAYVAVDRFVKKLKEDEYKIDPESRAPALTELGIKHAEKNFKTDNLFALENSDLFHKIINALTAVKVFEQGKEYIVRDGKVLIVDHFTGRILEGRSYSNGLHQAVQAKEMVEIEPENVIVATITYQSFFRLYNRLSAVSGTAFTESEEFLKIYNMVVVPVPTNRPNIRKDRADSVFGTPNIKWLAVVKEVKRIHETGRPILIGTANIDDSELLHNYLQEANIPHEVLNAKNHSREAEIVAKAGQKGAVTISTNMAGRGTDIRLGEGVAEMGGLYVLGTERNESRRIDNQLRGRAGRQGDRGETKFFISLGDALFKRFAHDRIERAITKLGNDTFDSSFFSKMLSRTQKRVEAINFDTRKNLIDYDHVLASQRELIYKQRDKFLLATDLSDMIDKMLEKFVEQFCDQYRNPKNQNLVNHIALSEALNLELNMHGVISPKLFENMTFDATVHKTHSLIGEKITNKVKVLTPPIALIRFREIMITAMDKHWIEHLDNVFKLREGVTLRSMEQTSPLNVYIRETDILFQTMLQKIARDVIIQIANLATPEEFDEELMKANALKKLQALREAHEKSNEGQ

SEQ ID NO: 64284 - protein, 872 aa, Mycoplasma pneumoniae
MNKWTGLSAAAVLESRAQHGANLIPTKKLTPFWLLFLEQFKSLVVILLLVATILSLVVAIISGVNANWLFDHNLVIEWTQPFVILITVLANSLIGSIQEFKAQKSAHTLKSLTQPFTRVFREEGLVSLPVGEVVVGDIIFLEAGDIIPADGKVLQANHLRCMESFLTGESVPVDKSVVNTGGKGLLEQTNLLFSGAQVVFGSGVFEVTAVGLNTQVGQIVKTVDSSATKLSPLQQKLEKVGKWFSWFGLGLFVVVFLVQLGLLGFHNFSANWSIALIGAIALVVAIIPEGLVTFINVIFALSVQKLTKQKAIIKYLAAIETLGGVQIICTDKTGTLTQNKMKVVDYFCFSNTTQTDLARALCLCNNATVNTNGDSTGDPTEIALLQWLDRDGLELNHYTRVYEKAFDSNRKLMSVVVQKDNRFIVIVKGAHDVLLPLCKGLDSNQIKPLIDERASNGLRNLAVGLKVLYCFDPENTQTVNELESELDFLGSVSLQDPPRIESKAAIMACHQANITPIMITGDHLKTATAIAKELGILTDERQAILGVDLDPAKIMEYRVFARVTPQQKLEIVNAWKQAGYTVAVTGDGVNDAPALVTSDVGCCMGQTGVDIAKDAADVIISDDNFATIVNGIEQGRKTFLTCKRVLFNLFLTSIAGTIVVLLGLFVLGEVFREQLSKANHNFQVFTPTQLLIINLFVHGFPAVALAIQPVQEKLMLKPFSTKNLFYNRGGFDLIWQSLLLSFLTLLFYSLGMVYAINDPELGKSGDLINRAGATCGFMVLGGSAALNSLNLMVDRPLVATNPKHYGIVWLGALSSIFVFLLIIFINPLGLVFSTLKDLTAHPVLIGYSFGGVLLYMTINEVVKLIRLSYGSV

SEQ ID NO: 64285 - protein, 294 aa, Mycoplasma pneumoniae
MSELITTPVETTAKAELVSLAKLGEMRTHVGMVKRYWNPKMGFFIEPERKHNNDHFVLELQRQSLQTAYNYVKEVAQNNGQILFVGTKNDYVKKLVNNIAKRVDVAFITQRWLGGTLTNFKTLSISINKLNKLVEKQAENAADLTKKENLMLSREIERLEKFFGGVKSLKRLPNLLIVDDPVYEKNAVAEANILRIPVVALCNTNTNPELVDFIIPANNHQPQSTCLLMNLLADAVAEAKAMPTMFAYKPDEEIQIEIPQKQEAPRQVVNRANSKQITSQRLNITRNPEVLTRE

SEQ ID NO: 64286 - protein, 940 aa, Mycoplasma pneumoniae
MQIKAQDTGQQKKSCLLSNIRNKWKNRNRGSFRQWVGKLSNGLMIPIAVLPIAGIFLGVGDAIAGNAGDLTGLRYFGLFIKNGGDVVFANLPILFAIAIAITFSQDAGVAGFSAFVFWAAMNGFMSSLILPFDKAGKIITDTSTPIAGFKVLYNKSVPVHAIATTLGLRTLSTSVFGGIIVGALTSVLYKKFYAIRLPDVIGFFSGTRFVPIICFVVAIPVALILLMIWPAVSIGLNAIGTGLGFLGGKGYGANSLIFGYIERSLIPFGVHHAFYAPLWYTSAGGSLQEIVNQQVWIRPDFHLSDNYVARVIGWVDPNNSSMYIIPGALNGQNGSSTGNTMSKDLNGALSAYMSKESTAFLTWKDLVDGLTFKGNFDKMAENGLLDGSNKIWLGLNGSGILGKKLLLSDGNVYTITFKTFANTTPIAWSKGAQAVLPLNASSTIVNNPTALAAATQSNNNTNNIKLYPVNSFRVAVESLNPAQYSQGKFPFMLFGIPAAGVAMILAAPKDRRKEAASIVGSAAFTSFLTGITEPFEFTFLFLAPWLFYGVHAVLAAVSFWLMNILGANVGQTFSGSFIDFILYGALPDGRRWLANSYLVPIIGLFLAAIYFPTFYFLIKHFNLATPGRGGKLITKKEYLASKAAAKAEGVSGVAENFTQTQIEAGILLQAYGGKENIVELGACITKLRVTVKNPELVKEEPIKELGAAGVMRTTPTFFVAVFGTRAAVYKSAMQDIIQGKVNWEALQKVINTDQLAVEPKETTPPKEVMPVVQDEIVILSPVNGTLKSLNQVPDETFKQKLVGEGVAIVPSDGHFKAPGEAGVKTELAFPGGHAYIFDIDGIKVMLHIGIDTVQINAKKQPGEPLEVFDIKTKQGEYTKEKSESVVEVDLKKLSKKYNPITPFVVMKESLENFKLVPIRQRGEIKVGQPIFKLVYKKSQA

SEQ ID NO: 64287 - protein, 438 aa, Mycoplasma pneumoniae
MRDNTAKGITAGSGSQQTTYDPARTEATLTTTTFALRRYDLAGRALYDLDFSKLNPQTPTRDANCQITFNPFGGFGLSGSAPQQWNEVKNKVPVEVAQDPTDPYRFAVLLVPRSVVYYEQLQRGLALPNQGSSSGSGQQNTTIGAYGLKVKNAEADTAKSNEKLQGDESKSSNGSSSTSTTTQRGSTNSDTKVKALKIEVKKKSDSEDNGQLQLEKNDLANAPIKRGEESGQSVQLKADDFGTAPSSSGSGGNSNPGSPTPWRPWLATEQIHKDLPKWSASILILYDAPYARNRTAIDRVDHLDPKVMTANYPPSWRMPKWNHHGLWDWKARDVLFQTTGFDESNTSNTKQGFQKEADSDKSAPIALPFEAYFANIGNLTWFGQALLVFGGNGHVTKSAHTAPLSIWLYIYLVKAVTFRLLLANSLLSKSNIYKKTAN

SEQ ID NO: 64288 - protein, 760 aa, Mycoplasma pneumoniae
MKFKLFLGSSFFGVATLLIACGTGRFDQIDDGKIKLAVVTSPSAASSLQTLLDQYNNTKAPADYPVEVVSLDSTGSYTKGKFDTQKRLAAKDKNNFYNLTFNYPDLVSSLAINGMELNLDGVNVSNFEQSFLDFNKNISGVRKPGIYALPATMSGEVLVLNGPVLHYILNSAKKKDGTESKIKTAQLKTASTQAEVKGTMTMASDEQTTKLWTNIQNAAKENAANGTTEKAEKTVSASSLQLKNTNKTTEGTLKIGTDDNTKNLWKKIEDAAKTNGEKGNEKQEATQSNASASLVKLDQKNTSQDKTQNTQTSDDEIKKSWGEYKEVEGGLKGYEFKADVFESWEKLNDFAVRVAKSFSKVSEEKKSGSDIQGVFGIGSLENALYTASFAAGGGDYNNFLFNIKKGRADFSNFFNHNSKTFQSLRDIFNSFKPLIDQKGLISNKHFDTPVNNYAKFHQLAFYVSSTARFPYSFAKDNVKRLIIGKRELEVNPKSMFAIKKENGNNGNSNLLGKVALDNNKSIELYENNIPNGKTDAILIKNQTLISALKNPKQTKSSQRSSQSTNTQNDAICYLAFNSKIRPDDKDIFLLDKFGEKFVTAIVNFEEKTEVKINTLQEKEAVVLPAPQKFKPTDPKSVALVQGPSLIGIHANANEDRSTIKFLNWYLNAEVDWKDGEKKTPAEYLAEKASYLLPFKKVLEKSKQNIKATSKEGEQNQGKKGDGAQNQGKKGDGAQNGKNDKAKHNGFCRYCRQPIFKRFCR

SEQ ID NO: 64289 - protein, 243 aa, Mycoplasma pneumoniae
MPRYLAIVAYNGAPFRGWAKQPGYHTVQGQIEQNLALIYQTPINIYGSGRTDKGVHAINQTFHVDLPDKLPLKQLIAKLNQLNYPDIFVKALVPVAPRFHARFAVKTKVYEYLINTRAFNPAQYHTVWQYNHPLDLAQLEADTTLFLGRKDFWSFSTASQKDTQRTISKIIVQQDHTGTVKLTFFGNGFLRNQIRMMVASLVALNNRTLMRETVQQLFDQPQKGGCKVKAPACGLYLKTVLYE

SEQ ID NO: 64290 - protein, 434 aa, Mycoplasma pneumoniae
MDSFFINGYVPRDTFIHRLHPTTKLLIFLLFVILVFVPIGFVFQSVIFVFATVIFFVAKLPGRFYLSSIKSISLLFLLLLFVNWFTFRDPGFYITADQVNTVKPHFNGNNFNFWNISLFNYQDNVFSQVFNFNRANMTELNKINFFFKETANANAYTKVTGIDKLAEMLASKNLFKFNGSTNGIDKNKILGAFLDHKIAVYLGRSWGGDFSGFVIDVSVSDKTSTFTIKPFLANSNYVLTLRAIILAFYVTQKILIMIILATVLTSTSSSVELAYGIERLLWPLKLLRVPVNVFAMTIAIAIRFVPSLLLESQRILNAQASRGLDFKNGNFFVKMRSLSSLVVPMISIAFRNAGELASAMEARGYDPTKKRTTYRKFKIDWVDATALILTALYFVVIIFLTVKGAVFLDLGTPEWLLTGKIKEQVERSLSVKSA

SEQ ID NO: 64291 - protein, 303 aa, Mycoplasma pneumoniae
MKKIVELKNPLRDGEILSVSNLSCFFNEKTVHEVKVIDNFSYTFAKNKVYCIIGDSGSGKSTLVNHFNGLIKPAYGDIWVKDIYIGQKQRKIKDFKRLRKTISIVFQFPEYQLFKDTVEKDIMFGPIALGQSKNEARQKAAYYLEKMGLKYTFLERNPFELSGGQKRRVAIAGILAIEPEVLIFDEPTAGLDPEGEREMMRLIKDAKASGRTVFMITHQMENVLEVADEVLVLSKGQLVKSGDPYEVFMDEAFLAHTTIIMPPVIQVIKDLINLNPKFSCLLDFKPRNLDQLADAINNTIAHG

SEQ ID NO: 64292 - protein, 274 aa, Mycoplasma pneumoniae
MLNTNKQAAASFQGVYFSYSELPLIRNLSFDVFEGEYVCIVGHNGSGKSTISKLLTGLLKPQAGTIKIFGKTISSENVTYLRNHIGIIFQNPDNQFIGITVEDDIAFGLENRRYTREKMKSIIEDVAQQAGITELLQKEPHNLSGGQKQRVAIASVLALNPAIIIFDESTSMLDPKAKRTIKQFMVELRNQGKCVISITHDMEEVTKADKVLVMNEGRLIRQGKPKDVFNSAAELQKIRLDIPFSLSLSTKVNGVTSTIDYQQLIEAIGKLWKK

SEQ ID NO: 64293 - protein, 124 aa, Mycoplasma pneumoniae
MSYINKPGKTSAWRVMTVRQQVSAVLAYGKIETTLKKAKNTQKRLDKLITLAKVDNFNNRRQVKKWLLNTNLFDVDQLMDHLFSKVAPKYEKTPGGYSRVLKLGPRRGDATEMAILQLTDAKYK

SEQ ID NO: 64294 - protein, 327 aa, Mycoplasma pneumoniae
MEKFLKYEIKVNNEQARANPNYGIFEVGPLESGFVITIGNAMRRVLLSCIPGASVFALSISGAKQEFAAVEGMKEDVTEVVLNFKQLVVKISDLLFEDGEMVEPPLERWPLLTVTAEKAGPVYAKDLECPAGFEVVNKDLYLFSLQTDKKVTVNVYVKQGRGFVTFLENREMINSLGIIATDSNFSPVLHCGYEVQELKTSKQKITDHLTFKIATNGAISAVDAFAMAAKILIEHLNPIVNVNESIKALNIIQEKAEERRVRSFAKQIEELDFTVRTFNCLKRSGIHTLQELLSKSLADIREIRNLGKKSEREIIKKVHELGLKLRS

SEQ ID NO: 64295 - protein, 121 aa, Mycoplasma pneumoniae
MAKKKKINVSSGIIHVSCSPNNTIVSASDPGGNVLCWASSGTMGFKGSRKKTPYSAGIAADKVAKTVKEMGMATVKLFVKGTGRGKDTAIRSFANAGLSITEINEKTPIPHNGCKPPKRPR

SEQ ID NO: 64296 - protein, 124 aa, Mycoplasma pneumoniae
MARILGIDIPNQKRIEIALTYIFGIGLSRSQAILKQANINPDKRVKDLTEEEFVAIRNVASAYKIEGDLRREIALNIKHLSEIGAWRGLRHRKNLPVRGQRTRTNARTRKGPRKTVANKKIESK

SEQ ID NO: 64297 - protein, 37 aa, Mycoplasma pneumoniae
MKVRASVKPICKDCKIIKRHQIVRVICKTQKHKQRQG

SEQ ID NO: 64298 - protein, 78 aa, Mycoplasma pneumoniae
MQPKFNNQAKQDKLVLTGKILEIIHGDKFRVLLENNVEVDAHLAGKMRMRRLRILPGDLVEVEFSPYDLKLGRIIGRK

SEQ ID NO: 64299 - protein, 215 aa, Mycoplasma pneumoniae
MVMENKFLFLGAPGVGKGTLAKQVANTTGLFHLSTGDIFRSVMQEQGALSQTLAHYMNQGLYVPDELTNQTFWHFVTTHQNELHKGFILDGYPRTLNQLEFLQSKLQLDQVFHLKLSDPQVLVARILNRLVCPSCGSVYNKQSKPPLKANQCDRCHATLQARNDDTEAVILKRLTLYEDTVKPLIEAFTKQGILTVIEAQLPLEQQVNLVQQLVH

SEQ ID NO: 64300 - protein, 477 aa, Mycoplasma pneumoniae
MQAKPTTAVKQKQNFGQRLFTLLRNRDFMISFLITVVLLVLFRVLAIIPLPGIQVNQTGLDQNSNDFFSLFNLLGGGGLNQLSLFAVGISPYISAQIVMQLLSTDLIPPLSKLVNSGEVGRRKIEMITRIITLPFALVQSFAVIQIATNSGGGSSPITLKNNGSDFVAFYIIAMTAGTYLSVFLGDTISKKGIGNGITLLILSGILAQLPEGFIAAYSVLSGVVVTINATLTTAISFFIYFMAFVTLLFATTFITQETRKIPIQQSGQGLVTESSALPYLPIKVNSAGVIPVIFASSIMSIPVTIAQFQPQTESRWFVEDYLSLSKPTGIVLYGILVILFSFFYSYIQINPERLAKNFEKSGRFIPGIRPGKDTEKHIARVLVRINFIGAPFLTVIAIIPYIVSALIHLPNSLSLGGTGIIIIVTAVVEFMSALRSAATATNYQQLRRNLAIEVQKTAQQDKEEQLRAETPGIGNLW

SEQ ID NO: 64301 - protein, 151 aa, Mycoplasma pneumoniae
MELNQLKSVPKARNHKTKTLGRGHGSGLGKTSGRGQKGQKARKSGLTRPGFEGGQTPLYRRLPKFGNARKGFLKQEWVVLNLNKIAKLKLDKINRASLIEKQVISAKSQLPIKLIGHTKLEKPLHFEVHKVSKQALKAVENANGSVKLLEK

SEQ ID NO: 64302 - protein, 219 aa, Mycoplasma pneumoniae
MTDQNQKANQGNGLQTTNLQAHAQRKHNLRPSSEGIKKAVSKKEGGGHNRNNQNRRFQKPAFKSEFEERIVKLKRISKTTKGGRNMRFSVLVVVGNRKGKIGYGIAKALEVPNAIKKAIKAAHNSLHTIEIHKGSIYHEVIGRSGASRVLLKPAPQGTGIIAGGAIRAIIELAGYSDIYTKNLGRNTPINMIHATMDGILKQLSPRRVAILRNKNLNEL

SEQ ID NO: 64303 - protein, 116 aa, Mycoplasma pneumoniae
MKTRTEQRRLRHKRIVKKIRATNHDNRVVLMVIKSLNHISVQAWDFSQNIVLASSSSLALKLKNGNKDNAKLVGQDIADKLVKLKLTNVVFDTGGSKYHGRIAALAEAARERGLNF

SEQ ID NO: 64304 - protein, 184 aa, Mycoplasma pneumoniae
MSKIGNRTITLDPAKVNLNFQKDHIAVKGPLGQIELKLPPNLPLKFELKDNNLQITRNNELKQSKIFHGTYNALITNAIIGVTQGFEKKLRLVGVGYRANVEGETLNLQLGYSHPIKEKIPKGLTVKVEKNTEITISGISKELVGQFATEVRKWRKPEPYKGKGVLYFDEVIVRKAGKTAEGKK

SEQ ID NO: 64305 - protein, 142 aa, Mycoplasma pneumoniae
MITTTKPIKAHFDPVADLLTKINNARKAKLMTVTTIASKLKIAILEILVKEGYLANFQVLENKSKTKRIVTFNLKYTQRRIPSINGVKQISKPGLRIYRPFEKLPLVLNGLGIAIISTSDGVMTDKVARLKKIGGEILAYVW

SEQ ID NO: 64306 - protein, 61 aa, Mycoplasma pneumoniae
MAKKSLKVKQTRIPKFAVRAYTRCQRCGRARAVLSHFGVCRLCFRELAYAGAIPGVKKASW

SEQ ID NO: 64307 - protein, 180 aa, Mycoplasma pneumoniae
MNNLKAHYQKTIAKELQKSFAFSSIMQVPRLEKIVINMGVGDAIRDSKFLESALNELHLISGQKPVATKAKNAISTYKLRAGQLIGCKVTLRGERMWAFLEKLIYVALPRVRDFRGLSLKSFDGRGNYTIGIKEQIIFPEIVYDDIKRIRGFDVTLVTSTNKDSEALALLRALNLPLVKG

SEQ ID NO: 64308 - protein, 111 aa, Mycoplasma pneumoniae
MQRIKKGDKVVVITGKNKGGSGIVLKIMPARQQAIVEGLNKVTRHKKKDQTTKRAAKQSTGKVQQEAPIFLSKLALFDQKAKQQTIGKIKYVMDPKTNKKTRVFKKSNNTL

SEQ ID NO: 64309 - protein, 122 aa, Mycoplasma pneumoniae
MVSFMTRLNVADNTGAKQVGIIKVLGSTRKRYAFLGDVVVVSVKDAIPSGMVKKGQVLRAVIVRTKKGQQRKDGTHLKFDDNACVLIKEDKSPRGTRIFGPVARELRERGYNKILSLAVEVV

SEQ ID NO: 64310 - protein, 85 aa, Mycoplasma pneumoniae
MKRNQRKVLIGIVKSTKNAKTATVQVESRFKHPLYHKSVVRHKKYQAHNEGEVLAKDGDKVQIVETRPLSATKRFRIAKIIERAK

SEQ ID NO: 64311 - protein, 111 aa, Mycoplasma pneumoniae
MTVAKELRQKSSEELVKLVIKLKGELLEYRFKLAHGELDKPHLINQTRRLLATILTILTERKLNWQEEQAKYKLLTKKTNEAAVNAWKQHLEANKAKLLKSRAKREDASKK

SEQ ID NO: 64312 - protein, 139 aa, Mycoplasma pneumoniae
MLQPKRTKYRKPHNVSYEGKAKGNSYVAFGEYGLVATKGNWIDARAIESARIAISKCLGKTGKMWIRIFPHMSKTKKPLEVRMGSGKGNPEFWVAVVKQGTVMFEVANIPESQMIKALTRAGHKLPVTWKILKREEVSA

SEQ ID NO: 64313 - protein, 273 aa, Mycoplasma pneumoniae
MGQKVNSNGLRFGINKNWISRWTANSHAQTAKWLIEDEKIRNLFFVNYRNAQVSNVEIERTQATVDVFVYAAQPAFLIGSENKNIQKITKQIKQIIGRTTNLDLTINEIGSPMLSARIIARDLANAIEARVPLRTAMRQSLIKVLKAGANGIKVLVSGRLNGAEIARDKMYIEGNMPLSTLRADIDYALEKAQTTYGVIGVKVWINRGMIYTKGLNRTPAHILHPQKKQPNRQNQQPRHFNQGQVLSANKLTGSDVETSSIQALTKPNKEDKQ

SEQ ID NO: 64314 - protein, 184 aa, Mycoplasma pneumoniae
MTWWGTNSVSSPRPVTSNNTPLTVSMIAFAKQFRVRISPQKARLVCQLIVGKKTADAQNILSNTPKKAATLIAKLLNSAIANATNNHGMNGDALYVFECVANQGPSMKRTIPRAKGSSNMITKRSSNLVVKLSDNPNERQELIKQQKALVKKRVEGQQKAKMARQKAVTSVVKAPSKTQGGVQK

SEQ ID NO: 64315 - protein, 87 aa, Mycoplasma pneumoniae
MSRSAKKGAFVDAHLLKKVIDMNKQEKKRPIKTWSRRSTIFPEFVGNTFAVHNGKTFINVYVTDDMVGHKLGEFSPTRNFKQHTANR

SEQ ID NO: 64316 - protein, 287 aa, Mycoplasma pneumoniae
MPIKKIISRSNSGIHHSTVIDYKKLLTTNKNKPEKSLLVTLKKHGGRNNQGKITVRHQGGRNKRKYRIIDFKRTHYDNIEATVKSIEYDPNRSCFVSLITYANGAKSYIISPDGIKVGDKILASEHPIDIKPGFSMPLAFIPEGTQVHNIELHPKGGGQIARSAGSYARILGQDETGKYVILQLLSGETRKFLKECRATVGVVSNLDHNLVVIGKAGRNRHRGIRPTVRGSAMNPNDHPHGGGEGRSPVGRDAPRTPWGKRHMGVKTRNMKKASTNLIIRNRKGEQY

SEQ ID NO: 64317 - protein, 237 aa, Mycoplasma pneumoniae
MDVTNVLLKPVLTEKVYFNQMGETKKYVFVVNPKASKTRVKLAFELVYGIKPLKVNTLIRKPTTIRGGSRFPGLSKLEKLAVITLPKGIAISVTGEAPEKTDKPADKTTLKESTVKEIKDTKNSPEAVVKTAVEALQIKPTAAPVTTAPLQTVAVKVAKEVKEVKVEKPVKVEKPTKPAKVAKEAKTTKVAKETKAEKSVQTTKVAKETKTEKSAKTTKTTATKTTKTKTTKKEVKK

SEQ ID NO: 64318 - protein, 212 aa, Mycoplasma pneumoniae
MAKLKLIKIDGSFETEPVKLSPGLIAKELKQQPVFDAVLVEQASWRQGTHSILTKGEVRGGGKKPYKQKHTGKARQGSTRNPHFVGGGIVFGPKPNRNYSLKLNKKAHTAALHTVWSEKLASDNTHLVDQNLFNKTEGKTKVMMQFLKSAKLLDKNVLFVVNTLNTNLEQSTSNIKNVQVKHLDKVSVRDLMLANALLVEKEVLKALEGKFK

SEQ ID NO: 64319 - protein, 287 aa, Mycoplasma pneumoniae
MEIRGIFGVKVGMSQVFTTNNERLPITVIYCEPNQVAGVKTEAKDKYSATLLSFDTVENKKLNKPQQGFFEKNNLKPTKHLQEIRNMTGFEMGQQITPQNLFQVGEYVDVSAISKGRGFTGAIKRWNFKIGPLGHGAGYPHRFQGSVQAGRGGASAQRVFKGKKMSGHYGHEKVTVQNLRIVGFDEANMLVLVSGAIAGPEGGVVLIRTAKKKPGVVKPIELAVQTEKAPEAKPAKLSKKKQAKELAKAQAANQQTVEAKVDTPVVEPKPTEVKKAAPVVEKKGEDK

SEQ ID NO: 64320 - protein, 108 aa, Mycoplasma pneumoniae
MNAANAVKYPELKIKLESYDSTLLDLTTKKIVEVVKGVDVKIKGPLPLPTKKEVITIIRSPHVDKASREQFEKNRHKRLMILVDVNQGAIDSLKRIKIPVGVTLRFSK

SEQ ID NO: 64321 - protein, 424 aa, Mycoplasma pneumoniae
MESAPSGGLLALIIISIILLACISAVVSAYETAITSITSYKWSNYVKTHNKQKKLTTKIVNHFQKNYSACLITILVANNIVAILVSNILFLALDQSIKNPAISSALNLLISGVLLLMLCEITPKTLARINIIRVLVYFAVVVYFFYILFWPITKLASIIFAKYEKAPPVSRRDVYFFIDEIEQNGLFTKEDGQLIKRTLIFDQVLVDQIMIKWNRVVYCYEGDPVKTIKEKFLHGQFSRMPVLDQTSNEVVGFIHLKDLFSSLEKSNEPFVLQELLYPAVLVSNTTPIKQALRQMRLHRAHLAVVQDKHHHTIGIVSMEDIIEELVGEIYDEHDEVEAVQTLDNNTWLVLPNVKAAFFFNKWIKRDLVKSKNMTIQRYLASFENDGLNTQNKLETPWFIAEAIVDSENPEQIRYEIRKKSDVVD

SEQ ID NO: 64322 - protein, 269 aa, Mycoplasma pneumoniae
MQQTLIIGAFDGLHKGHQLLAQAASGPVVALLIANIPSLQSDWLYEPKQRQVQLQQHFQSVVHSYDVIEHNISAQAFFDQIISPLRCQQLVVGADFCFGKDNQNADFLRRLFPNTTIIPKDSQTLSSSTIRQWLKQGQIEQANAVLLEPYFREGVVIRGNQQARFLGWPTANITLKPYMVPLRCGSYVITVTYHQTNYPGVGFISYKNDQLVCETHLIGFSGDLYGKQLRFTFNQFIRPQQKFSGVQALQKAISGDLKQAQKWFAQSTN

SEQ ID NO: 64323 - protein, 617 aa, Mycoplasma pneumoniae
MSKHKPRHFQKNKFDNRAKTSAKQQFRQVKTGVKDGVFVYKGPLTVSEFCLKTNIPTANIIKHFFLNGVPLTLNSVLSTEQLADACVNFGFDFKVETEITHDNIISNIKFDDDPTQLSPRPPIVTIMGHVDHGKTSLLDAIRQTNTAAKEFGGITQKIGAYQVKNQEGKTITFIDTPGHEAFTGMRARGAQVTDIVVLVVAGDDGLKQQTEEAISHAKSAKTPIIVFINKMDKPTANPDMVIQQLNKFDLVPEEWGGDTIFVKGSALTKEGIQELLDSILLVAEVEDYKANFNAHSSGYAIEVQTTKGLGPTATIIVKRGTLKIGDIVVLGPAWGKVRTMQDENGVHLQEAMPSKPVQISGFDIVPVAGEKFIVFDDEKDAKLIANKFREQQKQKLNTTQINEELKQKIKSKEIKVLNLIFKVDSDGSLAAIKQAMQSIDVPGMSVNIIHSGVGLISENDIMLAKASGALLFSLNLGLSQVVKNIASLQGVKVDVHYHIPKLAEEIENILKGQLEPVYEDVELGRAEVLQLWYHSKVGHIAGTLVKTGKVKRGALCKLLRRNETIYEGRVDSLKSEKNPVNQMEAGKNCGIVINGCEDIQVCDIILVYEKQEVKSKS

SEQ ID NO: 64324 - protein, 540 aa, Mycoplasma pneumoniae
MNNQSNHFTNPLLQLIKNVAETKNLAIDDVVLCLKTALAQTYKKHLNYVNVEVNIDFNKGLMQIEQLFDVVDDNNEDYDDFLEMPLSEAKKLNPNLEVGGVLRKPVSLKDIKGDLISKMVLLFNQKINETAFKTVMSDFINEVGQVIEARVEDIDTNKDGGLKGYIVNLETTKGYMPKRELSKGEKLDIGKKYLFVIKEIQKQSSMWPITLSRSDSRLLEFLLNSNTPEIANGTIEIKKMERSPGTKSKVAVISKDPVVDPIAAILGPKGERIRGISEEFNGEIIDIVIWNEDKLKFLVNAVLPAEVVGYNILQDDERDTSIEIVVPANQIANVFGFKGINIRLISNLTGWSSVDVYTEKDAAEQGIEFTRVNFQPQGIFGIKKRRDKISNNPRNNNQQLASDKVFYTSKANVVDDEIIVDLAKQAEAKRVKQIKQEATKPELQLQQELNLEATPKVAAPTPTPAPQPTPAPTKVEPVPPPVSVTPKPIPKVNKPKPVVKPKSVFSITVEADDSKTKPEKSSAKTNTPQTKQTFDNFDDL

SEQ ID NO: 64325 - protein, 507 aa, Mycobacterium tuberculosis
MTDDPGSGFTTVWNAVVSELNGDPKVDDGPSSDANLSAPLTPQQRAWLNLVQPLTIVEGFALLSVPSSFVQNEIERHLRAPITDALSRRLGHQIQLGVRIAPPATDEADDTTVPPSENPATTSPDTTTDNDEIDDSAAARGDNQHSWPSYFTERPHNTDSATAGVTSLNRRYTFDTFVIGASNRFAHAAALAIAEAPARAYNPLFIWGESGLGKTHLLHAAGNYAQRLFPGMRVKYVSTEEFTNDFINSLRDDRKVAFKRSYRDVDVLLVDDIQFIEGKEGIQEEFFHTFNTLHNANKQIVISSDRPPKQLATLEDRLRTRFEWGLITDVQPPELETRIAILRKKAQMERLAVPDDVLELIASSIERNIRELEGALIRVTAFASLNKTPIDKALAEIVLRDLIADANTMQISAATIMAATAEYFDTTVEELRGPGKTRALAQSRQIAMYLCRELTDLSLPKIGQAFGRDHTTVMYAQRKILSEMAERREVFDHVKELTTRIRQRSKR

SEQ ID NO: 64326 - protein, 402 aa, Mycobacterium tuberculosis
MDAATTRVGLTDLTFRLLRESFADAVSWVAKNLPARPAVPVLSGVLLTGSDNGLTISGFDYEVSAEAQVGAEIVSPGSVLVSGRLLSDITRALPNKPVDVHVEGNRVALTCGNARFSLPTMPVEDYPTLPTLPEETGLLPAELFAEAISQVAIAAGRDDTLPMLTGIRVEILGETVVLAATDRFRLAVRELKWSASSPDIEAAVLVPAKTLAEAAKAGIGGSDVRLSLGTGPGVGKDGLLGISGNGKRSTTRLLDAEFPKFRQLLPTEHTAVATMDVAELIEAIKLVALVADRGAQVRMEFADGSVRLSAGADDVGRAEEDLVVDYAGEPLTIAFNPTYLTDGLSSLRSERVSFGFTTAGKPALLRPVSGDDRPVAGLNGNGPFPAVSTDYVYLLMPVRLPG

SEQ ID NO: 64327 - protein, 714 aa, Mycobacterium tuberculosis
MGKNEARRSALAPDHGTVVCDPLRRLNRMHATPEESIRIVAAQKKKAQDEYGAASITILEGLEAVRKRPGMYIGSTGERGLHHLIWEVVDNAVDEAMAGYATTVNVVLLEDGGVEVADDGRGIPVATHASGIPTVDVVMTQLHAGGKFDSDAYAISGGLHGVGVSVVNALSTRLEVEIKRDGYEWSQVYEKSEPLGLKQGAPTKKTGSTVRFWADPAVFETTEYDFETVARRLQEMAFLNKGLTINLTDERVTQDEVVDEVVSDVAEAPKSASERAAESTAPHKVKSRTFHYPGGLVDFVKHINRTKNAIHSSIVDFSGKGTGHEVEIAMQWNAGYSESVHTFANTINTHEGGTHEEGFRSALTSVVNKYAKDRKLLKDKDPNLTGDDIREGLAAVISVKVSEPQFEGQTKTKLGNTEVKSFVQKVCNEQLTHWFEANPTDAKVVVNKAVSSAQARIAARKARELVRRKSATDIGGLPGKLADCRSTDPRKSELYVVEGDSAGGSAKSGRDSMFQAILPLRGKIINVEKARIDRVLKNTEVQAIITALGTGIHDEFDIGKLRYHKIVLMADADVDGQHISTLLLTLLFRFMRPLIENGHVFLAQPPLYKLKWQRSDPEFAYSDRERDGLLEAGLKAGKKINKEDGIQRYKGLGEMDAKELWETTMDPSVRVLRQVTLDDAAAADELFSILMGEDVDARRSFITRNAKDVRFLDV

SEQ ID NO: 64328 - protein, 838 aa, Mycobacterium tuberculosis
MTDTTLPPDDSLDRIEPVDIEQEMQRSYIDYAMSVIVGRALPEVRDGLKPVHRRVLYAMFDSGFRPDRSHAKSARSVAETMGNYHPHGDASIYDSLVRMAQPWSLRYPLVDGQGNFGSPGNDPPAAMRYTEARLTPLAMEMLREIDEETVDFIPNYDGRVQEPTVLPSRFPNLLANGSGGIAVGMATNIPPHNLRELADAVFWALENHDADEEETLAAVMGRVKGPDFPTAGLIVGSQGTADAYKTGRGSIRMRGVVEVEEDSRGRTSLVITELPYQVNHDNFITSIAEQVRDGKLAGISNIEDQSSDRVGLRIVIEIKRDAVAKVVINNLYKHTQLQTSFGANMLAIVDGVPRTLRLDQLIRYYVDHQLDVIVRRTTYRLRKANERAHILRGLVKALDALDEVIALIRASETVDIARAGLIELLDIDEIQAQAILDMQLRRLAALERQRIIDDLAKIEAEIADLEDILAKPERQRGIVRDELAEIVDRHGDDRRTRIIAADGDVSDEDLIAREDVVVTITETGYAKRTKTDLYRSQKRGGKGVQGAGLKQDDIVAHFFVCSTHDLILFFTTQGRVYRAKAYDLPEASRTARGQHVANLLAFQPEERIAQVIQIRGYTDAPYLVLATRNGLVKKSKLTDFDSNRSGGIVAVNLRDNDELVGAVLCSAGDDLLLVSANGQSIRFSATDEALRPMGRATSGVQGMRFNIDDRLLSLNVVREGTYLLVATSGGYAKRTAIEEYPVQGRGGKGVLTVMYDRRRGRLVGALIVDDDSELYAVTSGGGVIRTAARQVRKAGRQTKGVRLMNLGEGDTLLAIARNAEESGDDNAVDANGADQTGN

SEQ ID NO: 64329 - protein, 626 aa, Mycobacterium tuberculosis; identical to SEQ ID NO: 62868

SEQ ID NO: 64330 - protein, 771 aa, Mycobacterium tuberculosis; identical to SEQ ID NO: 62647

SEQ ID NO: 64331 - protein, 441 aa, Mycobacterium tuberculosis
MPRVEVGLVIHSRMHARAPVDVWRSVRSLPDFWRLLQVRVASQFGDGLFQAGLAGALLFNPDRAADPMAIAGAFAVLFLPYSLLGPFAGALMDRWDRRWVLVGANTGRLALIAGVGTILAVGAGDVPLLVGALVANGLARFVASGLSAALPHVVPREQVVTMNSVAIASGAVSAFLGANFMLLPRWLLGSGDEGASAIVFLVAIPVSIALLWSLRFGPRVLGPDDTERAIHGSAVYAVVTGWLHGARTVVQLPTVAAGLSGLAAHRMVVGINSLLILLLVRHVTARAVGGLGTALLFFAATGLGAFLANVLTPTAIRRWGRYATANGALAAAATIQVAAAGLLVPVMVVCGFLLGVAGQVVKLCADSAMQMDVDDALRGHVFAVQDALFWVSYILSITVAAALIPEHGHAPVFVLFGSAIYLAGLVVHTIVGRRGQPVIGR

SEQ ID NO: 64332 - protein, 969 aa, Mycobacterium tuberculosis
MTESPTAGPGGVPRADDADSDVPRYRYTAELAARLERTWQENWARLGTFNVPNPVGSLAPPDGAAVPDDKLFVQDMFPYPSGEGLHVGHPLGYIATDVYARYFRMVGRNVLHALGFDAFGLPAEQYAVQTGTHPRTRTEANVVNFRRQLGRLGFGHDSRRSFSTTDVDFYRWTQWIFLQIYNAWFDTTANKARPISELVAEFESGARCLDGGRDWAKLTAGERADVIDEYRLVYRADSLVNWCPGLGTVLANEEVTADGRSDRGNFPVFRKRLRQWMMRITAYADRLLDDLDVLDWPEQVKTMQRNWIGRSTGAVALFSARAASDDGFEVDIEVFTTRPDTLFGATYLVLAPEHDLVDELVAASWPAGVNPLWTYGGGTPGEAIAAYRRAIAAKSDLERQESREKTGVFLGSYAINPANGEPVPIFIADYVLAGYGTGAIMAVPGHDQRDWDFARAFGLPIVEVIAGGNISESAYTGDGILVNSDYLNGMSVPAAKRAIVDRLESAGRGRARIEFKLRDWLFARQRYWGEPFPIVYDSDGRPHALDEAALPVELPDVPDYSPVLFDPDDADSEPSPPLAKATEWVHVDLDLGDGLKPYSRDTNVMPQWAGSSWYELRYTDPHNSERFCAKENEAYWMGPRPAEHGPDDPGGVDLYVGGAEHAVLHLLYSRFWHKVLYDLGHVSSREPYRRLVNQGYIQAYAYTDARGSYVPAEQVIERGDRFVYPGPDGEVEVFQEFGKIGKSLKNSVSPDEICDAYGADTLRVYEMSMGPLEASRPWATKDVVGAYRFLQRVWRLVVDEHTGETRVADGVELDIDTLRALHRTIVGVSEDFAALRNNTATAKLIEYTNHLTKKHRDAVPRAAVEPLVQMLAPLAPHIAEELWLRLGNTTSLAHGPFPKADAAYLVDETVEYPVQVNGKVRGRVVVAADTDEETLKAAVLTDEKVQAFLAGATPRKVIVVAGRLVNLVI

SEQ ID NO: 64333 - protein, 298 aa, Mycobacterium tuberculosis; identical to SEQ ID NO: 62871

SEQ ID NO: 64334 - protein, 678 aa, Mycobacterium tuberculosis
MVILLPMVTFTMAYLIVDVPKPGDIRTNQVSTILASDGSEIAKIVPPEGNRVDVNLSQVPMHVRQAVIAAEDRNFYSNPGFSFTGFARAVKNNLFGGDLQGGSTITQQYVKNALVGSAQHGWSGLMRKAKELVIATKMSGEWSKDDVLQAYLNIIYFGRGAYGISAASKAYFDKPVEQLTVAEGALLAALIRRPSTLDPAVDPEGAHARWNWVLDGMVETKALSPNDRAAQVFPETVPPDLARAENQTKGPNGLIERQVTRELLELFNIDEQTLNTQGLVVTTTIDPQAQRAAEKAVAKYLDGQDPDMRAAVVSIDPHNGAVRAYYGGDNANGFDFAQAGLQTGSSFKVFALVAALEQGIGLGYQVDSSPLTVDGIKITNVEGEGCGTCNIAEALKMSLNTSYYRLMLKLNGGPQAVADAAHQAGIASSFPGVAHTLSEDGKGGPPNNGIVLGQYQTRVIDMASAYATLAASGIYHPPHFVQKVVSANGQVLFDASTADNTGDQRIPKAVADNVTAAMEPIAGYSRGHNLAGGRDSAAKTGTTQFGDTTANKDAWMVGYTPSLSTAVWVGTVKGDEPLVTASGAAIYGSGLPSDIWKATMDGALKGTSNETFPKPTEVGGYAGVPPPPPPPEVPPSETVIQPTVEIAPGITIPIGPPTTITLAPPPPAPPAATPTPPP

SEQ ID NO: 64335 - protein, 96 aa, Mycobacterium tuberculosis; identical to SEQ ID NO: 62385

SEQ ID NO: 64336 - protein, 164 aa, Mycobacterium tuberculosis; identical to SEQ ID NO: 62870

SEQ ID NO: 64337 - protein, 84 aa, Mycobacterium tuberculosis; identical to SEQ ID NO: 62869

SEQ ID NO: 64338 - protein, 152 aa, Mycobacterium tuberculosis; identical to SEQ ID NO: 62768

SEQ ID NO: 64339 - protein, 874 aa, Mycobacterium tuberculosis
MAVVDDLAPGMDSSPPSEDYGRQPPQDLAAEQSVLGGMLLSKDAIADVLERLRPGDFYRPAHQNVYDAILDLYGRGEPADAVTVAAELDRRGLLRRIGGAPYLHTLISTVPTAANAGYYASIVAEKALLRRLVEAGTRVVQYGYAGAEGADVAEVVDRAQAEIYDVADRRLSEDFVALEDLLQPTMDEIDAIASSGGLARGVATGFTELDEVTNGLHPGQMVIVAARPGVGKSTLGLDFMRSCSIRHRMASVIFSLEMSKSEIVMRLLSAEAKIKLSDMRSGRMSDDDWTRLARRMSEISEAPLFIDDSPNLTMMEIRAKARRLRQKANLKLIVVDYLQLMTSGKKYESRQVEVSEFSRHLKLLAKELEVPVVAISQLNRGPEQRTDKKPMLADLRESGCLTASTRILRADTGAEVAFGELMRSGERPMVWSLDERLRMVARPMINVFPSGRKEVFRLRLASGREVEATGSHPFMKFEGWTPLAQLKVGDRIAAPRRVPEPIDTQRMPESELISLARMIGDGSCLKNQPIRYEPVDEANLAAVTVSAAHSDRAAIRDDYLAARVPSLRPARQRLPRGRCTPIAAWLAGLGLFTKRSHEKCVPEAVFRAPNDQVALFLRHLWSAGGSVRWDPTNGQGRVYYGSTSRRLIDDVAQLLLRVGIFSWITHAPKLGGHDSWRLHIHGAKDQVRFLRHVGVHGAEAVAAQEMLRQLKGPVRNPNLDSAPKKVWAQVRNRLSAKQMMDIQLHEPTMWKHSPSRSRPHRAEARIEDRAIHELARGDAYWDTVVEITSIGDQHVFDGTVSGTHNFVANGISLHNSLEQDADVVILLHRPDAFDRDDPRGGEADFILAKHRNGPTKTVTVAHQLHLSRFANMAR

SEQ ID NO: 64340 - protein, 461 aa, Mycobacterium tuberculosis; identical to SEQ ID NO: 62866

SEQ ID NO: 64341 - protein, 425 aa, Mycobacterium tuberculosis
MNTLNDSLTAFDPDIAALIDGELRRQESGLEMIASENYAPLAVMQAQGSVLTNKYAEGYPGRRYYGGCEFVDGVEQLAIDRVKALFGAEYANVQPHSGATANAATMHALLNPGDTILGLSLAHGGHLTHGMRINFSGKLYHATAYEVSKEDYLVDMDAVAEAARTHRPKMIIAGWSAYPRQLDFARFRAIADEVDAVLMVDMAHFAGLVAAGVHPSPVPHAHVVTSTTHKTLGGPRGGIILCNDPAIAKKINSAVFPGQQGGPLEHVIAAKATAFKMAAQPEFAQRQQRCLDGARILAGRLTQPDVAERGIAVLTGGTDVHLVLVDLRDAELDGQQAEDRLAAVDITVNRNAVPFDPRPPMITSGLRIGTPALAARGFSHNDFRAVADLIAAALTATNDDQLGPLRAQVQRLAARYPLYPELHRT

SEQ ID NO: 64342 - protein, 255 aa, Mycobacterium tuberculosis; identical to SEQ ID NO: 62551

SEQ ID NO: 64343 - protein, 2512 aa, Mycobacterium tuberculosis; identical to SEQ ID NO: 62769

SEQ ID NO: 64344 - protein, 685 aa, Mycobacterium tuberculosis
MPARSVPRPRWVAPVRRVGRLAVWDRPERRSGIPALDGLRAIAVALVLASHGGIPGMGGGFIGVDAFFVLSGFLITSLLLDELGRTGRIDLSGFWIRRARRLLPALVLMVLTVSAARALFPDQALTGLRSDAIAAFLWTANWRFVAQNTDYFTQGAPPSPLQHTWSLGVEEQYYVVWPLLLIGATLLLAARARRRCRRATVGGVRFAAFLIASLGTMASATAAVAFTSAATRDRIYFGTDTRAQALLIGSAAAALLVRDWPSLNRGWCLIRTRWGRRIARLLPFVGLAGLAVTTHVATGSVGEFRHGLLIVVAGAAVIVVASVAMEQRGAVARILAWRPLVWLGTISYGVYLWHWPIFLALNGQRTGWSGPALFAARCAATVVLAGASWWLIEQPIRRWRPARVPLLPLAAATVASAAAVTMLVVPVGAGPGLREIGLPPGVSAVAAVSPSPPEASQPAPGPRDPNRPFTVSVFGDSIGWTLMHYLPPTPGFRFIDHTVIGCSLVRGTPYRYIGQTLEQRAECDGWPARWSAQVNRDQPDVALLIVGRWETVDRVNEGRWTHIGDPTFDAYLNAELQRALSIVGSTGVRVMVTTVPYSRGGEKPDGRLYPEDQPERVNKWNAMLHNAISQHSNVGMIDLNKKLCPDGVYTAKVDGIKVRSDGVHLTQEGVKWLIPWLEDSVRVAS

SEQ ID NO: 64345 - protein, 314 aa, Mycobacterium tuberculosis
MLFRQLEYFVAVAQERHFARAAEKCYVSQPALSSAIAKLERELNVTLINRGHSFEGLTREGERLVVWAKRILAEHAAFKAEVDAVRSGITGTLRLGTVPTASTTASLVLSAFCSAHPLAKVQVCSRLAATELYRRLREFELDAVIVHPETQDSDDVDLVPLYEEQYVLLSPADMLPPGTSTLVWRDAAQLPLALLTADMRDRQVIDAAFADHAVSAIPQVETDSVASLFAQVATGNWASIVPHTWLWAMPMSGPTGGEIRAVELVDPVLKAQIALATNALGPGSPVARALITCAQALALNEFFDTQLRGITRRR

SEQ ID NO: 64346 - protein, 122 aa, Mycobacterium tuberculosis; identical to SEQ ID NO: 62644

SEQ ID NO: 64347 - protein, 487 aa, Mycobacterium tuberculosis
MSFVSVAPEIVVAAATDLAGIGSAISAANAAAAAPTTAVLAAGADEVSAAIAALFSGHAQAYQALSAQAAAFHQQFVQTLAGGAGAYAAAEAQVEQQLLAAINAPTQALLGRPLIGNGADGAPGTGQAGGAGGILYGNGGNGGSGAAGQAGGAGGPAGLIGHGGSGGAGGSGAAGGAGGHGGWLWGNGGVGGSGGAGVGAGVAGGHGGAGGAAGLWGAGGGGGNGGNGADANIVSGGDGGLGGAGGGGGWLYGDGGAGGHGGQGAIGLGGGAGGDGGQGGAGRGLWGTGGAGGHGGQGGGTGGPPLPGQAGMGAAGGAGGLIGNGGAGGDGGVGASGGVAGVGGAGGNAMLIGHGGAGGAGGDSSFANGAAGGAGGAGGHLFGNGGSGGHGGAVTAGNTGIGGAGGVGGDARLIGHGGAGGAGGDRAGALVGRDGGPGGNGGAGGQLYGNGGDGAPGTGGTLQAAVSGLVTALFGAPGQPGDTGQPG

SEQ ID NO: 64348 - protein, 366 aa, Mycobacterium tuberculosis; identical to SEQ ID NO: 62629

SEQ ID NO: 64349 - protein, 264 aa, Mycobacterium tuberculosis
MIKHDVVWVTLWPERPNNKPPPSPRQVPGNPGPTLKVLASHVNAPLSAKPRSQLPLRRAQLSDEVAGHLRAAIMSGALRSGTFIRLDETAAELGVSVTPVREALLKLRGEGMVGLEPHRGHVVLPLTRQDIDDIFWLQATIAQELATSATAHITDVEIDELDRINNALAGAIGSGDAKTIASIEFAFHRVFNKASRRIKLAWFLLNAARYMGAGVRGRPAMGRGRGEQSSAADRRAAPPRHSRRNRAHRLAVHRWGTQADGGPG

SEQ ID NO: 64350 - protein, 323 aa, Mycobacterium tuberculosis
MWAEKSPRRSSAGSRPEFSASTLTSMSLRRVSDTLTGAAVTLPVMTTTRTERNFAGIGDVRIVYDVWTPDTAPQAVVVLAHGLGEHARRYDHVAQRLGAAGLVTYALDHRGHGRSGGKRVLVRDISEYTADFDTLVGIATREYPGCKRIVLGHSMGGGIVFAYGVERPDNYDLMVLSAPAVAAQDLVSPVVAVAAKLLGVVVPGLPVQELDFTAISRDPEVVQAYNTDPLVHHGRVPAGIGRALLQVGETMPRRAPALTAPLLVLHGTDDRLIPIEGSRRLVECVGSADVQLKEYPGLYHEVFNEPERNQVLDDVVAWLTERL

SEQ ID NO: 64351 - protein, 691 aa, Mycobacterium tuberculosis
MTDDERFSLLVGLTGASDLWPVRDERIPQGVPMCAGYVPGIPRLGVPALLMSDAGLGVTNPGYRPGDTATALPAGLALAASFNPVLARSSGKAIGREARSRGFNVQLAGAINLARDPRNGRNFEYLSEDPLLSATMAAESIIGIQQQGVIATTKHFSLNCNETNRHWLDAVIDPDAHRESDLLAFEIVIERSQPGAVMAAYNKVNGDYAAGNDHLLNDVLKGAWGYRGWVMSDWGGTPSWECALAGLDQECGAQIDAVLWQSEAFTDRLRAAYADGNLPKGRLSDMVRRILRSMFAVGIDRWKPAPAPDMNAHNEIAAQMARQGIVLLQNRGLLPLAPESAGRIAVIGGYAHLGVPAGYGSSAVTPPGGYAGVIPIGGSGLAAGLRNLYLLPSSPLSELRKRLPNAQFEFDPGINPAEAVLAARRADIAIVFAIRAEGEGFDSADLSLPWGQDALIAAVASANANTVVVLETGNPVTMPWRDSVNAIMQAWYPGQAGGQAVAEIVTGQVNPSGRLPITFPVDLGQTPRSQPPELGAPWGTSTTIHYTEGADVGYRWFASTNQTPMFAFGHGLSYTSFEYRDLVVTGGHTVHASFSVTNTGDRSGADVPQLYMIAAPGESRLRLLGFERVELEPGQTRRVRIEADPRLLARYDGEARSWRIEPGGYTVAVGASAVALKLAAKVKLAGRGFGR

SEQ ID NO: 64352 - protein, 575 aa, Mycobacterium tuberculosis; identical to SEQ ID NO: 62632

SEQ ID NO: 64353 - protein, 96 aa, Mycobacterium tuberculosis; identical to SEQ ID NO: 62631

SEQ ID NO: 64354 - protein, 413 aa, Mycobacterium tuberculosis
MTAPTGTSATTTRPWTPRIATQLSVLACAAFIYVTAEILPVGALSAIARNLRVSVVLVGTLLSWYALVAAVTTVPLVRWTAHWPRRRALVVSLVCLTVSQLVSALAPNFAVLAAGRVLCAVTHGLLWAVIAPIATRLVPPSHAGRATTSIYIGTSLALVVGSPLTAAMSLMWGWRLAAVCVTGAAAAVALAARLALPEMVLRADQLEHVGRRARHHRNPRLVKVSVLTMIAVTGHFVSYTYIVVIIRDVVGVRGPNLAWLLAAYGVAGLVSVPLVARPLDRWPKGAVIVGMTGLTAAFTLLTALAFGERHTAATALLGTGAIVLWGALATAVSPMLQSAAMRSGGDDPDGASGLYVTAFQIGIMAGALLGGLLYERSLAMMLTASAGLMGVALFGMTVSQHLFENPTLSPGDG

SEQ ID NO: 64355 - protein, 442 aa, Mycobacterium tuberculosis
MSDPARGAEAEDAYGFPAGLWRWLQRHPPPALHRLTRFRSPLRGPWLTSVFGLVLLVALPFVIITGLLSYIAYAPQLGQAIPGDVGWLRLPAFTWPTRPSWLYRLTQGLHVGLGLVIIPVVLAKLWSVIPRLFVWPPARSIAQVLERLSVLMLVGGILFQIVTGVLNIQYDYIFGFSFYTGHYFGAWVFIAGFLLHIVVKIPHMVTGLRSIPMREVLGTNVADTRAQPCDPDGLVSVNPGEATLSRRGALGLVGAGVLLIGVLTVGQTLGGFTRKAALLLPRGRVVSPGDFPVNKTAAAAGITAEAIGPDWRLVLCGGPAEVVLDRATLAGLPQRTARLPLACVEGWSAVRTWSGVPLAELALLAGVPAARSARVTSLQRGGAFGEAKLAANQIADPDALLALRVDGADLSLDHGYPARIIVPALPGVHNTKWVAGIEFHKR

SEQ ID NO: 64356 - protein, 326 aa, Mycobacterium tuberculosis
MPELNTARGPIDTADLGVTLMHEHVFIMTTEIAQNYPEAWGDEDKRVAGAIARLGELKARGVDTIVDLTVIGLGRYIPRIARVAAATELNIVVATGLYTYNDVPFYFHYLGPGAQLDGPEIMTDMFVRDIEHGIADTGIKAGILKCATDEPGLTPGVERVLRAVAQAHKRTGAPISTHTHAGLRRGLDQQRIFAEEGVDLSRVVIGHCGDSTDVGYLEELIAAGSYLGMDRFGVDVISPFQDRVNIVARMCERGHADKMVLSHDACCYFDALPEELVPVAMPNWHYLHIHNDVIPALKQHGVTDEQLHTMLVDNPRRIFERQGGYQ

SEQ ID NO: 64357 - protein, 388 aa, Mycobacterium tuberculosis
MAFPRTLAILAAAAALVVACSHGGTPTGSSTTSGASPATPVAVPVPRSCAEPAGIPALLSPRDKLAQLLVVGVRDAADAQAVVTNYHVGGILIGSDTDLTIFDGALAEIVAGGGPLPLAVSVDEEGGRVSRLRSLIGGTGPSARELAQTRTVQQVRDLARDRGRQMRKLGITIDFAPVVDVTDAPDDTVIGDRSFGSDPATVTAYAGAYAQGLRDAGVLPVLKHFPGHGRGSGDSHNGGVTTPPLDDLVGDDLVPYRTLVTQAPVGVMVGHLQVPGLTGSEPASLSKAAVNLLRTGTGYGAPPFDGPVFSDDLSGMAAISDRFGVSEAVLRTLQAGADIALWVTTKEVPAVLDRLEQALRAGELPMSAVDRSVVRVATMKGPNPGCGR

SEQ ID NO: 64358 - protein, 440 aa, Mycobacterium tuberculosis; identical to SEQ ID NO: 62774

SEQ ID NO: 64359 - protein, 853 aa, Mycobacterium tuberculosis
MPTAGSSRAPAAAREIVVVGHGMVGHRLVEAVRARDADGSLRITVLAEEGDAAYDRVGLTSYTESWDRALLALPGNDYAGDQRVRLLLNTRVTQIDRATKSVVTAAGQRHRYDTLVLATGSYAFVPPVPGHDLPACHVYRTFDDLDAIRAGAQRTLDGGHTDGGVVIGGGLLGLEAANALRQFGLQTHVVEMMPRLMAQQIDEAGGALLARMIADLGIAVHVGTGTESIESVKHSDGSVWARVRLSDGEVIDAGVVIFAAGIRPRDELARAAGLAIGDRGGVLTDLSCRTSDPDIYAVGEVAAIDGRCYGLVGPGYTSAEVVADRLLDGSAEFPEADLSTKLKLLGVDVASFGDAMGATENCLEVVINDAVKRTYAKLVLSDDATTLLGGVLVGDASSYGVLRPMVGAELPGDPLALIAPAGSGAGAGALGVGALPDSAQICSCNNVTKGELKCAIADGCGDVPALKSCTAAGTSCGSCVPLLKQLLEAEGVEQSKALCEHFSQSRAELFEIITATEVRTFSGLLDRFGRGKGCDICKPVVASILASTGSDHILDGEQASLQDSNDHFLANIQKNGSYSVVPRVPGGDIKPEHLILIGQIAQDFGLYTKITGGQRIDLFGARVDQLPLIWQRLVDGGMESGHAYGKAVRTVKSCVGSDWCRYGQQDSVQLAIDLELRYRGLRAPHKIKLGVSGCARECAEARGKDVGVIATEKGWNLYVAGNGGMTPKHAQLLASDLDKETLIRYIDRFLIYYIRTADRLQRTAPWVESLGLDHVREVVCEDSLGLAEEFEAAMQRHVANYKCEWKGVLEDPDKLSRFVSFVNAPDAVDSTVTFTERAGRKVPVSIGIPRVRS

SEQ ID NO: 64360 - protein, 463 aa, Mycobacterium tuberculosis; identical to SEQ ID NO: 62775

SEQ ID NO: 64361 - protein, 957 aa, Mycobacterium tuberculosis
MSFVIAAPEVIAAAATDLASLGSSISAANAAAAANTTALMAAGADEVSTAIAALFGAHGQAYQALSAQAQAFHAQFVQALTSGGGAYAAAEAAAVSPLLDPINEFFLANTGRPLIGNGANGAPGTGANGGDGGWLIGNGGAGGSGAAGVNGGAGGNGGAGGNGGAGGLIGNGGAGGAGGVASSGIGGSGGAGGNAMLFGAGGAGGAGGGVVALTGGAGGAGGAGGNAGLLFGAAGVGGAGGFTNGSALGGAGGAGGAGGLFATGGVGGSGGAGSSGGAGGAGGAGGLFGAGGTGGHGGFADSSFGGVGGAGGAGGLFGAGGEGGSGGHSLVAGGDGGAGGNAGMLALGAAGGAGGIGGDGGTLTAGGIGGAGGAGGNAGLLFGSGGSGGAGGFGFADGGQGGPGGNAGTVFGSGGAGGNGGVGQGFAGGIGGAGGTPGLIGNGGNGGNGGASAVTGGNGGIGGTGVLIGNGGNGGSGGIGAGKAGVGGVSGLLLGLDGFNAPASTSPLHTLQQNVLNVVNEPFQTLTGRPLIGNGANGTPGTGADGGAGGWLFGNGANGTPGTGAAGGAGGWLFGNGGNGGHGATNTAATATGGAGGAGGILFGTGGNGGTGGIATGAGGIGGAGGAGGVSLLIGSGGTGGNGGNSIGVAGIGGAGGRGGDAGLLFGAAGTGGHGAAGGVPAGVGGAGGNGGLFANGGAGGAGGFNAAGGNGGNGGLFGTGGTGGAGTNFGAGGNGGNGGLFGAGGTGGAAGSGGSGITTGGGGHGGNAGLLSLGASGGAGGSGGASSLAGGAGGTGGNGALLFGFRGAGGAGGHGGAALTSIQQGGAGGAGGNGGLLFGSAGAGGAGGSGANALGAGTGGTGGDGGHAGVFGNGGDGGCRRVWRRYRRQRWCRRQRRADRQRRQRRQRRQSRGHARCRRHRRAAARRERTQRLAIAGRPATTRGVEGISCSPQMMP

SEQ ID NO: 64362 - protein, 837 aa, Mycobacterium tuberculosis
MSFVIAAPEVIAAAATDLASLESSIAAANAAAAANTTALLAAGADEVSTAVAALFGAHGQAYQALSAQAQAFHAQFVQALTSGGGAYAAAEAAATSPLLAPINEFFLANTGRPLIGNGTNGAPGTGANGGDGGWLIGNGGAGGSGAAGVNGGAGGNGGAGGLIGNGGAGGAGGRASTGTGGAGGAGGAAGMLFGAAGVGGPGGFAAAFGATGGAGGAGGNGGLFADGGVGGAGGATDAGTGGAGGSGGNGGLFGAGGTGGPGGFGIFGGGAGGDGGSGGLFGAGGTGGSGGTSIINVGGNGGAGGDAGMLSLGAAGGAGGSGGSNPDGGGGAGGIGGDGGTLFGSGGAGGVCGLGFDAGGAGGAGGKAGLLIGAGGAGGAGGGSFAGAGGTGGAGGAPGLVGNAGNGGNGGASANGAGAAGGAGGSGVLIGNGGNGGSGGTGAPAGTAGAGGLGGQLLGRDGFNAPASTPLHTLQQQILNAINEPTQALTGRPLIGNGANGTPGTGADGGAGGWLFGNGGNGGHGATGADGGDGGSGGAGGILSGIGGTGGSGGIGTTGQGGTGGTGGAALLIGSGGTGGSGGFGLDTGGAGGRGGDAGLFLGAAGTGGQAALSQNFIGAGGTAGAGGTGGLFANGGAGGAGGFGANGGTGGNGLLFGAGGTGGAGTLGADGGAGGHGGLFGAGGTGGAGGSSGGTFGGNGGSGGNAGLLALGASGGAGGSGGSALNVGGTGGVGGNGGSGGSLFGFGGAGGTGGSSGIGSSGGTGGDGGTAGVFGNGGDGGAGGFGADTGGNSSSVPNAVLIGNGGNGGNGGKAGGTPGAGGTSGLIIGENGLNGL

SEQ ID NO: 64363 - protein, 591 aa, Mycobacterium tuberculosis
MSFVIAQPEMIAAAAGELASIRSAINAANAAAAAQTTGVMSAAADEVSTAVAALFSSHAQAYQAASAQAAAFHAQVVRTLTVDAGAYASAEAANAGPNMLAAVNAPAQALLGRPLIGNGANGAPGTGQAGGDGGLLFGNGGNGGSGAPGQAGGAGGAAGFFGNGGNGGDGGAGANGGAGGTAGWFFGFGGNGGAGGIGVAGINGGLGGAGGDGGNAGFFGNGGNGGMGGAGAAGVNAVNPGLATPVTPAANGGNGLNLVGVPGTAGGGADGANGSAIGQAGGAGGDGGNASTSGGIGIAQTGGAGGAGGAGGDGAPGGNGGNGGSVEHTGATGSSASGGNGATGGNGGVGAPGGAGGNGGHVSGGSVNTAGAGGKGGNGGTGGAGGPGGHGGSVLSGPVGDSGNGGAGGDGGAGVSATDIAGTGGRGGNGGHGGLWIGNGGDGGAGGVGGVGGAGAAGAIGGHGGDGGSVNTPIGGSEAGDGGKGGLGGDGGGRGIFGQFGAGGAGGAGGVGGAGGAGGTGGGGGNGGAIFNAGTPGAAGTGGDGGVGGTGAAGGKGGAGGSGGVNGATGADGAKGLDGATGGKGNNGNPG

SEQ ID NO: 64364 - protein, 2204 aa, Mycobacterium tuberculosis
MNLVSTTSGMSGFLNVGALGSGVANVGNTISGIYNVGTSDLSTPAVNSGLANIGTNIAGLLRDGAGTAAINLGLANHGNLNVGFASLGGFNFGGATIGHNNVGIGNTGIFDVGLANLGSYNIGFGNLGDDNLGFGNFGSYNIGFGNVGNDNLGFANAGGGNIGFANTGSNNVGFGNTGSNNVGIGLTGNGQIGFGSFNSGSGNIGLFNSGSNNIGFFNSGSGNFGIANSGSFNTGIGNTGNTNTGLFNSGDVNTGAFNPGSFNTGSFNTGSFNTGGFNPGNTNTGYLNIGNYNTGIANTGDVDTGAFITGNYSNGLFLSGDYQGLVGLNLVIDMPLPISLGVNIPIDIPITASAGNITLMGVTIPPTGDIVLSSIAGQRAHFGPITIPNITVVGPTTTVAIGGPNTAITITGGGAIRIPLISIPAAPGFGNSTTNPSSGFFNTGAGGASGFGNFGGANSGFWNLASATSGASGLLNVGALGSGLANVGTTVSGFYNTSTSDLATPAFNSGLANISTSIAGLLRDSTGTMVLNLGLANHGTLNVGIANLGDYNIGFANLGSANFGSANIGGNNIGGANTGIFDIGLANLGSYNIGFGNFGDDNLGFGNLGSYNVGFGNLGNDNLGFANTGSNNIGFANTGSNNIGIGLTGDGQIGFGSLNSGSGNIGLFNSGSGNIGFFNSGNGNVGIGNTGTANFGLGNTGSTNTGFFNSGDVNTGIGNTGSFNTGSFNPGDSNTGDFNPGSYNTGLGNTGDVDTGAFISGSYSNGFLWSGNYQGLIGLHAALAIPEIALTFGVDIPIHIPINIDAGVVTLQGFSIVAAENNIDFTPIIIPTINITLPTAAITVGGPTTSIGITASAGIGSITIPIIDIPATSGFGNSTTSPSSGFFNSGAGSASGFLNVVAGASGISGYLNVGALGSGVTNVGHTVSGFYNASALDLVTPAFASGLMRDGMGTMTLNLGLANLGSNNAGFGNTGIFDVGVANLGNYNIGFGNFGDDNLGFANLGSYNIGVANTGSNNIGFANTGSNNIGIGLTGTGQIGIGALNSGSGNIGLFNSGDGNIGFFNSGTGNFGIGNTGTGNFGIGNSGSTSTGLFNSGDGNTGGFNPGNFNTGNFNTGSFNTGGFNAGNTNTGHFNTGNYNTGIANTGDVSTGAFISGNYSNGILWRGDYQGLIGYSYALTIPEIPAHLDVNIPIDIPITGSFTDLVVDNFTIPIIGFESFAFSFHIHTEPDIGPIIVPSFVLSVPTFAIAVGGPTTAINISATAGLGPITIPIIDIPAAPGIGNSTTSPSSGFFNTGAGTASGFGNVGGNTSGLWNLASAASGVSGLLNVGALGSGVANVGNTISGIYNTSPLDLGTPAFGSGLANIAGLLQGGAGTTILDLAGLGNLNVGLANLGGSNFGIGNTGIFNVGFANVGNHNIGLANLGNYSVGFANSGNYHIGIANTGSANIGFANTGSGNIGIGLTGTGQIGFGSFNSGSHNIGLFNSGDGNVGFFNSGTGNVGIGNTGTANFGIANSGSFNTGLGNTGSTNTGLFNPGNVNTGVGNTGSINTGSINTGSFNTGSTNTGSFNLGDHNTGSFNSGDYNTGYFNAGDYNTGVANTGNVNTGAFISGNYSNGFFWRGDYQGLIGLSTTITIPEIPYRYDLSVPIDIPITGTVVATTPNSFTIPGFQIRVLLGPAAVLVNEMIGPITIDVNQVIAIDSPIQQTISMVGTGGFGPIPIGISIGGTPGFGNSTTGPSSGFFHTGAGHVSGFGNFGAGNMSGSGNFGAGNSGFFNAGGLGNSGLLNFGALQSGLANLGNTISGVYNTSTLDLATPAFGSGIANIGANLAGLFLDNTGNLTLNFGVANQGGLNAGIGNLGSVNIGFVNTGDSNLGIGNLGDLNFGGVNIGGNNIGIANTGIFDIGLANLGSYNIGLANLGDDNLGFGNAGSYNIGFANFGSDNLGFANTGSYNIGFANTGNNNIGVGLTGNGQIGIGSLNSGSNNIGLFNSGSGNIGFFNSGTGNVGIFNTGTGNFGLANSGGFNTGIGNAGSTNTGVFNPGDLNTGSFNPGSFNTGGFNPGSGNTGYLNTGDYNTGVANTGDVDTGAFITGSYSNGFLVSGDYQGLIGLPLLGIPVTPGYFNLTGGPSSGFFNSGAGSVSGFVNSGAGLSGYLNTGALGSGVANVGNTISGWLNASALDLATPGFLSGIGNFGTNLAGFFRG

SEQ ID NO: 64365 - protein, 256 aa, Mycobacterium tuberculosis
MEFLRHGGRIAMAHRGFTSFRLPMNSMGAFQEAAKLGFRYIETDVRATRDGVAVILHDRRLAPGVGLSGAVDRLDWRDVRKAQLGAGQSIPTLEDLLTALPDMRVNIDIKAASAIEPTVNVIERCNAHNRVLIGSFSERRRRRALRLLTKRVASSAGTGALLAWLTARPLGSRAYAWRMMRDIDCVQLPSRLGGVPVITPARVRGFHAAGRQVHAWTVDEPDVMHTLLDMDVDGIITDRADLLRDVLIARGEWDGA

SEQ ID NO: 64366 - protein, 443 aa, Mycobacterium tuberculosis
MRCSVFGTGYLGATHAVGMAQLGHEVVGVDIDPGKVAKLAGGDIPFYEPGLRKLLTDNLAAGRLRFTTDYDMAADFADVHFLGVGTPQKIGEYGADLRHVHAVIDALVPRLVRASILVGKSTVPVGTAAELGHRAGALAPRGVDVEIAWNPEFLREGFAVHDTLNPDRIVLGVQDDSTRAEVAVRELYAPLLAAGVPFLVTDLQTAELVKVSANAFLATKISFINAISEVCEAAGADVSQLADALGYDPRIGRQCLNAGLGFGGGCLPKDIRAFMARAGELGADQALTFLREVDSINMRRRTKMVELATTACGGSLLGANIAVLGAAFKPESDDVRDSPALNVAGQLQLNGATVHVYDPKALDNAHRLFPTLNYAVSVAEACERADAVLVLTEWREFIDLEPADLANRVRARVIVDGRNCLDVTRWRRAGWRVFRLGVPRLGH

SEQ ID NO: 64367 - protein, 226 aa, Mycobacterium tuberculosis
MAGQSDRKAALLDQVARVGKALANGRRLQILDLLAQGERAVEAIATATGMNLTTASANLQALKSGGLVEARREGTRQYYRIAGEDVARLFALVQVVADEHLADVAVAAADVLGSPEDAITRAELLRRREAGEVTLVDVRPHEEYQAGHIPGAINIPIAELADRLAELTGDRDIVAYCRGAYCVMAPDAVRIARDAGREVKRLDDGMLEWRLAGLPVDEGAPVGHGD

SEQ ID NO: 64368 - protein, 625 aa, Mycobacterium tuberculosis; identical to SEQ ID NO: 62563

SEQ ID NO: 64369 - protein, 3300 aa, Mycobacterium tuberculosis
MSFAVLPPEINSARLYVGAGLAPMLDAAAAWDGLADELGSAAASFSAVTAGLAGSSWLGAASTAMTGAAAPYLGWLSAAAAQAQQAATQTRLAAAAFEAALAATVHPAIISANRALFVSLVVSNLLGQNAPAIAATEAAYEQMWAQDVAAMFGYHAGASAAVSALTPFGQALPTVAGGGALVSAAAAQVTTRVFRNLGLANVGEGNVGNGNVGNFNLGSANIGNGNIGSGNIGSSNIGFGNVGPGLTAALNNIGFGNTGSNNIGFGNTGSNNIGFGNTGDGNRGIGLTGSGLLGFGGLNSGTGNIGLFNSGTGNVGIGNSGTGNWGIGNSGNSYNTGFGNSGDANTGFFNSGIANTGVGNAGNYNTGSYNPGNSNTGGFNMGQYNTGYLNSGNYNTGLANSGNVNTGAFITGNFNNGFLWRGDHQGLIFGSPGFFNSTSAPSSGFFNSGAGSASGFLNSGANNSGFFNSSSGAIGNSGLANAGVLVSGVINSGNTVSGLFNMSLVAITTPALISGFFNTGSNMSGFFGGPPVFNLGLANRGVVNILGNANIGNYNILGSGNVGDFNILGSGNLGSQNILGSGNVGSFNIGSGNIGVFNVGSGSLGNYNIGSGNLGIYNIGFGNVGDYNVGFGNAGDFNQGFANTGNNNIGFANTGNNNIGIGLSGDNQQGFNIASGWNSGTGNSGLFNSGTNNVGIFNAGTGNVGIANSGTGNWGIGNPGTDNTGILNAGSYNTGILNAGDFNTGFYNTGSYNTGGFNVGNTNTGNFNVGDTNTGSYNPGDTNTGFFNPGNVNTGAFDTGDFNNGFLVAGDNQGQIAIDLSVTTPFIPINEQMVIDVHNVMTFGGNMITVTEASTVFPQTFYLSGLFFFGPVNLSASTLTVPTITLTIGGPTVTVPISIVGALESRTITFLKIDPAPGIGNSTTNPSSGFFNSGTGGTSGFQNVGGGSSGVWNSGLSSAIGNSGFQNLGSLQSGWANLGNSVSGFFNTSTVNLSTPANVSGLNNIGTNLSGVFRGPTGTIFNAGLANLGQLNIGSANLGDFNLGSGNVGSFNVFSGNQGSYNIGPANLGNYNIGFANLGNYNIGFGNAGDFNQGFANTGNNNIGFANTGNNNIGIGLSGDNQQGFNFAGGWNSGTANIGLFNSGTNNVGIGNSGTGNWGIGNSGSGNTGIGNTGSTNTGFFNTGIVNTGVANAGSYNTGWYNTGDTNTGIANLGDFNTGFYNTGNFSTGFANQGDIATGAFITGDMGNGAFWRGDQQGLFSAGYRVHVPEIPAHVTVEVPVNIPITASFTNTVYSGITLEQINFGFTIDIAGIPLLAGAISKAVLPPITGTGPAITVNIGDPGGSTAIRIPATASVGPFDVTFVNIAATTGFFNATTDPSSGFFNGGPGTVSGIANIGANISGFQNVANSATSGFNNYGSLQSGLANLGDTVSGVFNTGIGAPANVSGMFNIGSNLAGFFHDQATGMSMFNLGLGNIGQFNVGFSNVGDSNAGLANIGSFNLGSGNLGSFNVFGGNQGSYNIGPANLGNYNIGLGNLGSYNFGFGNAGDFNLGFANTGNNNIGFANTGNNNIGIGLSGDNQQGFNFAGGWNSGSGNSGLFNSGTNNIGLFNSGTGNIGIGNSGTGNWGIANTGDTNTGIFNTGDVNTGLLNAGNVNTGIFNTGHYNTGSFNAGSFNTAGFNPGSYNTGYLNTGSYNTGLANSGDVNTGGFITGNYSNGFWWRGDYQGLAGISQTITVPDTAVPVKLHVPIFLDIPVTGTLGTFTVHGFRFPEITGDIFLIGIPFNAATLDAFSFPNISIVLPNIGINLGSGPDPLIDIAGTGGLLPIKIPLIDIPAAPGFGNSTTTPSSGFFNAGTGTVSGVGNVGSNSSGFFNLTSGSSGISGVQNFGELISGGFNFGNTVSGLVNASTLGLSMPANLSGGGNVGATVAGFVNNTQILNLGFGNVGSGNVGHGNIGDSNVGLGNLGNANVGHGNIGSFNVFSGNRGSYNIGPANLGNYNIGLGNLGSYNFGFGNAGDFNLGFANSGSNNIGFANTGNNNIGIGLSGHNQQGFGSWNSGTANTGLFNSGTNNIGLFNSGTGNIGIGNSGIGNTGIGNPGVGNTGLGNSGTGNWGLWNPGTGNMGVANVGTYNTGGYNVGSTNTGIANVGIANTGSYNTGSTNTGSFNDGDFNTGFYNTGDYNTGFYNTGDVNTGAFIGGNFSNGAFWQSDHQGQWGAHYAITVPQIPLLNFSLNIPVNIPIHLDFGTLAVNGFQIPAITLRALGVTHFSVGPIIVPRIAGTLPVIDINIGDPGGSSSIPITITSGAGPVVIPLLDIPPAPGFGNSTTGPSSGFFNSGTGSSSGFGNVGANNSGFWNTAFAGIGNSGLQNFGSLQSGWANLGNTVSGFYNTSAADFATPANLSGLSNVGADLTGVLRGPNGSTFNAGLANLGQFNVGSANLGSANLGSANLGSANLGNSNVGFGNIGNANIGGANIGDFNVGIANTGPGLTAAVNNIGIGNTGNYNIGVGNTGNYNIGFGNTGNNNIGIGLSGDNQIGFGPLNAGIANMGLFNLGDNNFGMANAGNFNQGIANTGNNNIGLFNTGNNNVGIWLTGDGLSGFSSLNSGAGNTGFFNSGTANTGLFNSGTGNTGLFNSGTGNVGIGNMGTGGFGVGLSGDSQVGIGGTNSGSFNIGLFNSGTGNVGIGNSGTGNVGIGNTGTGNTGIGNSGNYNTGLLNAGLVNTGIANPGNHNTGLFNIGTFNTGIANPGHYNTGSYNTGSYNTGMANAGDYGTGAFITGSMNNGLLWRADRQGLLAANYTITIERPAAFLNVDIPVNIPITGDITNVSIPAITFPRIDASGSVDIGILSGTVLAPVGPITLHGGDASAPLDTPIEIDFGPSPAINLNIGKPDGSTVINIVGGAGAGPISIPIIDLRPAPGFFNATTGPSSGFLNWGAGSASGLLNFGNNSGLYNFATSSMGNSGFQNYGSLQSGWANLGNSISGIYNTGLGAPANVSGLLNIGTNLAGWLQNGPTETTFSVGLANLGFWNLGSANIGNYNLGSANIGVYNLGSANIGDFNLGSANIGDFNLGSANIGSSNIGFGNVGPGLTAAIGNIGFGNTGNGNIGIGNTGTGNIGFGNTGNGNIGIGLTGDTMTGFGGWNSGTGNIGLFNSGTGNIGFGNSGTGNWGIGNSGDYNTGIGNTGSTNSGFFNTGLVNTGIGNSGDYNTGLFNAGNTNTGSFNPGDYNTGGFNPGNYNTGYFNPGNSNTGIANSGDVNTGAFNSGNYSNGFFWRGDYQGLGGFAYQSAVSEIPWSYDRFQH

SEQ ID NO: 64370 - protein, 432 aa, Mycobacterium tuberculosis; identical to SEQ ID NO: 62562

SEQ ID NO: 64371 - protein, 460 aa, Mycobacterium tuberculosis
MSIRPAENSTLDIRHVIGIGTPKAVDLWLDVVTELPDRARELGSLSKAELGKLGPLLDGTNAVELFESIDDKLAAEALHAMDPSLAATFLEALDSDHAANILREFKEPKREALLTLLPLERAMVLRGLLSWPEDCAAAHMVPETLTVRPNMTVSQAVASVRERASGLRSDARTTAYVYVTDADSHLLGVIAFRALVLANPEQRVRELMGDDLIVVSPLTDKELAAQTIMGHNLMAVPVVDADNRLLGIIAEDEAIDIAEEEATEDAERQGGSAPLEVPYLRASPWLLWRKRVVWLLVLFAAEAYTGSVLRAFSDEMEAVIALAFFIPLLIGTGGNTGTQIATTLVRAMATGQVRFRDVPAVLAKELSTGVLVGLTMAAAAVVRAWTLGVGPQVTLTVALTVAAIVVWSSLVAAVLPPLLKKLRIDPAIVSGPMIATIVDGTGLLIYFLVAHLTLTELHGL

SEQ ID NO: 64372 - protein, 344 aa, Mycobacterium tuberculosis [sequence omitted]

SEQ ID NO: 64373 - protein, 799 aa, Mycobacterium tuberculosis
MTTIESRPPSPEDLADNAQQPCGHGRMMRKEDPRFIRGRGTYVDDVALPGMLHLAILRSPYAHARIVRIDVTAAQAHPKVKAVVTGADLAAKGLAWMPTLANDVQAVLATDKTRFQGQEVAFVVAEDRYSARDACELVDVDYEPRDPVVDARTALDPSAPVIRTDLEGKSDNHIFDWETGDAAATEAVFAKADVVVQQEIVYPRVHPAPMETCGAVADLDPVTGKLTLWTTSQAPHAHRTLYALVAGLPEHKIRVISPDIGGGFGNKVPIYPGYVCAIVASLLLDKPVKWMEDRSENLTSTGFARDYIMVGEIAANRDGKILAIRSNVLADHGAFNAQAAPAKYPAGFFGVFTGSYDIEAAYCHMTAVYTNKAPGGVAYACSFRITEAVYFVERLVDCLAFELKMDPAELRLRNLLRPNQFPYQSKTGWVYDSGDYETTMRKAMNMIGYEALRAEQKQRRARGELMGIGMSFFTEAVGAGPRKDMDILGLGMADGCELRVHPTGKAVLRLSVQTQGQGHETTFAQIVAEELGIAPDDIEVVHGDTDQTPFGLGTYGSRSTPVSGGAAALVARKVRDKAKIIASGMLEVSVADLQWEKGKFHVKGDPSAAVTIADIAMRAHGAGDLPEGIEGGLDAEVCYNPSNLTYPYGAYFCVVDIDPGTAVVKVRRFLAVDDCGTRINPMIIEGQVHGGIVDGIGMALMEMIAFDEDGNCLGGSLMDYLIPTALEVPHLETGHTVTPSPHHPIGAKGIGESATVGSPPAVVNAVVDALAPFGVRHADMPLTPSRVWEAMQGRATPPI

SEQ ID NO: 64374 - protein, 179 aa, Mycobacterium tuberculosis; identical to SEQ ID NO: 62319

SEQ ID NO: 64375 - protein, 848 aa, Mycobacterium tuberculosis
MDSFNPTTKTQAALTAALQAASTAGNPEIRPAHLLMALLTQNDGIAAPLLEAVGVEPATVRAETQRLLDRLPQATGASTQPQLSRESLAAITTAQQLATELDDEYVSTEHVMVGLATGDSDVAKLLTGHGASPQALREAFVKVRGSARVTSPEPEATYQALQKYSTDLTARAREGKLDPVIGRDNEIRRVVQVLSRRTKNNPVLIGEPGVGKTAIVEGLAQRIVAGDVPESLRDKTIVALDLGSMVAGSKYRGEFEERLKAVLDDIKNSAGQIITFIDELHTIVGAGATGEGAMDAGNMIKPMLARGELRLVGATTLDEYRKHIEKDAALERRFQQVYVGEPSVEDTIGILRGLKDRYEVHHGVRITDSALVAAATLSDRYITARFLPDKAIDLVDEAASRLRMEIDSRPVEIDEVERLVRRLEIEEMALSKEEDEASAERLAKLRSELADQKEKLAELTTRWQNEKNAIEIVRDLKEQLEALRGESERAERDGDLAKAAELRYGRIPEVEKKLDAALPQAQAREQVMLKEEVGPDDIADVVSAWTGIPAGRLLEGETAKLLRMEDELGKRVIGQKAAVTAVSDAVRRSRAGVSDPNRPTGAFMFLGPTGVGKTELAKALADFLFDDERAMVRIDMSEYGEKHTVARLIGAPPGYVGYEAGGQLTEAVRRRPYTVVLFDEIEKAHPDVFDVLLQVLDEGRLTDGHGRTVDFRNTILILTSNLGSGGSAEQVLAAVRATFKPEFINRLDDVLIFEGLNPEELVRIVDIQLAQLGKRLAQRRLQLQVSLPAKRWLAQRGFDPVYGARPLRRLVQQAIGDQLAKMLLAGQVHDGDTVPVNVSPDADSLILG

SEQ ID NO: 64376 - protein, 690 aa, Mycobacterium tuberculosis
MADSSAIYLAAPESQTGKSTIALGLLHRLTAMVAKVGVFRPITRLSAERDYILELLLAHTSAGLPYERCVGVTYQQLHADRDDAIAEIVDSYHAMADECDAVVVVGSDYTDVTSPTELSVNGRIAVNLGAPVLLTVRAKDRTPDQVASVVEVCLAELDTQRAHTAAVVANRCELSAIPAVTDALRRFTPPSYVVPEEPLLSAPTVAELTQAVNGAVVSGDVALREREVMGVLAAGMTADHVLERLTDGMAVITPGDRSDVVLAVASAHAAEGFPSLSCIVLNGGFQLHPAIAALVSGLRLRLPVIATALGTYDTASAAASARGLVTATSQRKIDTALELMDRHVDVAGLLAQLTIPIPTVTTPQMFTYRLLQQARSDLMRIVLPEGDDDRILKSAGRLLQRGIVDLTILGDEAKVRLRAAELGVDLDGATVIEPCASELHDQFADQYAQLRKAKGITVEHAREIMNDATYFGTMLVHNCHADGMVSGAAHTTAHTVRPALEIIKTVPGISTVSSIFLMCLPDRVLAYGDCAIIPNPTVEQLADIAICSARTAAQFGIEPRVAMLSYSTGDSGKGADVDKVRAATELVRAREPQLPVEGPIQYDAAVEPSVAATKLRDSPVAGRATVLIFPDLNTGNNTYKAVQRSAGAIAIGPVLQGLRKPVNDLSRGALVDDIVNTVAITAIQAQGVHE

SEQ ID NO: 64377 - protein, 222 aa, Mycobacterium tuberculosis; identical to SEQ ID NO: 62861

SEQ ID NO: 64378 - protein, 376 aa, Mycobacterium tuberculosis
MPARRSAARIDFAGSPRPTLGVEWEFALVDSQTRDLSNEATAVIAEIGENPRVHKELLRNTVEIVSGICECTAEAMQDLRDTLGPARQIVRDRGMELFCAGTHPFARWSAQKLTDAPRYAELIKRTQWWGRQMLIWGVHVHVGIRSAHKVMPIMTSLLNYYPHLLALSASSPWWGGEDTGYASNRAMMFQQLPTAGLPFHFQRWAEFEGFVYDQKKTGIIDHMDEIRWDIRPSPHLGTLEVRICDGVSNLRELGALVALTHCLIVDLDRRLDAGETLPTMPPWHVQENKWRAARYGLDAVIILDADSNERLVTDDLADVLTRLEPVAKSLNCADELAAVSDIYRDGASYQRQLRVAQQHDGDLRAVVDALVAELVI

SEQ ID NO: 64379 - protein, 405 aa, Mycobacterium tuberculosis
MRSVQEHQRVVAEMMRACRPITVPLTQAQGLVLGGDVVAPLSLPVFDNSAMDGYAVRAEDTSGATPQNPVMLPVAEDIPAGRADMLTLQPVTAHRIMTGAPVPTGATAIVPVEATDGGVDSVAIRQQATPGKHIRRSGEDVAAGTTVLHNGQIVTPAVLGLAAALGLAELPVLPRQRVLVISTGSELASPGTPLQPGQIYESNSIMLAAAVRDAGAAVVATATAGDDVAQFGAILDRYAVDADLIITSGGVSAGAYEVVKDAFGSADYRGGDHGVEFVKVAMQPGMPQGVGRVAGTPIVTLPGNPVSALVSFEVFIRPPLRMAMGLPDPYRPHRSAVLTASLTSPRGKRQFRRAILDHQAGTVISYGPPASHHLRWLASANGLLDIPEDVVEVAAGTQLQVWDLT

SEQ ID NO: 64380 - protein, 540 aa, Mycobacterium tuberculosis; identical to SEQ ID NO: 62326

SEQ ID NO: 64381 - protein, 236 aa, Mycobacterium tuberculosis
MRYPLAVAQLGFQRARTEENKRQRAAALVEAARSLALETGVASVTLTAVAGRAGIHYSAVRRYFTSHKEVLLHLAAEGWARWSGTVCEQLGEPGPMSAPRVAEALANGLAADPLFCDLLANLHLHLEQEVDVDRVIEVKRTSIAAVIALVDAIESALPALGRSGAFDILLAAYSLAATLWQIANPPERLTDAYAEEPELLPPEWNLDFAAALTRLLTATLLGLLAGSPCECRSPTR

SEQ ID NO: 64382 - protein, 507 aa, Mycobacterium tuberculosis; identical to SEQ ID NO: 62787

SEQ ID NO: 64383 - protein, 464 aa, Mycobacterium tuberculosis; identical to SEQ ID NO: 62685

SEQ ID NO: 64384 - protein, 428 aa, Mycobacterium tuberculosis; identical to SEQ ID NO: 62457

SEQ ID NO: 64385 - protein, 286 aa, Mycobacterium tuberculosis; identical to SEQ ID NO: 62770

SEQ ID NO: 64386 - protein, 224 aa, Mycobacterium tuberculosis; identical to SEQ ID NO: 62588

SEQ ID NO: 64387 - protein, 369 aa, Mycobacterium tuberculosis; identical to SEQ ID NO: 62587

SEQ ID NO: 64388 - protein, 410 aa, Mycobacterium tuberculosis; identical to SEQ ID NO: 62591

SEQ ID NO: 64389 - protein, 227 aa, Mycobacterium tuberculosis
MTSVLIVEDEESLADPLAFLLRKEGFEATVVTDGPAALAEFDRAGADIVLLDLMLPGMSGTDVCKQLRARSSVPVIMVTARDSEIDKVVGLELGADDYVTKPYSARELIARIRAVLRRGGDDDSEMSDGVLESGPVRMDVERHVVSVNGDTITLPLKEFDLLEYLMRNSGRVLTRGQLIDRVWGADYVGDTKTLDVHVKRLRSKIEADPANPVHLVTVRGLGYKLEG

SEQ ID NO: 64390 - protein, 249 aa, Mycobacterium tuberculosis
VVDSPTILVEPMNQSSVFQPPDRQRVDERIATTIADAILDGVFPPGSTLPPERDLAERLGVNRTSLRQGLARLQQMGLIEVRHGSGSVVRDPEGLTHPAVVEALVRKLGPDFLVELLEIRAALGPLIGRLAAARSTPEDAEALCAALEVVQQADTAAARQAADLAYFRVLIHSTRNRALGLLYRWVEHAFGGREHALTGAYDDADPVLTDLRAINGAVLAGDPAAAAATVEAYLNASALRMVKSYRDRA

SEQ ID NO: 64391 - protein, 468 aa, Mycobacterium tuberculosis; identical to SEQ ID NO: 62595

SEQ ID NO: 64392 - protein, 309 aa, Mycobacterium tuberculosis
MIRIGTRGSLLATTQAATVRDALIAGGHSAELVTISTEGDRSMAPIASLGVGVFTTALREAMEAGLVDAAVHSYKDLPTAADPRFTVAAIPPRNDPRDAVVARDGLTLGELPVGSLVGTSSPRRAAQLRALGLGLEIRPLRGNLDTRLNKVSSGDLDAIVVARAGLARLGRLDDVTETLEPVQMLPAPAQGALAVECRAGDSRLVAVLAELDDADTRAAVTAERALLADLEAGCSAPVGAIAEVVESIDEDGRVFEELSLRGCVAALDGSDVIRASGIGSCGRARELGLSVAAELFELGARELMWGVRH

SEQ ID NO: 64393 - protein, 565 aa, Mycobacterium tuberculosis
MTRGRKPRPGRIVFVGSGPGDPGLLTTRAAAVLANAALVFTDPDVPEPVVALIGTDLPPVSGPAPAEPVAGNGDAAGGGSAQEHGRAASAVVSGGPDIRPALGDPADVAKTLTAEARSGVDVVRLVAGDPLTVDAVISEVNAVARTHLHIEIVPGLAASSAVPTYAGLPLGSSHTVADVRIDPENTDWDALAAAPGPLILQATASHLAESARSLIDHQLAESTPCVVTAHGTTCQQRSVETTLQGLTDPAVLGATDPACSANGRDSQAGPLIVTIGKTVTSRAKLNWWESRALYGWTVLVPRTKDQAGEMSERLTSYGALPVEVPTIAVEPPRSPAQMERAVKGLVDGRFQWIVFTSTNAVRAVWEKFGEFGLDARAFSGVKIACVGESTADRVRAFGISPELVPSGEQSSLGLLDDFPPYDSVFDPVNRVLLPRADIATETLAEGLRERGWEIEDVTAYRTVRAAPPPATTREMIKTGGFDAVCFTSSSTVRNLVGIAGKPHARTIIACIGPKTAETAAEFGLRVDVQPDTAAIGPLVDALAEHAARLRAEGALPPPRKKSRRR

SEQ ID NO: 64394 - protein, 329 aa, Mycobacterium tuberculosis
MSMSSYPRQRPRRLRSTVAMRRLVAQTSLEPRHLVLPMFVADGIDEPRPITSMPGVVQHTRDSLRRAAAAAVAAGVGGLMLFGVPRDQDKDGVGSAGIDPDGILNVALRDLAKDLGEATVLMADTCLDEFTDHGHCGVLDDRGRVDNDATVARYVELAVAQAESGAHVVGPSGMMDGQVAAIRDGLDAAGYIDVVILAYAAKFASAFYGPFREAVSSSLSGDRRTYQQEPGNAAEALREIELDLDEGADIVMVKPAMGYLDVVAAAADVSPVPVAAYQVSGEYAMIRAAAANNWIDERAAVLESLTGIRRAGADIVLTYWAVDAAGWLT

SEQ ID NO: 64395 - protein, 259 aa, Mycobacterium tuberculosis; identical to SEQ ID NO: 62662

SEQ ID NO: 64396 - protein, 324 aa, Mycobacterium tuberculosis; identical to SEQ ID NO: 62663

SEQ ID NO: 64397 - protein, 594 aa, Mycobacterium tuberculosis
MSNLLVTPELVAAAAADLAGIGSAIGAANAAAGAPTMALLAAGADEVSAAVAAVFSSYAQQYQALSAAAAAFHDQFVRALAAGAGAYAGAEAANVEQQLLNAINAPTLALLGRPLIGNGADGAAGTGQAGGAGGLLYGNGGNGGSGAAGQAGGAGGAAGLIGHGGTGGAVTGVSTTGGPGGHGGDAGLYGFGGAGGAGGFGQSGAAGGAGGAGGWLYGDGGDGGAGDNGGNESGTGVSAVGGVGGAGGAGGLLFGNGGDGGVGGDGGDGSSTQDSGGDGGAGGAGGAGGWLLGNGGAGGAGGAASIKVATGGLGGDGGDAGLFGFGGDGGWGGRGVDARFGAAGGAAGAGGAGGWLYGDGGAGGVGGVGGAVFSLSSGDGGAGGAGGGGGWLFGNGGDGGAGGGGGGRFGSGSGAGGDGAVGGAGGAGAWFGNGGAGGVGGGGGRGTTAIGGDGGAGGAGGAGGWLYGDGGAGGAGGGGGRGGTGNDGGDGGDGGRGGDAQLLGNGGDGGAGGAGGPAGLALPPGPARPAGAAVPAVRCSAAPARPARTADPWLAPIFARSTLRHSHHLGGIAQTGAVADQQGQIAGLGRAGRQ

SEQ ID NO: 64398 - protein, 335 aa, Mycobacterium tuberculosis
MTEIATTSGARSVGLLSVGAYRPERVVTNDEICQHIDSSDEWIYTRTGIKTRRFAADDESAASMATEACRRALSNAGLSAADIDGVIVTTNTHFLQTPPAAPMVAASLGAKGILGFDLSAGCAGFGYALGAAADMIRGGGAATMLVVGTEKLSPTIDMYDRGNCFIFADGAAAVVVGETPFQGIGPTVAGSDGEQADAIRQDIDWITFAQNPSGPRPFVRLEGPAVFRWAAFKMGDVGRRAMDAAGVRPDQIDVFVPHQANSRINELLVKNLQLRPDAVVANDIEHTGNTSAASIPLAMAELLTTGAAKPGDLALLIGYGAGLSYAAQVVRMPKG

SEQ ID NO: 64399 - protein, 417 aa, Mycobacterium tuberculosis
MNLQLFLLLIVVVTALAFDFTNGFHDTGNAMATSIASGALAPRVAVALPAVLNLIGAFLSTAVAATIAKGLIDANLVTLELVFAGLVGGIVWNLLTWLLGIPSSSSHALIGGIVGATIAAVGLRGVIWSGVVSKVIVPAVVAALLATLVGAVGTWLVYRTTRGVAEKRTERGFRRGQIGSASLVSLAHGTNDAQKTMGVIFLALMSYGAVSTTASVPPLWVIVSCAVAMAAGTYLGGWRIIRTLGKGLVEIKPPQGMAAESSSAAVILLSAHFGYALSTTQVATGSVLGSGVGKPGAEVRWGVAGRMVVAWLVTLPLAGLVGAFTYGLVHFIGGYPGAILGFALLWLTATAIWLRSRRAPIDHTNVNADWEGNLTAGLEAGAQPLADQRPPVPAPPAPTPPPNHRAPQFGVTTRNAP

SEQ ID NO: 64400 - protein, 234 aa, Mycobacterium tuberculosis; identical to SEQ ID NO: 62408

SEQ ID NO: 64401 - protein, 241 aa, Mycobacterium tuberculosis; identical to SEQ ID NO: 62758

SEQ ID NO: 64402 - protein, 408 aa, Mycobacterium tuberculosis
MSVDDSADVVVVGAGPAGSAAAAWAARAGRDVLVIDTATFPRDKPCGDGLTPRAVAELHQLGLGKWLADHIRHRGLRMSGFGGEVEVDWPGPSFPSYGSAVARLELDDRIRKVAEDTGARMLLGAKAVAVHHDSSRRVVSLTLADGTEVGCRQLIVADGARSPLGRKLGRRWHRETVYGVAVRGYLSTAYSDDPWLTSHLELRSPDGAVLPGYGWIFPLGNGEVNIGVGALSTSRRPADLALRPLISYYTDLRRDEWGFTGQPRAVSSALLPMGGAVSGVAGSNWMLIGDAAACVNPLNGEGIDYGLETGRLAAELLDSRDLARLWPSLLADRYGRGFSVARRLALLLTFPRFLPTTGPITMRSTALMNIAVRVMSNLVTDDDRDWVARVWRGGGQLSRLVDRRPPFS

SEQ ID NO: 64403 - protein, 335 aa, Mycobacterium tuberculosis; identical to SEQ ID NO: 62465

SEQ ID NO: 64404 - protein, 463 aa, Mycobacterium tuberculosis; identical to SEQ ID NO: 62306

SEQ ID NO: 64405 - protein, 1306 aa, Mycobacterium tuberculosis
MSFVIATPEMLTTAATDLAKIGSTITAANTAAAAVAKVLPASADEVSVAVAALFGTHAQEYQTVSAQVATFHDRFVQTLSAAASSYVAAEAVNVEQSLLAAVNAPTQALFGRPLIGNGADGSPGTGQAGGPGGILYGNGGNGGSGAPGQRGGAGGAAGLIGNGGNGGAGGVGTTGGAGGHGGAGGWLYGNGGAGGFGGAGAVGGNGGAGGTAGLFGVGGAGGAGGNGIAGVTGTSASTPGGSGTAGGAGGIGGNGGAGGAGGVLMGNGGNGGAGGEGGPGGAGGAGASGAHATNLGADGQAGGNGGNGGAGGTGGVGGPGGGHGLLGLGGSHGAGGAGGSGGDGGAPGDGGNGATGTWGHNLGAGGTGGNGGNPGAGGAGGAGGASVGGSAHGANGAPGTTSTSGGNGGDGGKGADAISSGQTGANGGRGGDGGQVGNGGAGGAGGRGGAGGLGFGSEAPGRPGGAGGTGGAGGNGGTQAGDGGTGGAGGAGGDGGSGGAGSIGFNASAPGAAGSPGGNGGNGGPGGAGGEGGAGGLALAASGQNGSQGAGGDGGAGGNGGTPGNGGHGAAGALGVNGGVGGAGGHGGDPGVGGAGGQGGSGSTPGANGAPGNTPTSGGNGGNGGRGADATGFGQTGASGGRGGDGGLVGNGGAGGAGGNGSKGLPGLGRLGNPGLDGGTGGNGGAGGSGGAWAGNGGTGGAGGTGGVGGTGGSGSDGVNGSSAGADGHPGGTGGVGGTGGKGGDGGDGGAAPNGVAGSQGPGGAGGDGGTGGVGGNGGRGIDGADGATAGARGQDGGAGGAGGKGGRGGTGGPGGAGPAGTTGSQGAGGNGGSGGTGGDPGDGGNGANGSVFTNNGIGGNGGNGGNAGPSGAGGSGGAGSTFGATGSSSSIHVNGGNGGNGGNGDHALSGNGAAGGNGGNGGNGSLRGSGGAGGHGGNGGNASRGMGGDGGTGGAGGNAGQIGNGGAGGNGGDGGTGSDGNPGAITGSGGRGGDGGVGGQGGSVAGDGADGGRGGAGGTGGTGLRGTTGATGATGTFDAGADGHGGNGGTGGVGGTGGAGGGGGNGGAGGKALSPTGNNGSQGAGGDGGAGGAGGTGGTGGDGGRGAHGTLFSSLAGTGGTGGNGGTGGTGGTGGAGGAGGTGSTLGATGATGAAGRAGNGGVGGSGGLGSAFGPGGTGGMGGAGGTSTVSAGGDGGRGGFGGDGLDASSGGNGGDGGHGGDGFRTAGAGGRGGDGGKGADPGGLFPIPGAGGKGGTGGTGGTAHLGPLAIIGQSGQPGQFGSPGADGRGGAGGAGGGGGAGGSF

SEQ ID NO: 64406 - protein, 240 aa, Mycobacterium tuberculosis; identical to SEQ ID NO: 62755
